United States Patent Application Publication US 2008/0114160 A1 - sequence listing, part 25

SEQ ID NO: 7520 - DNA, 60937 bp, Oryza sativa
tgactggatcctcatcccacatgagacttgcaatcataaaaaaaaggggctttgtttctgtttcacccattcgtatctattagtcttgtcaaacttagaaacttttgttttggacgaagagttgaaggacaaattcacaatcatctataagaatttagttttccaacgtcgaaatctataaatggtattgtaaatacaaagagtgtgttctcagggatgtggggattattaatgaaacaccaatgaacataggagattgtttgaggagaagaggtgtactaaatacagggttatggatgtcttttgtgctagtttttgttggctagtgtccttaacttgcatgtggtttccaaaggaatctcaacatgaagagatgaagagacctacagcaagaggaataaccaagcagaaagactaatggaactgaagccggtggtgtaaatgatctacctgatgctatatagttatagtggtcgatacaaaagcaaaaagactacaatgcccctgctttatcaaatctcaatacaactattcctcaatttatctactcccaatacaattattccttactttcacaaactccgatgcaatagtgaacttattttgggacaaatggaaaaagctaaaaatgggacagagaggaagcataaagattctacctttttcttgtttcctgctggtctacagtctagaagcattcttcctctctagcactgcagtccactatatttatggttttccaggatgctgcaaagcacacttcattttcattcttcaaagacaaagggctggttagaaacaacaaaaataagaaaaacagtatgacctgaattgcagtacacaaaaaggacagcatctcaccacttgaactggcgttcaacttaacttgtcggtcatcgctgttcatcattcaaatgcttgctctctgttcactctctcctctcattgatcctctctcttgtgcattctcgtcaacaaaatcttagcaacttgtttccggttagagaatagctcggacacttttatcaagtgaagtcaatgggttcaactgttcaagccttccaaaccgcatctttctttcacaagtagtcaccactggtcagggtcattagaaggataattccaaggtgcacctccaaaaatcaagccagcaccaggatgatgtgtggcaaataagctactcagcgcagattttgcagtttctatgtcacgtctgtcagcaccataatcccggtttatgtgaatttctcttaggcatgctggcaggtgatcaatgccaacaggtaagcaagtgccgctgcatttctaccatcccgttgcatcaagccatagctcaagcttctgtaacctgggcatagaacaagctttgaagtccaggaatggcttatgacacctgaacagcaagtgcttgagagctcggaatgccatgcccgtaccggagaagatgactctttcttctgggcacactagaagcctcaagtcgaggtgaacaagggaaggtaaacatgcaagaatagtaacaccatcatccatgggcaatgccttcctaatcgtaagcttcaagctgtgaaggtcacgaagctgtacgatccatgagggtatcctggaaaacaagcaacgttccagatggagcttccagagatggcgcggtggaggggacagtgtgctcaagccatcaacctgcaaccatgaaggaaaatgtttcagcagaacgatgttcctgaggctgccggaagatcgcgagagtcgttcaagggaacagcgcagggcttcaatacggctagtcacatcctccaagggctcactactgctgcagtcaagtttaagatctcttaagttggtcagctcaccaaggcattcaatattgctcattgagttttttattaaatcaaaccactctaggttacgcaaggatttcaggtcgccaatcccattgggcagaactgtatttgctggaataaacagctgtgacaaatggggcaaactaacaatatctgatggaatgctcaattcttctgatgtatgcagctcaattgtctccaaatgccacatcccaccaagttggctaggtagcaccaacttgacatcatgtgaaatctttaaatatctcagcagagaaaatccacagatacctgtaaggtccactctttttcccctccatctccgaggaaattcaagaagtagaactcgcacatatttgaactccaaggatgaaggcctaaaactgtttttgaaaaatgcagctgaacgaacttgtgacagtgatctattgtttgatgctggtatcacaccgtcctcttcatcagcatagtggaaagaaactcgacggatcttcgtgtgcagtcctggtgccacagtacgatcatctattacagaaaagaagttctcctcggcagacttcgacctgataatttccagcattatatcatgtattctgcaggataacacctcatcattgtaatctgtatatatgggttgaaccatgctcctattgataagctcattgaagtagctacctgcaacatcatccacatctagaccactgattttactcacgaagccttcagctatccattgtcttaccaaatcattcttctttattatgtagtcctctggatacatactgacatatagaaggcatgtcttaagatggtgaggaaggttattgtagctcagttccagtatctgcctcattccacccaaggtaggatttccttcaaacatggacctcatagaattatttacatattcccaggtgatatatggttgaccagatagaaggctagctatactgatgattgcaagtggcaagccatcacacttttttagaatattagttgtaacctcttcaaatttattagggaaagcttcatgggatccaaatattctactataaaagagatttcgtgaattttggtcagtaagtgatttcatcttatatatatacgcttgactgttggagcaacaggtggtagcaacagacaaaattcgtgtagttgttaataccctgctgccatacttgttctctggaaaagcacatctaataatgttccactcaaaggaatcccataaatcatctaccacaatgaagtacctgccaaaaaatttcatggatttctctacacagtatcaacgtaatgtagtacatagatgaaattgtgcaaagtgtcttacatatatctatttagaggaatagcttttcggcaagtgaaataaaatgaattactaattatctcacggggtcaatagaaaaaaggaacattgaaattcatctaacttcatgctttctttataaatagaacataagaattcccggccaatgaatcatcccaatgtactccctccgtttcaggttacaagacattttgactttagttaaagtcaaactgcttcaagtttaactaagtgtatagaaaaaataataacattttcaacccaagacaaatttattatgaaaatatattcgattattgatttaatgaaactaatttggtattataaatattactatatttgtctataaactttgtcaaatttgaagtagtttgactttgaccaaagtcaaaacgtcttttaacctgaaacagagggagtataaggctcccatcggatggcccattaagccaaagaaaaagccaaattttaaattttcaaacttaattttgagattgattttgagatattttcaacgtagtttctttttcagcattggcttttaagttaccaagaacacatatataaaagttttacctacaaatttatttttatttcctaataagtcattttggcttattagaaaaaaagcaaaatgatggggccctaatttaatgaacttaagggaactttggaatgtagcactttaaagtagtgatagtagaatttttatccatttatactcaccttattttgcatatgacattcaaagtttgaagcgcattcattacttaacctttgtacattagtattgaaaaatcagtttcatattctgagtgtcagaaatctttgtattgccgcctgaacttgcaaattgaatttcaacacttaaagcttttaaattcgaagtacttataattcaagttattatgagcacaatctacaagaattggaacgaacgtaaaagtaggaatcagaattttcatgcatttaccctttcaagttatagctttgtaggcctgataattttataggacttcacctagaatttagatggtttttttagataatgaacaatttaaatctacttatgtaatttcattttttgacaaaaacaaaagcttatgactgcaaacatagtatgatacatgagaatcattacctcttatcccgcagactatttatgatatcattgagaatcccatccaaattggtgttgtgcacagagcactgccccctaacttccaataatattctattgagaagttttggtatgtcaggtttttgagataccgacacaaacgcgccgcagtcaaatttcctttcaagcttgcggtacacttcctttgcaagcgtggttttgcctacacctccaaaacctacaatagaagccaccttcagcccttgctcttcacccatcagcaatttgaggagctcatctcttggcgcatcaattccaacaaggccagccgcctccgaatagattgcgaccactcgcgggtcaaccggaacatgtctggaattgggggtatactcatcaatcttgtacctcatgcggcgctcgctcacctctttcacaaggttcttgatctcctgaatactgttaccaatctgatggcgtgcccttatctccttcagaaatttaaccgtcttgtgaacaaatccattgcttccattgttcttgtcaagctgatgcaagaaatcatcgatgcaatcctcaatgtcataggacatctccctcacttggtctctccactccttggcctgaccatcaagctcatccatggcggcgagcttctcaagaagggccctcatgcttctcaactcgtcctccaaggaagccacctccttccggacgcctctcagcttgccgtactcttcccccatcagcgcggcgagcttggataggagggagttgatcgcaccactggaggcgctcgccatggttacggccaaagatatctttgttgcttagtcagtacgcactcacttggagttggaagaagccgtggatgcagcgccgcgcaggagccgagccgcgcgtcgcctgacggagcaaccggaggtggcctccacggcgactcgccggtgctcaccgggctggtcgattgcaggatgtgaaatccggcgagtggcagtccggcacggaagagacgtgaaatggggaatttcaggtagagcaggtcaaaaaatcagaggggaatttaactgatacgccgttgacttcttaatatgttgaccattcttcttatctattattccctcagtttcgttttatttgacaccgttaattttttagcatatgtttgaccgttcgtcttattcaaaaacttttgtgaaatatgtaaaactatacatatgcataaaaatatatttaacaatgaatcaaatgataggaaaaaaattaataattatttaaattttttgaatgagacgagcggtcaaacatgtgctaaaaaatcaacggtatcaaataaaacgaaacggagggagtatatactaaaagtacattaaacttcctacaaactctctcaagctgccacgtgacgctctaataaattagagaaaatcttagaaattctaagaaaaagcaaaacatctacctttaatcacttaaattggtgggtccaacattacacaccgttagatgaaattgatcttaaaacaaaccaaatactatgggtcctacctctccttctcccgtgcatgtgtacgtggggatatataggtacttaccatgtacgtacgcccttcttttcttttttttttctttttttcttctttttccatttatataatatggctatatacttttttaaataatcataaatttacaacacaaagaatctactaaattagctctacaatttttagaaataaaatttaaaccattatatgtgaccattaaattaataatacaatatagtttccacttaaacatgggtactcattattttgtactattatttttaaataatgcactattttaaaataaattttacacaattatattgtgtacctatcaaataaacaatttaagatctatattaattgatttatacgtgcacttaaaccgatggatctattatttaaatcatcggaactattttttattacattggactattattctcaaataatgcatggtttcaaaataaagtctacaccattatattatgtacccattaaatcaacaatttaaaatctatattaactaatgtagacttacactataaccggtggacccattatttaaatcatcttatatattatttgctaataaataaagcgtccgaagttctcttttttgcccgctgcacaaggcacatatgcacctttgccttttgcacgtgtgccaaagcgtcttgtctaaggtatctaaggtgatcacgactaccgcagcactaccgttttgcaacatatcaaatcatatatggagatgattaattttgttaataacatgaaaagaaatttaaaggtgtgatgcagcgagagaggaattaagcaccgtgggttgtgttttttctaatacttagctctgtttaagctgaaaccgagagttaattacagaataattataatgtattgtgttatatatgtcgtatttgcatttggtactatttgttcgtataggtgaaataaatcattatgttataaatgtgagcacaattttaacgaatattaatagcactcttacaaagactagggtgttataagggagtttaagatccgctttttttcccgatttcatagttggattttcgtttgcacgctttccaagtttttaaatggtgtctttttaaacaacattttaactttttagaagtcaattcattcatttataccctaaaatagctatcacataaatcagataattcatcaatttcagttgtcctaaaccctaagtagtacatatttttttatgtgagtcatggtgatcagtaaattgtggatcaacggataatcaaagtcgtaagatgaatatataagagctactatgaacaactataaatacgtgtcaaaattaattgctactaattagacatctaatggcttgctagccacataattaatttctctcgacatgtatataaacatgcacgaagctggaacaaatattattatatgccctatacatatatattaagcggctaatattctaattacatgtgttaagtcctttaaaatttcttaaaacgctctcaagctgccacgtggtgctccaataaattagagcaaatattagaaattctaagggaagaaaaagagcaaagtatccattacttgatttttcatttaatcagtacgtccaatattataaaccgttaaattaaattgatctttgaaaaaactaaatactataaggtctcacctcttgtcccgtggcataggtatgcacctacgtacatgggtacgtacgcttcccctcccttttttcatttttccctttcttctttttttccatgcatacacttccctccctttcttactatatcatacgccttcttgagatgatttaatcacaagaattttgagtatcatgctctcacatttttcatttgttgccatactacatggtatgcatatagatggacggtatgataattaactagcaatagtttcttatttactcgagaaaaaaatgattcaaaagtcatcccttaagaaaaagtttgtgaatggttttttaagatactttgaaaaaaatagaacccttaaattattataaaataacattatccaactttagtttgcccttaatctatgagacaatttttgaacaaacaataattttacctttcaataatataagtgcccgcgcatgcgcgcgggccaccttcctagttaataaaattatacaattaatatttaagtatgatttaaatatttttatatatacacaaaatattcaaaataagacggatgatcaaacattaacaaaaaaaaagtcaacggcgtcgtacatttaagatagtcctagaaaaaggtcccgcacattgccgtaggatcgcgcaagattatcaaatgctcaacttagattaaagcagtgatatatgtatattattatatttattgtatgtgctattatatgtatattttttattggaaaatagatatgttcaattataaagggcacaaccatttgagggttttactgtaatggacaaatgatttttctcatttgtatcataggaatttttagtaagaacttacaatgaagattaagtgtttcacgcaaaacgaggtggtaataacgtgtagttttgattattacaaacttgaaaaatggattaatctgatatttttagagcaacttttatatagaaaggtttcgtatgaaaagtaccgtttagtagtttaaaaagcgtgctacgagtatccaaaatttcatcccacctttgttggagaaatgaacgcagcctaagtattcatttctgtatgatttttcagcagcttgaaaaacccaacattaacctaatatgtcattttattaatttaaaaatagcataattcatcaaactcatcagaataatcaccctcacattattttttgggttaataggatccatgccattaaaaatatgttggttttgaaatatgccactagtatttgcgtatctggaaccatgccattataattttacacatattcgagatatgccactactgtctacttatcctttggatgcattttaaaagaaatatctggaccaaacgaccctttttccccttattccttctcccttcttcccctttcatcttccgcctctcttctatggcttcacctgaccggtgatggtggccaccacagttacatctcctccctctctgacactccttcgtctgcatctccctccaccttggcccgctgccagcctccttccacgtgtcatctccctccacctcggcccgccgccggcctccttttgtgcttcagcgcatcccagatccagtcacctctctttgccgcgaggagctctgggcagtggcgacgaccaaggaaagagcggccacttctctccggtgagctcctgcaccttcctccctccctcactgcacccgtagctcctctggtccagcagctgcctccaccacctcgtcgccgatgtccgcctcgacgcctgatgcagcgaggacggccttcgtgaagagccttggcggatggcagacctgcggtgttctgtccggtgctccgagctcctgtggcaaacgtcgctgccgacaaagagaggtagaagatgagggtagagggaggtagaagatgagggtattttcgtccaatacatacaaaataagtatcttagtggcaccactgagattacaacagaagtggcatcgttacaaatacttttttttttgtcttttcatttatacgttttcacatgagacgtacttggtttgacaccatccccaatacctcaccagcctgcttcaaaacttcctgtactagttgatacctcacgcgttactgtgggagttcaatataataacaataggtaaaaataatacgtaaaatagttagacaacatagacttacataagttgatgtggattataataatttaaatttaaataatacatagaatgatgattcgaagataaaagtaaggtgatgtatatgagagaagaaaatgaggaagatagtttgtactatagattaatcatctaagactaaaaataattggtgtgatatgacttaatgagagaagagagaaataatgctaagtgagaatgaactatatataagtatataagataatataaaaatgttgaatagatatattgaaatattatatgaattatatgggacgatgatttaacatgcttgtattttaaaccctaaaatttaataaatgataaaattgtagataatatagaatgcttgtatgatgtttaaatgtaataattgttagtggatgataatgtgatatttttgcatgttaagctttaggatttagtgggctataagtttatagtgtgataggatttaggtgccactttataaaatctgtttttcaagttctcccatagtatctcacctttttccttagatttcatatacggtttctttaatttacttcattcctttgcataagtttatttattatataaaatataacctatttggaacattttccttattactgaatggaaatggatagttttataattaacaacagtactaatttgagctgctaagtccaaacctggaatgcaagaatttaaagtcaaacatcacattgaccagaaatatccctcaaatttttgtgtttgtaaccttcttattttaagtatgttgttattatattccaaataaggtgtaagttttccttataaaatataattaatagattaattatagtagattttataggtgatttacgagatacgataatttgaaatatgtcaggatgtgtaaacaggatatatatctaggtgctcatttctcctctagcgctgaactgatggcctagctttagttacgaactacacttcattgcattttgccttaggccccgtttagatctcaccctaaaattttacaccctgtcatatcgaacgtttaacacctgtataaagtattaaatataagctaaaaaataactaattgcacaaattacgactactttgcgagacgaatcttttaaacctaattgctccatgatttgataatgtggtgctacagtaaacatgtgctaatgatggattaattaggcttaataaatttatctcgtggtttactagaggatactgtaattagttttttattagtacccgaacaccccatgcgacacccaatataatacccgatgtgacacgcgcaaactttacacccctggatctaaacacctcgtatagtgatggtcttgccttgcctgcatttcagtgatggttggatcctactacgtttggtgcatagaacccctggggcagagtgtaggcctgatgttttaccgtgtgcgttgcagcagttaaatagagtacaataaaaccatcggaggttaccaattgtaaacagtgaaatagtaaaacatgcgacgtggatgaatgttgtatttcatgccatacctctctaggaatatagttatgtgtagtgatggttggatcctacgtttggtagatctcatagtgcagactgcagagtgtaggttgaatgttttactgggtgcgttgtaatagtcgaatagaatacaacaaagccatcggaggctaccaattgtgaacagtgcaatagtacaacatgccatgtggacgaatgttggttaaatcctatactatagatcccatggtgcagagtgtaggatggatgttttaccaggtgcgctgcaacagtcaaaatgagtacaacagagctatcggaggttaccaattgtgaacagtgcaacggtaaaacatgcgatgtggacaaagggagaggaaggttgctaagtgtgagaaagaagacgagccggaggcagttaggaaggggaagtacccacattgcacccagtagaacaaattcaatttccccaagttgcatgtctacgatcgtttaaacccttctgtagtcgaatcaattgaggagatgccgaacctatcgagcaaatttgtttccaatgcaccggaaccaatttatgttttatccatgtcaatgtttgtacaagtgttgatttcaaaagcgctggaaccaatttatgttatatccatgtattcaatattcgtacaattgttgattccaaatcatcggaaccaatttatgttttatccatgtattcaatgttcatacaattgttgatttcattgtgaaaatctataaagttgcttccctccgcggaatttgggaaaaaaaacaagacaaaaatcttagctgatgtgtaagaggatctcagtgccagaaagaatcgcgctaacagtacaaagctcagcactagcatatttggcactgaattttgggacttaccagcgcgcgacccgcccaaccaaacaaaactcctatgttgggtggccatgaggcgctgagctggcaagcctcagcgccaaaaattggcactgacattgaatacctcaacgtcaatctttggcgctgacctttgggacttaggcgcgcacggccgtcccacccaaacatagctcctgcgtttggtgatcatgaggtgctgagtcggcaagcctcggcaccatatagaatggcgctgaccatatagaagggctcggctacagcggcggccaagcttttaatctgctacctcaatgccaacgcggttggcgctgaggccttgccacatcagtgaggggatcagctctggctccacgtggacccggggggggaggggggtcaatgccaacgtctctggcgctgaaccgttcaacaacctcagcgctaacgtcccttgcattgagtctatggcttaaatactgtctaaagtcatttaaatggtaccatcaaatatatttagtacatggaagattgtttggtgctcttggattatttgagcacatttcagaaatttcacaaagtaattggattgtttcctctaactgacgtcaattcatttttcgatcaatttgcaaataaagatgtaaaagttataattgttgtggtagctagagttgaaagctgacctaaaccaaatatgtcattcttggtatgtattggcagcgaaagcataaagtaaatatcgattctgcctataaagagtccgaggggtattgtatgtatgtatgtatgtatgtatgtatgtatgtatgtatgtatgtatgtacgtacgtacgtatgcacgcacccgaccagccacaccattcgccttcattcacatcctctcccctcctattgcctctcatgttatcatcctatattagttaggaagcataatttattataatattttaaaataaatagctattttttatcagcttatgacattggacccatattaactatatttcaacttctaaaataaatatgttattttgggttatattctgacttttttcatatcatttaaacaattattaaaaaaaatatgaaaaatccaatgatatatattttaccggctaaaaatatttttcatgaattttcttcacctctatgtatatcatgtagtcctatcactattgaaatacaaaccaaataatttagaaaaattccaaaatgatttgagaatgctaatctcacacaaattaaagtttaaattagatctactttgaaaaaacacaactaaattctgttgtttgtattttacatatgtagattcaaattgccgttgtatatctgttaagtaatatttgatatgatagaatattatgatgtgattttttttgaaaaattgttatggaattaattaatacatgtcaagatcatctgtccgaatgtattttgcactaaaatatagccaacataagtcattagtataaaatcataataattacatcaatagcataaaaaaaataaacgggatgaataggaagggaaaaggagaatggaggtatgtacgtttatacattacctgtacatacgtacatgcggggagggatgcatatgtacgcgcagggtaggggggaggactaaaatcagtttttaatctaatatgacggtgcaaaataatggacctaccagaaaatcgagggctagatgtttctaatatattaaaacgccatgtggcgacttaggagcgtttataggagtgccacatgacgatatgagagcgtttataggatgtttaatggatttttagtatataataatagatacttgtaacgctccgcttttcgtgagacgttaaaaactaattcggcaaaatcctaattgcgaaaatttcgttctttgagtgttgagtctaagttgtgccaaagatctcaatttaaatccctccctcgtctcgataccctgttatcaaagatcgtctcctcaaaattaccatcccaatgtagtcccgaagctcgattccttctattcgaaatcccctcctggaaccccatccgtgaactttgtcgaatgcccgaaccctaactccgtccaaggattcaccttcgcgtcatatgctctctcattggttccttcaaaccgattctcaaattcgaattcaacctctcaggttttgattcatctatctttctccctgtattggttcatcaatatacccttgttttctttctcgaacttctgacccaagtctgaatatgcaaatcgagatcacttccacccttgaactcaaaatcccaagattcaatcccttttgccctgagttctccccaaaatgatttccgttccgaaataatctcgaagtccgaacccttctattcagacttctctccaaaatccttacccacatatcttgttgagtagtcaaactcaaactgccaagttacactctctttctctaaattatccatccccttttgactcgtctccgaatattgttcccttccttgactccttcctattctcccgagaccgagtatcaacctcgaaattcgaatccagactccaactctaaaacctcccaattaaatctctctgtgaaagtctatttaacctccctcataggttggattccttcatcctttttccggtccacctcttccttttcttccatcccatctctctctgagtctcgatctatctatctatcgatcgatccatctatctatctactatacctatctatctgtttatctatccatctgtcaatccatctgtctatccgtccctctacctatcaacctacctttctgtctatctatctatccatggcattctaccgctatctcccttgttccatttttgaataatgatcttccctttttgaaatcctctgaaataatccttcgtgccgccaaatataaatccatcccaaaaataccaaaattcccgcttttgaagcccttccttgacccctcccttggatccaccttgaaccctcgtgtacaaatatacaaattgaattcaaattcaatctccacatcaaacttctctccaaatcaaaccttccggtaaaagtctattttacctccctcgtgatgatttgggccgaaacctgccgctggcccatctctccccaactccctccatctccacgtgcgccgcacatgaccaccgagagagagagcgctgtctctctcccttccctctctcgaacgttctctctctctctccctcgccgcgcccaaaccgctcgccgccgtttgaatccgctcgccgtttcccgtgcgctcgcgcgcgtggccgaccgtctgggagacgccatcgccaccctcggtcgtcgcctgctccgacgaccaccgcgtgtccgtgctcacctccaaacagtccccgtccttttgcagtcgtcgccggcgtcatcctgtcgagccctgcgccccacgccgcgtgcgtccaaagccgcgaggcacagctcgtgctcccgcccccctctcctcccaaaaacggaagggacatgcctcccttttcaccgtccccctcccctttttcccttctgggctgggtctctctctctcccgcccatgtctccttgcgcccggaggcagagcaccatgacgcagacgccagcggccagctcgccacccccaccttgaccgctccacgctgccagcccgcgctcgcgtttcaaatttcgccgtccgatccaccgccttcgccgcccaacgcatccacgccgtcgccgctttcgcactgcccacgaaaccgccgctgccgcccgtgaacaccagccgagctcccttgaccgccaatgtcggtttccctcctccaaaccgacctctcctcctcgcctataaagcccgcgccctcccctctcgtttcgtcttcgcctcgctcgaaacacccgcgccattgttgccggccgccagctgctcgcccccgtctcgccgtcgcacggtccgtcctctgccgcctcctccctcaacctcggtcgccgtcgcgtggccaaccccggagcatcgccgccttcttggtcgccgcggccaagaacgccaccgccgcgaccaagggcgccaatgcacgcctccgttcccttccccggcacgcccgctgtgacacgatgccgcctcggcatcgcgttcgtcgccgtgcgccgctgctcgtccatgcgccgccatcggccttcccatcctcaactcgccgtcgacgccgttacctcccgtcggtgagctccccacctctcttttcctctgtcctagcactcgcgtagctcgcgtcacgcgtgctctgtttccgccgccgtgcgcaatcaagagccgccgttggcctccctttcggcgactcctctagccaccgccgttcttgagttcgctctctacctccccaagcagctgtttcagccgccggcctcccctctcgccctcgcgtcgcgtcgcccgattcgccgctgccgcgctcggccacttccgctgtgcctcccctgccgtcggcctccctcctctccttgattcccggcgccgccaccttcctcgggccccccctcgacctccccaacccctccccctggccgccgaccttcctccttgctcccgcgccgtgccgtccctcccgccgccgcaaagcgccgccgcgagccacagcccggcgaccatcgggtcccgcgtcaccgcgtgtgcgccgcaaccccataccgcgtccactaagcccgagcgcgcgagccgcatcccttcccatcgcgcatccacgtcggcatcccggcgagcttcgccgccgccgccggccgtcgtcacgcgtcgtctccccaatccgagccatggaatcggttcgccttgacctcctctagccaccggtgttcgtcgctcgcttcggctcgccgccgttcgccggattccgccgcgcgccgtgagccgtccgatgccattcccgcccccccttttctctccccatccgacgtggctgcccacgtggcgttgaccgggcccgcccctgcccagtcagccggtcagccgtccccctccccctctctcccctggctcgtgggcttggcccattggccagccttcctcctcggcctaacaaaacaaaggaagtttacttttactccctcttccgagtccggtgctcacacaccgaagagctaaaggtccgcaattgctccctccaattgctcctctctctctctcaccttcttattggccccactcgtcaatgagtcaaagataatcttgagaatgtctttccaatattccacaaatatttctctcttctataaattcagtaaatcattttatcttatttcatgggttaataaatctttttcccttgatcccataaatcaattctctattccaaaatttcatgaatcattttccttataaatcatttcctttggtcccgcacgtcagagacggtcaataatattcttgagaatattatttctataaatttcatgaatcaatctccccttgttccacaaatatcttccttcgccagaaattctaattaaacttccaaaattcgtatctctcgatccaatcgtccgattgaccccgttccacttccagtaattccataaaattgagatctatttaatggcactattatttagtctaaatagggtctttttcttggtctcttgtttaggtttttgtttgtttgcgcatagttgcggttaccggattttcatcgatcgtggatatcttgaagattcgtgaagcttcgtgaagaccctgagcaaggcaagccacctttgaacatattgagcctatatttgaacttaattatattgcttgcaaaatattatgcattgataggattacacttaatttgtttgccccgtctgaaaggcagaccggtgggcctacccaactcgttgcatctaatccttccattgttaattgttatatcatgttcccttgtaaccatctagttgcgcctcgatattcgtgcactctgtgcgagtatcgacggtcgccttcaaacttaaaatctgagtaacttcttgggtaaaacttggtttacaaaagctttggaaaacccgatgcctgggtcggtgccttgtgaaagaaaatgagttttaaaaataaaactcgcgacacaaggccattcctgggcggaatacttgtgcggtcgcatctaaggaccgattcctttggaattacatccgagcatacaatagtgcgaccacacgggtggaatgggacgcccctggctgagtaaattgctaatcgggggagccttgatgccgagagacatgtggattcgccggggtggtgtcggggaggatccctgggcttcctggcacagtatggtctgggacctaacctgttgttggtctgggacccctctcgtcggcatatggcaatcctgtgtctgctctcgaaatgccttgtcatgaaagcccttaggtcaccagacgtggccgttctacacgggctaggtgatttgggttagtaatgtcgtatgggtaaagtgtaccccctctgcagaggttaacaaactgttcgaacagccgtgcccacggtcatgggcggatgtgaggtgattccttagcgtagtttttgttttaccctgttttatgaaaaggtgttaaggtttgggaaacctaatgcttgggaagcatttagctgtccgggggacagcgggaccgggtgtccctggaagtgattggtcgtttggggacctctattatcgggaagtttggaaaattggtttggtttgggaaaaaccagatttgaagccaactctgggagttgtgcaaatcgtgataaataaatttgttacttctcacctcccgaccgagctgagacttgtctcgctctggttgtagaaagcacacacttagattgttgaaaacttgaaaacaaaactgtttgcaaaataacagccttcccttgaagcctgcattaaccacctaagttcccctggcttgctgagtacgtaagtactcacccttgctctctatataaatatagttcagtcagctccgaagatgaagttgaagtgaagtaaagattagggtttcgtcctagttccctgctgctgcctgtggtgttgggtgttagaccgttggttccgctgctgctgctgttgttggtgttcgcctcgtccgtgtcgtcggttgcattctcgggctgtctgagctgcaacctaagttaaggtaaataagtcctctatttattttaaggattgcaatgattcatatttatcaccgtgggtaccagcgctatgtcctgggactggtactgagatcgcggtttcgtaggaagcggttcgcgccatttttcccacgacacgctcctgtcaggtaccgttgtacggcggtgccagattaaaggaaaatcgagggctagatgtttctaatatattaaaacaccgtgtggcgacttaggagcgtttataggagtgccacatgacgatatgagagcgtttataggatgtttaatggatttttagtatataataatagatactgaagcgtccttatccccttaatgtgtgtgttaagtttacacaattttctggagtggtatacacatgctatatgaatgttctcaaatatttcaaatgctatatgaatggtatacacaattttctcaaatactgtttgcaaggtatatggtgaaacgatgggacatcatttgcatattctcccactagaatgcaagcaagcatgtactgttcatcaaacccatacattggataaacatttataccacattattgcatagctttgttagcagcttcttggctcgtagtcatcgcttcaagaaattgtccacctgtgccaagcaaagacctcaaaagtgaaagatcaagtcggcgctaggttgatgcacttcaaacgttctccgcaacacagacttagcagatattacatcctggctccccgaatctgtaaaaacatttactagatggatcttgagaccagatgatggcaagttctcgatcccaacaggtaggcaagtgccaccttgttgctcccaaccattcacataaaaccgtaggtcgagcctctggagcctcggcatggcccccactagaaaggccaggcgaggcttagggcagctgaatgtaaggtccctaagagctcgaaatgccgtgccggcgccagagacgacgatcctctcttttggacattctcgaataccaaggtcaagttggacaagggagggcaactttgcaagaatacaaattccatcatcgccttcaaattcaataggcaccacgcctccctaaccaaaagtaccaagctgtagaggttatgtagctgagaaatccatctggggatcctgggtagccggcaaccatacagattgagtctgcgaagatggcggggtgaagggcacaagtcgctcaagcgatcgaatgacactagaataaaatggctgtccaggtcaaggctcctgaggcagctggaagaacgagatagactttcaagagaagagcacaatgcatccaggcgcctggccacatccgcatccgccaatagaccaatatcgcccaaatggactccgagatgtctcatgttggttagctcaccgaggcactcgatattgttcaccgagtttagtgccaaatccaacgaggtcaaggtgcgtagagatttcaagcttccaatcccatcaggcaacgttgtaccgcaaggaataaccaggtgcaacaaacagggcaagtgaacaatatctgatggaatggctatccttggtacaaatgattcacctagatcaaatgtctccaaatgtagaagctgcctaattttcatacctagcttgaaacatgcgtagtagccacggatctttaagtatcgtagtagagacaatccacatatgccggtcaggtccatcacttctctcatcggaagttcaagatgaagaactcgtaaatgcttcaactccaatagagaaggcctgaaagagcttctgaacactgcgattgatcgaacttgcgatagtgacccaaggattgttgtcgatataatgccatgctcttcatcagcatcgtattggacagaaactctgtggatctttttgtgtgcccctaccacgacttgtggatgatctagtacaacaataaaattctcctctgcagactttgatctgataaaatcaagcattatatcatgaactctgcaggacaacacctcatcattgtagtccacctgcacaggttggatcatgctcctgttgatgagctcgttgaagtagctttgtgcaacatcttctgaatctaacccatgggttctactgacaaaaccttcagccatccattgcctcaccaaatcattcctctctatcgtgtggtcctctggataaatactaagatatagcaggcatgtcttcagatgttgaggaagatttctgtagctaaagtccagtatatgtttcatgtcttctaaagtaggatttctttcgaacatggatcccaatgaattccttacatactcccatttcgtctttgattgaccagctagaagactggatatgctcataatggcaagaggcaaacctccacatctttttagaatatcacctgaaatctcttcaaatacttcagagcaagcttctccagtgccaaatattctactgaataataatcttcttgagtctacctcaccaagtggactcatgttataaacatattctttcttattagagcaacaactaatagcaacagagtaaatcctcgtagttgtaagtactctactgccgtgattattttcaggaaaagcacatctaataacattccatgcggatgaatcccataaatcatcaattacgatgaagtatctacaaacatgtgatagtgtaggggtaggttagcaggtattttcagtagaattaatattttcatgagtatctatctaaagaataactaccatccttcattctagaccaaacttcatagtaggtattaacgataagtacaataacatcatttcgtatcaattaaaaatattcattttgtatcagctaaaaatatccattttgtatcagttaaattaaattgtggggtaaagatttctatatcatgcatacaattgttaagtgtaaatgggtggcccagcccgagccagtcccttctccagatttgtagacctattagcctcatttcggtacatccgaaaacctggtaaattctactaaataattaagaaaaataattttgtatttgttgttgtcaaaaatcatcttgacacatcgacgaggcagggccacccaatgaaactccaattggatgagcctcatccaccttttttatatggcttttcaacaactccaatgaatgttatcttcacccataaaaatattttactagtagttgtttctgatgatattggctttacaaacccatcgctacacacatatcctctcaagttaaaagccaatgcactcatcatctcaatggatcctgtttctctgcctgtccaactaaaatgacactaataactcttattatgtagtcggaaaaaaaatattagatggacttatgtgtagaatcaatttctgaacaacctataagaacagtgattttcatagtaaaatacgaaatctgcacagattattaaaaatatacaaaattaggagactagcagcaggaggaaagtacatggtagatcttttttttttcataaatgcacataaaccataatcacaatattattagtactccatccatttcaaattgtagtcatttctatccacgaatagcaatactccctacattctgtccagattcatatatagaaataatacattttgatagggagggactagggagtatgggtaaaatataaaatcggaactttgtagcataccgacacatgaaaaggtacctcttgtcttgtagatattctcggataaccttcagaaggttatctaactcgccaatgtgaagattgtactgccctgtaagttctgataatactttactcataagccttgttatatcagacctctgagagactgacacaaatgctcggcaatgaaaatgcccatccaatttgcggtacacttcattggcgagtgtggttttacctagacccccaaatccctgttgagattatgggcatataatgatttaatttattccataaataaatcatgacattacagatgaaaactagcatgaacgcatcattagatctacacatgtaaactacgcagaataacatgaacagatcaaatatgcgcaacatattgaacacgtaccgaggtgacgaaaagaccggcttcttggtcgaaacttttcgcaggtgtctacgaaggcacgaaacacgcgagcgaagaggaaggcgagccgtcgcgaacgaacagggagcagtcgcgcgaagcgcttcccaaaaaccttattgccgccttctcccggtgcaggacgtcaaaggcagaggttccggagacctgctctcccgatcgctggtgcacgccggcgagcgggatggagtagtctacgagcgacggcgcagtacagagtaggaggcaaaccctagattgattttcgcatatattgcgtgaagacagcgggtcggtttatatagagaagggtcacttgatcagggcgcccgcacgatctctactgcgcgtaaccgaaccggataagtcgcgcgtaacttatccggactccacgccgtgtgaatttgcagcaaaacaaaactgcaaaaggaggctgcatctgcgcaagggtgaggagctacgtcgtgcacgcgcgccgcctgccctgccaggcgaggcgagcgcgcgcgtgtttcccctcttctctccaccacacatgcttcaagtggctaggagggcatcctcccttttaaggaggtccccctctcctagaataagcaaggtggtactaaactccacatgcatgccatcccatgaggtgggctttttgtgattttccaaagaattaatcttcgagtgggctaaggcccattcattaattccaacaatcccacaatagaagccaccttcagctgttgctcatcatcacccatcaacaatttgacaacgtcatctcttgggatgtcaattcccacaagatcagctgtgtttgcataaatagtgaccactcgtggatcaattggctcacaactagacttggaagtgtactcatcaagtttgtacctcattcgccgctcgttcacctccttgacatgattcttgatctcttcaatcttcttagcaatttgatgacgtgcccttagcttcctcggaagttcagtagttttcttgataagcccagatctcacatcatacttgccaaggcggtgaacgaaatcatcgatgcaatcttcaatgtcataggacatctccctcacctggtccctccactctttaacctgaacatcaagctcatccatgcatgcgagcttctcaagcagagcctccatgcttctcaactcaccctcaagagacaccacctcgtttcggacccctttgagcttgctgtagcactcctcccttatcagtgtagcgagcttggtgaggagtgagttcatcacgccactggaggaactagccattatggccaactctctctttgctcaggttctctcttggcaaactatatgctcaggaaatgtgagagtagcacagataatgcttgcaggctcgtcttgattgtccagaaggttaattaacttaataatatatttcctcaagatccacgccgtctaaaataatcttacttggagcagcaaagagagcagagtacatgggactaagtaaaaatcaacccactctacttattttagaagcactgggtgttgacttattgccctgaatcaatgtactccctccgttttttaatagatgacgccgttgacgttttctcatatgtttgaccattcgtcttattcaaaaattttatacaaatgcataagatataaatcacacttaaagtactatgagtgataaaacaactcataacaaaataaattataattacgtaaattttttgaataagacgaatggtcaaacatgtgaaaaaaagtcaacgtcgtcatctattaaaaaacagaggtagtatttaggtcattaggttgtaattgttattttatagataactagcatggtggcccgcgcatattacgcggctagcattgttagatttttttctcatataatagcttaaatattttcacattttattattaaaatatattaaaatgataacataattttaaattctgggttgaactaacaaatgcgtgatattttattgtattgtatatacgtgatagttgttaattttgaattaacaaattatattataaattatatttctatatggactcaagagtcagcttttaatattccttatttttaaaatttcgaatttcctttattcatacattctattccaatatagattctagactactcttccaatattcatttttcttaactctaaattttagttatttataaattgtatttttatatggactctagactcttctttcaatatttcttatttttaatatttaatttcaattattggtaaattgtattccaatattgactctagacttctttttcaatatttcttatttttttttaatttcagttatttctaaattgtattcctatatggacgctagacgactcttctcccaatcttttttatttttaattttgattttttgtaattctaaattgtatttctatatggactctaatttctacttttagtttttctattttttaattccgaattttaattaattctaaaatggatactagtctactctttcaatatttcttatttttaattccgaatttcatctatttttaaattgtattcctttatgaactctactttttctttttcttcaattagtgtgaaaatttctaaacggtgagagcaaacgtggtggcttctttttttattactttaataagataatagatagatagatgaatataaatccgacatctatattcgcatgtgggtatacgcaaacaaaggttataagaatgcttagagtccaaatctcataactgagataaacaaatggaaaacaacaaaatagaaaacacgaagcctaaactttgatctttccctgtcgtgcttcaatcttgccccttcgctctgtagcaacagagatgtgtcacactacttagaaactttggtgtcagaattatcttgccaggtacagtgattttccgctgcctgacgaatcctgcaatagaaaattgcacttaggcaatctcgtggagcagccgccctcatgaagctccccaacttataggcggccaaatatgagaatggggagatgcggaactagcccgccgccgatctgtcgtgcctattccatcccattgtcactttggccctgtttagttccaaagtttttttccaaacttccaactttctgtcacattaaatctttcatacacacgcaacttttcagtcacaccgttctaatttcaaccaaacttccaaacttcagtatgaactaaacacagcctttattcttttctaatgccgccagcggcaaagacatttctacaatgatgcacacaaacatcaaattttgagtttaaaaataagaaacttgaaatagaaattagaataaacctctcacgatgaaattgtaggatcgaacaataagagctaagcttaaaaaaaaaaagggtgaatggtggtaacacgaataactgaaaacttttagcgagattaaaagttaactcgaagttaattgatatccttgacacaactgccctgctgcgcctgatagaagcccccttgcttaatttgcacagctgagatagcaacgctgctagcgcatgatgagtctaaatagactcgcatcagaagacgtcgccgatccgcccccaagcgcgaacaccttccgtcgtctgccgtccatcccaacgcgagaagatgcgtcgccgttcctcacaagagtagcaagccagtaagactgtaagagcaagtgagcacgttcgattgttgcttgcttgctttgtgtgattccttgttgctggataatggaaccaattacagtaaatctaattggagagtactctccaattagtcttaaccagagacacccacgtgctaatactttaggagttttggttgctattaatccattgagcaagtagggaaaatattcctatcatctatgcttcaaatataattttctcttaaattactcatccgatttacaatccgattacaccgttgtgttcgtaataattaaatctttacaacaagatctcacataattatattttaatgaaaaatcacaaattacttttatgatatgtctaaattacttttagattttactaagttacttcttagacatataaaagtaaattcagtaaagcctaaaagtaatttacatatattgtagaagtaacttataacaaaaagtaagttacttttagatttgattaaaatacttcctatacattcataatgctatgaggtgattacttttattatttttgtagttaattccataatttatgctgattaatttaatttctagatagagtcatgtttttatctctacaacggattcacttcaaatgacatgctaaagttacctttgttctaagttacttctataatatatgtaaattacttttaggttttactgaatttacttttatatatctaagaagtaacttagtgaaatctaaaagtaatttagacatatcataaaagtaatttgtgatttttcatcaaaatataatcatgtgagatcttgttgtaaagatttaattattacgaacacaacggtgtaatcggatcgtaaatcgaatgagtagtttaagagaaaattgtatttgaagtataggtggatggtacctcttatagatggagtggtagctggtttagacaaactagctaacactagttgtctagttacgtccaaccaattaacctatgatcgatgtgtgtcttcattattcaccggaggtccctcaatttaatagtgagattttttaatcccttaaccacaaaattagaaatatatgcccctagtcagcaaaaaaaatttaaaaagtacgtggagcccacatgtcagttacacaacttttttttcttttcttttcttctccttctcttctctttctcttcttcagtgagtgaggccggcggcggagagggcggagcggcgatgggcgggcggcgggtccgcgcggcggcgggcggcggcaggcgagcacggcctgtggacagaacggaggcgggcggagcggcgccgggatgcaggcagagcagcgatgggcggcggcaggcaaccggatgagcacggcgggcggaggagggggtcgcaacggcggaggtggccgaaaccacgtcagtgaaaccacttttttaaattttttttgctgactaagatgctacgtcagtgaaaccacccacatatactgccatgggacctcctttgaacggtttgtgtgagtttaggggtaacatttctggttttatggttaaggggcctcaaaaaatctcgctgttaagctgagggaccttcggtgaacttattccaattgtgagcaactcgcttgttcttttgaggggctgtgcgcatcaggggcaggcccaggaaccaagccggatgggctgatgcaatctgggcccaaaattcccccagaagaaacgggtattttgaagcccagcccaaaaaatatgaatggatcagcccaaggcttggcctgatagcaattatctgttctgaattatgacggtcttcacgtatgccaaaagaacccagattggaaatgtgtgcatacaaaatatctaatgatcattgaaaagtgaggagtttaattatttattactttagaaaatagccactcttcaaatgttttttatggacacaactacaccaagagagtgctagctggatagtgttaaagagagacatcatttttttcaaaaaaaagctactattacactcaatatctatgtattttttttcttcttagagaagtttctcttaaattactcatccgatttataatccgattacaccgttgtgtttgtaacaattaaatctttacaacaagatctcacatgattatattttgatgaaaaatcacaagttacttttatgatatgtctaaattacttctagatttcactaagttacttcttagacatataaaagtaaattcagtaaaacttaaaagtaatttacatatattataaaagtaacttataacaaaaaagaaagtaactttaatttagaactatacctagattcattaacatctatataaatatggacaatgctaaaatgacttacattatgaaacggggggagtaactctctgtagtagaaataattatattgtgagtgagctaaaataagaaactatgtagagtaaatttgcaagtaaagtgtagagaagatttataaagtccaaaaaaatatagaattaactaaaaataataataaaaataatcaacttagagcattatgaatgtatagaagtaatttagtcaaatctaaaagtaacttttatatatatatgataaaagtaacttgtatataataaaagtaatttacaaatataaatgttttttcatcgtaatataatcgtgtaagatcttgttgtgaagatttaattgtaacgaacacaatggtgtaattggattgtaaatcggataagtaatttgagagaaaactttataagaaggaagaaaaagatacatatgtctaagagaaaaaacagcacgcacatcagcacgtgtagcagtaattcttctcacaattggttcgtcgctggttaacactaaatcgagaggcttcttggtttagattttaccgttttttatacagttgttcataccattttatcatcggagaaagaagattgcttaaacattttcgtctacgtggcacaacacattgacgtgctagagtggacgctgggcagctgcctccataattttcttgccgtgccaaaaaaaaaaaggaaagcgccatatatttctctccggtaagaaaaacatagggaccatacaaaagctggtactaacttccaaaaacaaaggtatctatccacccacctgtgcgccaacaacttagattcagaaaaatacataaaaggaaacgaaatagcaacagatgaaaacaaaaataaatgcagcgcacgagcgctgacccagcatttgcaggttgcagctggatctgtagctgtccttttgttgccatcggtgaagatcgagtgatcgacatatatatacttcattcacacttccagacagttaacttttaagcacatatttaacttttaagcatatattgatgattcgtcttatttaaaaaaatttatacaaatataaaatttataaattatttttaaaatactttaagtggtgaaacaactcacaacaagataaattataattacataattttttaaataagataaatgatcaaacatatgaaaaaaattaaaggggttacctatttaaaaatggaggttgtatattatttttgcagttgcgattggagctggcatgaagagagagacagtgcgacacaagcgcgtcgacccgtgttgtgttggtcacatgtaccaccaacgggcaacagcctttgcacatgcacaaacacacacaccaccccgctggcgcacatgcactgcaccctgttgccgttcctaacatgcacccccattttcatacaatatccgtcacataatttggtactaatacgttttctctatcacttgaaggaacatgtggatctaatttgctataattattatgcattttggggttggggttgtggtcgtgattctttgttgtctcactttcgacagtcaacttatgcttatatacatatgtacgtagtcaccctagttaattgacatgctgaaattcagcacgccgaaatattttatgaatgcctttattttctttttgaatgattgtagttcttgtgaagctacaacttaattagccttttgttttctcaaactaaaggttaaagtatcgatcgcataatgctatcacatttttctcaagtagattataatattagtataattgaatttaatgatacaagcttgctagtggaattaattggtgttggagatatttgcccccaattcttcttttttaaaatttttatgcttcaattttaactcatacgaagagaggctcaaatgtatacgattgaactcgcgagactacattggatagtcttaaatcatgtatacattggttttatctggatgggcgcaagtggaagtatccaaagcatttcttgacagccactgtttctgattaaagatacactagattttatctaagaatttttattaagctttgtaagatgaaatcttatatatgtaagtcactgtggaatagtttggtttggtgccctactaattcattggcaattttcaattgtgttttagttatttggattggtgccaaattttaacaacacatctcttcgataataaaaattttgcctatccaaatttggtggtgctaaaagttgcccaaactttggcactaccaagattttacggcaccaaaccaaactggctctataaacccttttttaaatttgaaataattaaattttaattaattatgtgctaatgattttctcctttttgcgtgtcctgccaccctccctcgaacgatctaacggccagcattcgatcgatctacctcattggggtaacccaaaatgaagcttaaatccaatcctagccgttgaaaatccgaattgttgttgccgttataaatagtagtagctccccctaatttgacttttctctcccccgttttccttctccatttatccgcttccgcctcccctctctccctgatgcacagatgaaccgcgtgccctaatcctctccgagattagtacctatccgaggaaatcgagggttggagcttgggattaagattccgcctgtacgaatcgaagtgcgcggctggatcggtgggggtttcctttttgatttgttcgcttctctttgcgtgtttgatgtggcgattcttgtacggattggcgtcttgatctggtttggttttgggaagattggaatctgatgattccgctgtttgttcatcagatttcccattatcttgtctgtttgatggattttttttttacgttcctggagcaaaatctgatttgaattagatttttgttttcatgcccgtttttagttggtctatcttgagcatttcttctgagtattcaatgtttcgtccccacgaaaattgtcgtgtttattgggaattttttgccctaataattcgatttttgcacatttgcggtgcttcccagatgagatctgtgcctggcgcctcaaaattttcgcaattctgtttgacgttttgtttcattttgtttccgcgcagaggttgagcacgccatgatggcgaacgcgaggtttcagaagcaggcattgctgccgccgcggagcccgttcccggcggcggtgggggcggcgccgtcgccgtcgccgcacgccgagctgggcccgatcgcgcggccgcgggacgcgccccaccggcacggccaccagcgcacgtcgtcggagagcgtcctcatcgacgagcagccgtcgtggctggacgacctgctcgccgagcccgaggcgccggcgcggccgcacggccgccccggccaccgcaggtcgtccagcgactccttcacgctgttcgacggcggtgcctccgccgccgcggctggcatgtacgacaatgtgttcgatggaatgaggggaagaggtggaggaggacagcaggttggttcttggggtgccgcaccggagttcttcccggaacaaagctcgtttgggcggccgcaagggcaggggggccggccatgggattcgagactgatgctccgacaaggtggtggtggtggcggcggcatgccggtgccgatgaatggtggccatcatggtccaccaagcgcatttggtgatcatgggcatggttctttgccgaatggggtggacaggaaaggccctggagattcagctcatgatcagaggatgggagcagagaggaaagagggtgcacacctaaggcactcccaatcggaggcagacaccaagcgagctaaacagtgagttcgattttattccatgctcattgctaatttgctatcactttgataatcaaagtttgattgaccagttgtcgaattccatgctcatgaaacaccaattctgataatgaagcttgcatcatgaatccgtgattggaatagcagaatgagcctttgatacactgctatcaaatcacctctagcccctggttgaagcctacactgttaacaacactgttgtggttcaatgttttgtgactctgcagggcgtatctagtggcgatcacaacatggttggagattgaattaatgccgaagatattagcttgcactctatttaagtaaaagtgacctgtaaactttatatttctagtcatgatgcatatgtaacacacattaactcttgataaaagcccattttctacacccaccagtagagtgcactatctttctaatttatgaaagttttttcaaaattttaatagataaaaaaaatcgaagatctttaaggaatatcatcgaattactttcagtaaattctttattttcattttaaagtatgcataacttaatacagggaatctatttgctatttaattccaaaaggtatccccgccaatcttacagtatgataaaatcttctttggagaaaattttacaagtattttcacttggagtttttattgactaactacaaaaggttcttcagagaaatctgatacatgttttatctacaatagagtatgaagaacacaattccgcatcatgatttctgttgatatgcttggaaatagctactttgggccgtctttgattgtgttactcacctgtgatagtaggtttaatgttaaaggtagaattccctgtaaacatatggaagccacagaaacaacattttttaacctacaatagaaatgagtaatttatcatcaaattagaaattttcttgtgtagttgcgtagataaacgacatcaagaaacaataataaaaagcatactgctgttttatatgtcctggtgatcacatgctgtctcaatctacgtgaaaacgcaatggtaatacttaccttagtaattagcctctgttttcaaggcaaatcatatatatgttagaatttcaatggttactctcattgagaagaggatggcactcgagatggggcgattttctggttttcttcattcactaaacacaaaagccatgcctacccgagggaggttggatacatatatatagccatagctggctgctagcctattgctgcaccctcctagtctaaaattcgaaatttgaatgggatgttgtcctagagggcatccaaactgaataaagcataaaggaggcataaaggagatgctaactgctgctgtcctactaaccgcagctgtcctagcaactgaaaaatatgctaaagggtagatgctgtcctgaaaaaggtgaaactacccaaaagcaaaaagaagaatcatgaccaaggaccacaaagacttatccaacattctccccctaagtcttgtgcgtcgtcttgtggggaagttgggccatcccgatcctggagcagagctcgaggaacttgatcctcccaagaggcttggtgagcaagtccgcaagctggtccttggtgttgatgtagctcgccttgatgctcccttcctccaagtagcttcggatgaagtggtacctcactcggatgtgcttgctccgttcgtgaaaaacggggttcattgccagggccagagcggacttgctatccaccctgagctccaccgttccagtgtctctgccgaggagatcactaagcagtcgagcaagccagagcgcctgggtcgaagcggcggaggccgccatgtactcggcctcgcagctggacagggccaccacctgctgcttgaccgactgccaactaacgaggcacttgccgaggaagaagagaatcccgctcgtgctcttgctggtgtcgatgtcgccggcgtggtcgctgtcgctgtacccgacaaagtgtgccttgccaggacacctcgggtagtagagaccgtggtcgagagtccccgcaacgtagcggatgatcctcttcacagcctgctggtgctccgtcgtcggtcgctgcatgaaccgactgacgtagccgacggagaaggccaagtccggccgtgtgtgggtgaggtagcgaaggctccccacaagacgtcggtactgtgtagcatccacctcctccgccgtgctgtcgcggctcagcttcagtctctcctccatcggagtgagagctgggttgcaatcggtgagcccagccagctcaacgacgcgcttggcgtaggcggtctgttgaagcatgatcccggagttgtcctggtgcacttcgatccccaggtagaaggagagaggccccagatcactcatctggaaggtggccttcatctcctccttgaacgccgcgacctccgcatccttggtgccagtgatcaccaagtcgtcgacgtagacacccaccagcaaggcatttcctccattgccccgccggtagatggccgcctcgtgcgggctttgctcgaagcccatccccttgagcgtggaatccaacttggcattccacgccctcggtgcctgccgcaagccgtagagggccttgtgcaggcgtagcaccttgccctccttgccggggatcacaaatcccggcggctggtgcacgtagacctcctccttcaagtcgccgtttagaaacgccgacttgacgtctatgtgatggacgccccagccttcctgagcagccagcgcaagaaggagtcgcacggactccatccgtgccacgggagcgaaggcatcgtcgtagtcgatcccctcctgctgcacgaaaccgcgtgccaccaagcgagccttgtgcttgacgatggcttcggcttcatccctcttcagcttgaacacccacttaagggtgatcgcgcggtgaccatgagggaggtcagcaagctcccaggtgcggttctcctgaaccgcgtccatctccgactgcatcgcggcacgccatgccgcgtgtttctcggcctctacaaaagaccgaggctcaccgtcgtcgcacgcaaggtgcaactgcgcctctaggtcgcgaggcaccagtcccggcaccggctggtcgccgagaagatcctccatcgtacggtaccgtagctgctcgccgtcgtggtacgcgtcgatgcgctccccgtcgtgggagagcggagtagcgaactccaccgggctgcgctcaacacgagctggcatcggagtagacgtgcttggaggagtggctgttggtgctggagcatgtggagtcactggctggggtggtgtcgacgaagagctcgtcgtagtcgaagtcgtggcccgagggtgtgttggtgttggagtcggtggagattcgggggctggggtagacacgctaggtgaagaagagctgcctactcccccagctccctcgaagtggacgtactcgacggtgaagtcgtcgtacgtcggagtcgaaccatcgtccaccgccttgtcccatacccaccccctcgcccttcatcgaacacaacgtcgcgcgcagtgcgcacacgctgtgtctccgggtcgaggatgcggtaggccttcgagccctccgcgtagccgatgaacacccctggggtgctcctgtcatcgagcttgccaatgtggccaagctccttggcgaacgcgaggcagccgaagacccgcaggtgggagaccgccggcttgcgcccatgccaagcctcgtacggtgtcctgccatcgagggccttggtaggcgagcggttgaggatgtaggcggccgtcaccaccgcctccccccagaagatggccggcatccccctctgcttgaggagggcccgagccatccccacaaccgtctggttgcgccgctcaacgacgccgttctgctgcgggctgtacggcgtggtgtagtggcgctgaatgccctcatcagcgcagtacgacgcaaattcagccgctgtgaattcgccgctgttgtcggtgcgcagcacgtgcagcttgcggccgcactctgcctctgcagcagcctgcgcatgcctgatggcgtccgcagcctctcccttgctgccgaggaccatcacccacatgtagcgggagaggtcgtcgacgagcagtaagaagtaacgtcgccctcctggtgtggccggtgtcactgggccacacaagtccccgtgcacgagctcgagccgctccttggctcggaagctcgtctgctggggaaaggggagccgccactgcttcgtcaccacgcaaacgtcgcagagctgctccatgtggtcaaggcacggcatgcctcgcaccatctccttggcaccgagctgcttcagggcctcgaagtggaggtgcccgaagcgctcatgccactgccacgcctcgtcgtcccgacgagcggtgaggcaaactggttgtgcgacctgtgcgctgaggatgtagagtcgattagtgtccgtcctcgaccaacacgcgtgagccgttctcatccagctgtcccacgctgatgatagaattcctcaacgcggggatgtagtagactccggtgagcagcctgtgctcaccggacttggcggtgaaggtgacggagccaacacccttgatctccacgccggaggcgtccccgaacttgacggagcctcggacgctggagtcgaactcgatgaagaactcccgtcggccggtcatgtgatgggtggcgccggtgtcgaggtaccacccatcagccttgtcgttgctggagccgttgcagagggagacgagtaccttcggctcatcaaggtggaggaaagccgttgcggccggtgccgctggaggtagctcgatgcttgcgtgagccaggagcagagccggctcttcctccacccgtgcgacgtgggcctggccacgtcgtggctgtcgacagtctttggcccaatggccaagcttgccacagttgcggcaggcgtcgtctcgtgccggcttgtggttgccggtggcaacgccctgggcgcctctgcgggcgccaccctcggcacgtcttcgcacccaccgtagctggacacctccccgcgccttgcgcggcttacagccgcctgtcggggaagatgactcccccttccttccgtcaccttgagaggcctcccactgctcccgagtgagatggagcttcccgccgatggtgatgggccccgagagaggctgtggctcatcactatcgacgaccttgaggcgacctaacgcctcctcgatcgtcatcgtggagaggtccagcagagattcgatcgagcgagcgatctgcctgtacttctcagggacgcagcggaagagcttctcgacagctctctcctcgtcgtaggtgtcgtcgccgtactgcaccattttctgcaagagagtgttgagacggagagcaaagtcatcaacatcctcacctggcttgaaggccaggttctcccactccttgcggagtgcctgcagtgtggacttgcgggcgcggtcgctgccgatgcgtgccgcagcgatggcgtcccaggcctccttggcagtccgcttttgggaaagcgagaactgcatctcgggcgggattgcagcgatgagggcatccagtgcccgccgatcctcatcgtagtcgacgtcaccgtaccggactgcctcccacatgtgccgcacctggagcctcaccctcatcaccgcggcctactcgatgtatttggttttggtgagggtaggccacccaccgccgggaccaaagtccctgaccaccgtctggacgccgtggtgaccatggcgccggtcaggggagagagagccgtgctgcctgcgagggccacgtgcgggctccgggctgccgccggcacgcccgcgcccgtctgggttcccgtcggcgggcgcgcggtcccttgggccgccgccgccgccgtggaggtgggctgctgcccaccgctctgctcgctcccgtgcccttcctcttgccagctcctcaagttccctgtcggcggtgatgtcgccggcgatggagccgttgatgctgctgcgcaaggtctcaacctctacctccgccgcacgtgccgcatcttccgccgcctccgcctccgccctggctgccgccaactccgctgccgccagtctagccgccctcgctgctgctgcagcggtctgagccgttgctcgcctgcgctcttctgctgcggctagctcggcgtcttgctgacgccgagtgctcgaggcgaccaaacgccgagactgagcgtcggacatggcgcacctccggggggctgctgcgtggagagggggaagggaaaggggaaggaggagcaaccggtgctgctgctgctgctggctgagagctcaaccgagcttgggaaggggtggaacaagagatgtttagcctacaggaaagtgtggctctgataccagatgttagaatttcaatggttactctcattgagaagaggatggcactcgagatggggcgattttctggttttcttcattcactaaacacaaaagccatgcctacccgagggaggttggatacatatatatagccatagctggctgctagcctattgctgcacccttctagtctaaaattcgaaatttgaatgggatgctgtcctagagggcatccaaactgaataaagcataaatgaggcataaaggagatgctaactgctgttgtcctactaaccgcagctgtcctagcaactgaaaaatatgctaaagggtagatgctgtcctgaaaaaggtgaaactacccaaaagcaaaaagaagaatcacgaccaaggaccacaaagacttatccaacaatatagataacgagaacccagtactgtaacagtagtagtatagtagatccttgctgtgaaattatcctgtgacaaaacaatacatgctagaaaaattgatcaatgttttaaaaaggagtaagtggttttatgcggtcactaagggtgcaagcgggcaggcccgcgaacccaattatagtacaaataagcggttaccgcgtatttgttctattagtggcagaaatgtagtagcagcgactgcagcaaagatctgctgcattctgcacttgagggattaggatgctcccgaaggcaacttgaccctgcgtactgtgttcaatgcccggaattgtctgaagacatattaagaaattcgtatggcaattagagcaaactaataaggaaagtaagagccgaattaaatcataggagtaacgaagctcaacaccgtcgtgtgaacaaatttaagttttttcaatggaaattaaatgaacaccatgatggtaacgattatgttatatcataattcatacagcagaaactttccattcataataaaaacattaagcagtgctttatatatgggtagaaataaatattaagagcaaactaattgctcaggagggatttaggggtaactcttaatgtgagccatgtgatcaaataaaagtgatggtcaggatagtagtatcaacctaatagttaatgcaccaattcaaaactcgtgctttttatatgttgaatgctcaattgcatatggccaatctaaagtttgtttgaaatctttatcagattgaatttaccctgctacacagttgcctttacttgcaatttgtaagtctagtacatccatcaatccctgaatgcacacaagctgcatatctgcatgttcaccaaactctctggtgtcaaaacatcttatgttgacagctccattgaaaggatgaactatttgaatcaattcttgacattatgcagagtttactggtatatcttgaacatcatgtcatatgcatttaacaaattgctcccaactacccatttcaggcagtatgctcagaggtctcgtgttagaaagctccagtacattgcagagctcgagagaagagttcaagctttacaggtgaccttattgcaaggaactgttttaatgctttcttgtacaagttcgctttgccttaatgtttaaaaatggttgtttcaaatgtttgcagacagagggtgtagaagtttctgctgagatggattttcttggtcaacaaaatatcatgttagatttggagaataaagccttgaaacaacggcttgagagtctatctcaggaacacctaattaaacgctgtaagtatgatatctcccttctatattctttcacacgagtaattttattgcaatgctttcttttgccaatcgatgtttttagttctctttctattatattagagtgaattatgatgttttcttctgatttttttaaggcctatttggtttggaaaaaaaaataaatttgtgcatgtgtagttaatgttgtttcctctctctctcacgtattgattttattatctttctgagcattcccgtgtgactaatcacagaaaaagaatctatctcatcttaccaaagaacttaatagaagggtactccacgctttagtcattctctttggtaataatactttatatcttataactttctaaatctatgtgctggtcctgccggatcagaatgcacactatgtaaatcgatggagggagtatgtgacaaccaaaaatcctctatgccatcttacaatcggtgcatgtatcatatcaaaggctcataacctgagcatgatgtttcaacagaaaattacaatatttccaccgtagcaagaaacattgagattatctggatattttcttttgaatgatagtaaaccagttgcattgtatttcttcatcaagttttaattttgaaattgttctgattaaatgactgatcatctgaactcctttctacagttcaacaggagatgtttgaacgggaaattggccgtctcagatcattgtttcagcaacagcaacagcagcagcacataccacagcagcagggtcctacccacagtcgtagtaacagcagagacctcgattcgcaatttgcaaacatgtctctaaaacacggcgatcccaactcagggcgtgatgctgttccaggccttcgcatttaggattcttttcccccagcttatgattctgtgagtttcacatagcttcgctatccctgtcataccactatttgtggtcattagttgcatcaggaggggagcagcgacgatgaacctggaatcacatccaatgatgaatagagctggaaaggcttagtaactatggatccaatccttatttcattctgaatgtgcacctgacggtcatcctcatctcatatccattgttttgatgctagaccagtcggaggtgtttagggtctatttgcagcttgaagcttttcttgcttcctagtcagtttgaaacaaggttctaattcattcattcagtctttgtttcatttgttatttcaaatccgcattattacacaccatgtgttgcttctaatagttcggcagccggcacacaaggacatgagcagaatgtgagaagtgttgagattaattgtcacgtcttggagaactgtatgcagcacatccaataaaagcttagtgctgttgaagcatgttgtagttctctcatgtctttgaactgtgtattgactcctgtaataccaagttaatcggaacgcagtgtcatatctgataaggcacgccgtgttcatatgaaaaataagctgttatatatctttttgggcctggaagtatgctatcacttaatttactttagattgtccccttctatctgcttgtattctgtgtcacgttgggtgataatgttaatcgccgatctactatattaatagtattgtgcgacatttcgtctagattggtcccatttcactgctgacttttttaaactgctcatgattcaagttaaacatcagttagattatttgaaacatctgtggtttgatgaagtttttcgcatatcggagtagaatgcttagttcaaattaactgaatttagaaccacagaacaaaagagagagaaatgatctaagctgcaactattggttgttccagctattggtataaaaccttgaacttcaaatactagcaaatggttgttgctatgaacgcaaactagtattaagataataaataaaaattatactggagacagtgaaacaataggttcttggcagtcctgtcgcttttatccgtagttgattttaattcaatgttcatttgtaaaaaaaatgttatccaggcaacatacatcgctaaacaggataaatgaccgagatgtccattgaccatgaaaactgaagtatgaatgcaagtcccgttgtgttataatagcatttcttacaatggatacagggagcattcatatcaaatagaccaactaattggtcgattacatagaaaatgtctgggcaaattgttgccatgcagcgaagaccacccagaagctacttctttttgttctgatcgatgttcatgcctgtaggattgttctgccgaaattgagtcactgcagtgtcaaatgtcccccttacatgctggcacatcaccatcaaatcctgcaaagagtctttcagaacatcctttgctgggtctcctgccaacatatacatcatacatcaggaaggcatcaaagatcaaacatttgtcgaaggcaatggtgcagaagagttttaaattgtaaaatgacagggaagaacaatagccatcccttcgatatttggaatatctgctaataatttggagggaaactactaatacaacaacattattcattaataagattagatgtgctacacattcaaccataagaacagaagctgtactatttagttataattgctctccacaataatataataaatatgtacacaccagctgatacacatgactgagtagtcaaaaaaagaaaaaaaaaactgtttggaattcttgcagcttcatgcgatgaatatatattccattatacaaagaaagtgaatattgatataatcatataaggcccattcaatatgcattgacaatcaaaagaaatgggacaattttgatcacccactatatgatagtacctgtagtctgaactcttatgttgactttgttgtcagcaggatgagggatactgtatccacagaatgctacccttgggctgtaacaacataaagaagagataattacaatgagaagatcttatacatcaggtttatacccaattcattgaaaaacacaagttaattttgaagattgcaatgattactatcgttgtctgaagcctgaaccattacctaaaaccttatttactattttacttattgagagctgatccaactacacataatgcaatacctaattaacattccaagttgttatttgttaaatatgcatgaccagcagatattatatcatttcctatggtacctcaggagttgttgtttgctgctattattatcaaatcaacaaggaacatgaactgttgcatgccaaagattaagctatcaatcaccatcatacaccagaaaatatgcctagttatgataaaccatgagaaatatgtttaatttactgatgatagcctctaagaaacatcatttcatacaaaaacatatcagggatgccccaaagaactaagtttcctaatcagtcaaaactcacaagctgccacaaaacatatccacggaatgctacccttgggctgtagcaacataaagaagggacagtcacaaagagaagttcttatacatcaaggcttactcaattcatagaaaaactcaagttgattttgaaaacagcaatgattactatagttgtcttaaaaaaaaaacttatttacttattgagagctgatccaactatacataaatcagtacctccttaacattccaagttgttatttgttaaatacacaggagcaacagatatcatatcatttcctaggaagcccaggagttgcttgcctgctgccattattatcaaatcagtaaggaacatgaattattgcatgcgaaagcttagctatcagtcaccatcatacaagggaaaatatgcccaagttataataaaccacgaataacttattttacttcctgagctatctctaagacacagtgaaataccatttcatacgattttgctaatgagtcgcatgcacccagatttttgccatggattatttgatcaatgctaaaatatgatttctcaaaaaaaaaaaatcttctactgcattgtttagaccacttgttctaagctatttatgaagtttatttttcaaaatattaacttattgcattaatcaagcaaacaatccacgtcaataatccgctcaaaaaactgtctccaacaggacctaaaacggatcagcaattccccaaagaagaatcgattttcctaaccagtcacaagcagccacaaatattggcgagaacaaatagttctttacgtctattttgtgttatattaattaagttgtagttgcgagggaatacaagcaactcaacatataattctgcactcataggaggtaattcttattctagttctgagtgttccaatctggatttaaactaaacaatggtgtggatttttggttattacattacacaaaccccagttgctccaatctaacaactcagcaaccgcatcaaaatatctaaatttctacagtacgaacaacttcgactgcacttcaagtggcaaccacaatctcttgatgtcaacaccacaaaatctaaaagagtcttgcttggttaacacaaacacatctattaaaggaggaacttgtacgcactcctgattaagaacaaatctaacggagttggcgagcgtgtgatcctcctccacgatggagaacgtcgaggccgtcgagtccgtcaccgacccatgctccatgatggcttctccttgcctacaagaagcaaccaaaaaaaaaaagaaggttcatgagagctaatccaatccaaggaagcccttcaccaagaaaccaggacaagaggctagcgctagatttcgataaaaaagaggatggatcccccaccggtgggtgccgcactgcgccggcgggtcggtggcggcgccggtggtttggggagggaaagaagcggaggggaaggagggaggggaaggagcgatctggggaagggatggagtgggctcggatctgggccgttcgattgtagggtgataaatatgagccgtttgatttgtaagatgtaatagtgtaagaacgagagatgaggtggtgagcgtgcagagccctcgcagaaccctcactctctcatgccgcaatcaccatgagcgccgccacccccgactccgccgccgccgccaagcgccccatcgacccctcccacgccgacccgtcgccggcggcgaagctccagaggtcgtccccgccggatccctcgccgccggctgaggcgcagggcgacgccactgacggcggcggcgaagtggctggggtgagaagcggggagatggccggcgcgcggaaccctcaggcgcagcggtacctggtcgccgtggagtacgtcggcacccggttctccggctcccagcagcagctcaaccagcgcaccgtcgtcggcgtcctcgaggtgaaatgcttctaatctgagctgtggattcgaaatggcgaccgtaatctgcactgctacggatgtccctggtactaggtagctacacaaattttctgaaatcggtaggggcttggggcagatttacgaaggatgaaagtccatgagaatatgaagcatgtatactcgtcttttgctggtctaactgaatcgttacacttacgcggatggcctgctaaagttttagaaattttttttttgcatcaggagatttgacttatttgttgatgactagtacccaatccgtactgcaatttgaggttaatcattcccaaatagcaagtacattcagtagtaactgatatatatgcctgtccttgggtaagcccttggatctaacatatgtttggaatgcataggactaatttgtgaaagtaaaattggagccacgttatttttgacctctcgggttttgagctagctagtagcttcgcttctgttttgctctataatggatgaagttagactcagtgcaacagtaggaaattctatgacatttgtaaatctacacttgtcatgttatatgatcctatacataagaacaactgggtgatgcttggttttagtcttgtaatgggcccaagtgtagtagtcaggatgcaaatggacctcatgtgctctggtgatttgtcagctttgggttatcaagtgggtggtaaatggcaggggaaacgttgtgcagagtacgtcatgactgtggcgacacttttaactttggtgttctggagccgttcgttatgaaaccaaaatttcctaacaagcctcaaccataatattgatacaatcaaaacattggcaacattttgctttaaataaaagaaggcattgttattttcttccgtttctgaagtgtgatcaaagttaagccggtgaaagactatgtcttttatagcttagcaacttttagtggtttgtatgctgagggacactaaagcgagcaacaacagaaatatacccttgaagaatttccagggtgcaggagttacaggtagataacacttgctgctttttaagagcacttgcactgattgaccactttgtcacaactcacaaatgaatcaaatattttccttggaagtcaaatagataccttgaataaaagtatgagtttgtgctatccagggtctctagtgaactagaagatatactccctccgtttcacaatgtaagatcttttgactttttccaaagttaaacttctttaagtatgactaagtttatagagaaaaataacaacactttcaacataaaacaaatacaatatcaaaatattgtatttaatgaaactagttttgtgttgtaaatattgttacatttttctataaacttggtcaaaattaaagaagtttgactttgaagaaaaagtcaaaacatcttaacattgtgaaatggagggagtattaggattagtgttgttatcctgcatcttaaattgtttgcgtttagtctcctttgtgtgttatctatttgagatattggccttttggcttacagtggcaatgcatcagttacttttcctacatctttcacatggtattagagctgaattctaaaccgttgaatgatcgtccaacagcaacccacggctactaggagctgtagctcccacggtagtaccaaatctgttgctttttctgatctgtttcttgtcatgaaaatcactttgagatctgtagtggaggctacatggcattgttttccccaagtctgtggctatcaacagatttgtgacctggcgttgctgccataatcagcagtgtgtttgtgttggctctgcttggggtttagcatcttaggtgttagctctgataccttgtgagagatttagagacttggctgttgcgttacattgtagcccagtaggccaacatgtctatgtaaagggggaattgatatcttgacattccacaaaataaattggcttcgattgtttgcaatcctggcccacatgccattgactcagttccgcatgtcattgtcacagtctcacagcgtaacaagtaacaacataatcaaagtggcaaatcaccaatttttacacacaagggattaaagtagaccagcatgtcagtgttagcaaaaggaacataggtttggagctagttctttatttccatttgccacactcttaacatggctggttgggatacatatatcaactagtggcttacaccataaggcaaagcaaatagcttacatcctaaggtagctactagtgggcttacatcctaaggaaactactagtggcttacatcctaaggcagctaactattattccaaaatagatgttaaaacatatggtaaaaacaagacttaatctgtcattatccccctaagtcttgtgtggcaccttctggggaatttgaaccattccaatcctggcgcgaagctcttggaacttgacccgcccaagagacttggtgagaaggtcagcgagctgatcctgggtgttgatgtagctggccttgatgctcccctcgtccaagcagctccgaatgaaatggtacttgatgcggatgtgcttgctgcgctcatggaagacgggattcttcgccaaggccaaccttccagatgagcgacttgggccttctctccttctacctggggatctcccttcgtcagaccgcctacgccaagcgcatcgtcgagttgggtgggctcaccggctgcaacccagcctacactctcatggaggaaaggctgaagctgagccgtgacagcacggccaaggaggttgatgccacgcagtaccggcgcattgtgggcagccttcgctacctcgttcacacgcggccggacttggcgtttgctgttggctatgttagccggttcatgcagcgaccgatgacagagcaccagcgggctgccaagaggatccgccgttacgtcgagggcaccagtgactacggcgatgtaagccactagtagtttccttaggatgtaagccactagtagctaccttaggatgtaagctatttgctttgtcttatggtgtaagccactagtctatatatgtatcccaaccagccatgttagagtgtggcaaatggaaataaagaactagctccaaacctgtgttccttttgctaactgtcagggccaccagccataattttactttaataacatgccagtttcgcctacatcttgtgtttcagtcgtagactcgtagtagcagagcaatttacagaacaacatttagggagttgcctattggctgttgcagtgagacaaatggattatttctatgattccaggctttcttttaattcagatgatcggactgcaagatgaaataatctgcctttgtctaggtggttgtacacagatttaattaaggtctagtatttaagacaaaggaatggcccagtatttttctcctagaaatggaaatatacatttttagttttgtttgttaggatcatattgaaggcaagtggctactaaagaacggatgctgaattggctgcagttaaataatatgaactctagtgatttttcacaaagaaaatatgtgacatcaagattagttccatactcttgttttcgcttggtctcctttgtgtccaatgtattctagatatgccttttggcctacaatagcaatgcatcagttacgtttcctacatagttacatggtatcagagctgaaatcctaaaccaatgaatgtttatccagcaccaatcccctgctgctaggagctgtagctctcggggcagtacctaatccgctgctgatctgtttctagtcatgaaaagcactgtgatctgtaagtgcttgctgcatgccatggttttgcccaattctatggccatcgttggattcgtgacctgacagtgatgcaataatcagtgatggatttgtgttggctctacttggggttgaggatcttagctgttagctctgataccatgttaactgtttagagacttggctgatgcattacttttggaaaccatgtaaagagtacatgtgtacacataagagactaaagcaaaccaatgtgttactaaccctaatttattttgtagtagcatgcacgtctcatttgcatggggaattgcctataggctgttccagcagtacagatggattacttttgtgattcctgggtttcttttaaagttgagttgatagggcactggcaatattttgcacatgaccaaacagccccttgttattttctcccgttcctgaagggtgatcaaagttaagccggtgaaagactaatgtcttttttagaggttagcagcttttagtggtttatgaataccatgctgagagacactggagtgaacaataatagaaatatgtcctttaaatattgtgagggtgcagcatgaaattgctgcttcttaagagcacttgcactggtttgccacttttaccacaactcataaggaatcaaatgtttcccttggaaatcaaatagacaccttcaagtatgagtttgtgccatccaggagctctggcaagtggcaaacccgaagagccttatgttgtatcatgtgttaattatatatgaggatcagtcctgtacttccaagttattttcttttagtttcctttgtatctatgtgttcttgttggccttgtggcctacaatagcaatgcattggctatgtttcctatgtccaccatttggtattagagctgaaatcctaaacctttgattgtttgtccacaccaatccactgctgctaggagttttagctccaatggcagtacctaatctggtactgatctgtttcttttcatgaaaagaactttgtgatctgcatgccatggtattccccaagtctgtcgccttcaacggatttgtgacttgacattaatgccataatcagcagtatgtttgtgttggctctgattggggtttaggatgttagttgttagctctgataccaattgttggacctagagacttggctgacgcattactattggagcccaacatgtctatgtaaagggtacatgctacaacatcagaaactaaagaaaaccaatgtgtcagtgtcgctaatcctaatttaccttttatcacatgcacattccacctacatggatgcgtttgagttctagctagcagagcaatttacagaacaacatctgcggtagttgcctatatgctgttcactagatggacagatggattagttttgtcattccaggctttcttttagttgagaagatagaattgcaagatgaaataaactaccttttgtttttttcttgagataaacataaactacctttgttgctgtacacactacacaaaggtttaatgttgttctagtatttaagatggcttagtattttgtcctaacaatgaaaatatacatgttcagtttctttttgttaggatcatattgaagtcaagtgactactgaagaatggatgctgacttggctgctgttgaataatatgaaatctagttttcttataaaaatatgcgatatcaggattagttccatattcccatgttgtttacccttagtctcctatgtgtcctatgtattctagatattggccttttgtcctacaatagcaatgcatcagttatgtttcctggatcattaaatcattgaatgtttatctagcaccaatctgctgctgatctgtttgtagtcatgaaaagcactttatgatctgaaagtgctggctgtatgccatggttttccccattctatggttattattgcaatcgtgacttaatagtgatgcaataatcagtagtggattcgtgttggctctacttcgggtttaggatcatagttattagctctgataccatgttattgatttagaaacttggctgatgcattacttttggagaccaacatgtcgatgtaaagggtacatgtgtacacataagaggctaaagcagaccaatgtgtcactaaccctaatctattttgaataacatgcatgttttatctgcatggatgtgtttcagtcctgggtagcagagcattttacagaacagcacatggggattggctaatacaaaattacaaatggattactttgtcatttcagtctttctttgtataggactctaggatatttacggaaggatttaattacagttattaagatcaagtgacccagtattttttgtcctagctgcaacaacatacatgttttgttttgtttgttagtatcagattgaaggcaagtggctgctgaaaaatggatgttgacttgttgactgcagttgaataatacgaagtccagtgctttgttaaaagataatattatcataaacattgtcatttgcaaaatgctcctcttattgttggaatgactagtcaaataccacttgatagattacttctacagcctcaacttattactagttgtgaaatgttaattgatgctaaatgtagttcacacgtcacacccatgcttttgaattatttcaggaggcatttcacaaattcattggtcagccagtctcaatcttctgttctagtcgaacggtatgtgaacttgttttattgcaatttcttctttttccttctaggtcagtatttgccttcagtacagcatgttttcttttactatttgaatatccattatcttgtgatagaaattacttgtggtctcttgctgactgtcactagtgagttttttactacgtaaacatggatacctggtatagttgtaccaacaatcgattatgtaatatgtatgtcagactggaggaattttggatcaatattgcatagcataatagatgtaaatagtggttaagatagaatagaattaccaggatcaatccaggttatggtcatagaagtatgatcaaattagtggagaggttatgccttctattaaatcaatgaatttatttctcacatctttgcaacatgctatgatactcttagtttcctgcaatgttatggcatactcatatgtattgattagtgaatgacttatattctggttcaggacacaggtgttcatgctttatcaaatgtttgtcatgttgacgtggagcggataagtaaaagaaagcctggtgaaatggtatgtgtccacaaactttctttccttactgggtttactcccaatactttttttctgcattttttggtactcaaaaacttattttgagtcttcaaatgcaactttgacccccccccccccagtcttctattggaatatatttttaaaacccattagaattataatattatgaaagtatttttttgagacaactctacattatgatttgtgtatattctaaatctatattgattctcaaatgttaggtggcccttggatgcttatctaaaacaagcacatatgtgactggactacatgataatttaggttgactgctgtaacatccatgttagaatctcactatatgcccccaaaccgatttcataaatgaactgtttttccctcttgacttgtacctctttatttgtgtaaacaaaaatatgttatgtagaacatctgtagccctgatgaccttcttgtccccatttgcagttgccacctcatgagcctggagttgtaaaacgtgcagtgaaccattttctacaggcaagtttttgacccaatcttgttatagtttcattcacctacaaattgtcagtccactttctctatagaagttatcatactgtaccttcgttctttgttttggtgatggcacacattcatatggttgatttgcttctcagtaatttgtctatgtactttacatctttacccgtttattgatggtgttatttccttatctgccattgtatatttatttttgcttcaccattttcctcgcagaagaatgaaggtgacataatggtgactgatgtccgttgtgttgcaccagacttccatgctagatacaaagccctagagcgcacgtaggtagcaaaatatacaatacaataaagggattttctcatttgctcttgttgttatacttgttccattcttatgtccaaattattttatcacaagcagcaataacccaaaatattaacatgctgtagtttttttgaagtaaatgagagaaaaatgaagcctgcttaaagaccagcctttctgaaatattggaaatgcttatatttttacttatgttcttgaaggtaccactatcgtttgctttctggatctgagccactatcagtttttgagaaaacctctgcttggcacatacccgaggatttaaatgtacaggcaatgaaggtgaagttttcttccatcattatttcctgatacaaaaattatattactgggtttactgatgattcatgttcagaaagcgtgcagcatacttgttgggcatcatgatttcagttcatttcgagcaactggatgtcaggtggtgtacttacttcttaactgctactcatttaaacagagctttttgaagaaatgcaagtatagtaagtcaggagataatcatagagttggagcattacatttggacagttgaacacagatttccctaccataagtgcatttaatttttcccctgcaatttgatcgagaacaaagtggactctgcagaatgcaaactatgaatcaagttaatttaattatttgctgaactatataacccatatttagaattttataattgatactttaacggaaacaataaacatttttcctgttttctagcgttttttggattttagcgtccaccttgtttacatgaaatttgattttctcttggcaattattgtttacaggcaaactctcccatgagaactttggatgagcttagtgttacagaagtatttccttccatgttttttccttcaagcatggagcgatcagagatggagtcattagatgggcatcttgtttattcaagaacgtcagttgtggaatcttctggaaaaggatctgatgcttctagtacaagtgagcaatcaagatttgagaatggagaagaatttggaaagaggctaaggcatcgttgcttcgttgttactgcacgggcacgttcatttctttaccaccaggttaattcatcttccatgaaggctaacttcagagcctagggatttacctggttgattgctgacttgctaaatcattttttgactgcctgtgtgggtgcccttgattgattgcaagttactctaatgatgttcggttcttaattcccatagtgttaattaagaacatatttcgtggtaatttgggaagtacttgtgttttggagcggagttcaacgcaatgttcctgggaaataaaaaaaaagtgtctatttctctcttttatcttcaaagttcaaactgttcatgttgtggagccttaaacctctgaaaaatgttttgatattagctgtaacgttaggcatcatccactttaactctattttcttgttggttgtagataaatgtgtttgagcaatgagcatgtaagcatttgctattactaggcaactttatgtcaccattgttggcttgttgccattaattgattattggatgatgctacccttcctcttctttttggtcatttggtatgttttttatgtcttctctgatggtgcaggtaaggttaatggttggtcttctaaaatctgttggtactggagatctaacaactgaagatggtctgttttgattcctttaataaaattttcactgagtatcttttgtgttttgccttttgctccatagattgtgaaatgatgtgaacgtttatggtctttgatgcagttgagagaattctgaatttaaaggcagtgactgcggcacctcctatggcacctgcttgtggtctctaccttgccaacgtgaaatatgacctgagcgtttgaaggcagatttctgaaatgaccacaagttatgtcatgttttgtctttcagaggtatgtctaatgtactagtagctttttatgactcgtactgttgtatgtctgtataatctctactcactgcattttgattcagaattatttgccatgacacagcaagctatgatctctattgagtctattcaaacactgcccagttttatcagtaattatgcgctgttgcacaccacatcaagattttggcattgcatgatccttgtgttgatctttctatgtattgcagtattggtaatttgagcttctctgaggtacatctgttcagttagttcaggtcttcagtctaacagtggatatcctggcagtacttttctctttggtgaaccactaattagaaatggttaaataaaatacacggtctgacaagctaactgttgacccagtgcttccacctgggtcaatggtcgatccagggtgtgataagtgataacactacctacaagctacagtagtgttcctatgtgctgcaatgggaattagtttctttgtattggagtgtattgaataattttttaactaacatgacttttgaatttggccaaatcagtgatccatagtgaggataaagggtgcacgtgttggtctggaattttatgtgatgggctgtggtaggagaggtttggtgtgggaccaaattagaactaaccgtcgactgccagccaaataaatatgaatcttttggtgatctatagttgatagtggtacttgggaaattggatttatccctccttggttctttcttgtcacctactggctctgtaatctaattaactgtcatcaactacttgtaaaaggtgttgtattgattgtgtttcctttaaatttgtcaatttttctaagtagttctcttctttagctaattacattgagtttgagacctttacttaagttagaaatcaggatgtttttccagttatgaacttatgttaaacagcatgtgagaagtaataccttttcttcctttccaggcccatgtgtttgaattattgaaatactgagtagagaggtccagacgcaccttggaaaggaaaatgctttctcatggtccgaattttgtgcaaatctggaaaattttccccgatatttataagatacttttgtgcacatgatggaaggacatgtatttccatgttctcattagtttcgactcctatgtattcagattatcagatgtcaagtcgcataacattctctattgaatgtatgcacaaagttctagatcctaggacaaattaaactgtatatgtaaactagagtggcagctgacccttccttgattatgccttatattgtttcatcttcatttcacacagcacatacattatgcaaactgcattgcatggaatacatttcaccttcaattcatacatttgatctgaatggctttagtacaatctgcatcattgatttgctttcttgatcagtttgctttatcccatcatcccatgccccacgaaaccattacacattgcactcgtcattcatgtgcatcctcctttgcggcttgatctgatgtaatgcccgaaagaatgctttcatctttggacctttatttgtgacgtgctgatgaaagtttgctctgtaaagagagaacaagggcactctcccttggatgtaaattttatgcttgacatgaagagctatgatgatctgtgaatctatctggctatgcctttgggaggcaacggtacaatgtaaatccacaagtttctattctgtctcagctagagattgtcatttgtgcagatggtaggattgctgcattggacagcatgaccatgtctagagcctacgcttgtgctggctgcccacttctttgcagtcccaattcaaaggttgcaatgatagattgattccgtcatcatcttttcctttcatttcctttgtggtcgtatgcatcaaaacattatcagcttagagaaacggacatttggttgttggttgagagctaggttgttgctcttctctgcatgccttttcttttgcctacttatgtacactttgttctttacaaagccagattaacttgtcagcagtttcaatctacacgtcaaatgtggtttctctaacagttctatcccaacattttccatgctattcaacatgaaaatatgttgcctccgtttcaataagttcatattttatccattccgtatgtatcaatacaaaaccaaaaaactactatacccctattttttctattttattgaatacaactgtaattatttctctttttatttactctcaaaacagttatcctatattttcataaactccgatgtaatgattgcttgaaaatgaacttattttgagacaaatagaaggagtaaaaaataattttattttgggataggattttgagacgaatggagcaccatctttagaccagaaaatggatagccaaatgagttgctgatgagcacaggcatccatagtccatagatgattgtcatccatggatgatcgtcatatacaattttcaagggatacttttctaaagtaactttttaacgttgtacttaaatagctatcataaaaatcagataatccatcaattccagctatctcaaatacagtatatcaaatctaggatatttacttttaaaaaatggataatcaaaatgtgttaagttgcagaagaacacaggcatccatggatgattgtcatcttgtcagaatggcaccaaccaaaggaggcaaaggcgagtcggcagagccttgacgtctgtgcaaacctgtcaagcaagtggccggtaaaacaactacgaccaggcatttgcctgagcaaaagggggctagattgatacggattaaaggagcacgaatctttaaacaaaatcaaagtggaccgaagcggtctcccattggcgcatctaccggggtcccaccccctcatccctgaaagcgcctaccgccaagtacgctttccttgcaaagtccagcatagtagtgtaagctttcattcaaaaggaaaatgaaattcaggaatgtgttggctggctgtaccttgtaatcagtttaagctttggtagtgcaaaagatttggtgccacaaaacatagtacatatttagttattcattacaagaaaaatgaacacgcacaagacgtatacgcacatattcacgagtgtgctcactttaacgcacacttattaagagagagaaatggaaacatgtttttaaagtactaaattaaattgttgatcgaaacctaaacaattatcttaatactcattagttgtatgtatgtatatagttaattggttttgtccatagaggatgagttaattcatcctttatcttggtgacaaaataagtgtcttggatttttatatagagggagtaataacaaatctcttcattgatttcctattaaaagcacttccgtgtcggatatcgattacactagtagagtctgaatgtgtgggagtggtaaaatattatcatgtcatagcaattgtagggacgaatccactttgaattttctaaatgtaaacttcaggaatgaaaagaaaaggtcagtgtttaagtccaccatgacttagttttttaatccctaatcaagtgtcaatgtatgtgtttgttttaagcaaagtagtgatgggggtgtatacagtagtttgcagatcactaacagggattgctcaataacaaatggcagtggaggacttgtcaagaaagggagtttgttcacaaggcttccagcgcagactgcaccgaatcatttatttcattttcccattattggtatccatccggccttgtagccttcatggttacgtgtaacctacccaggatcatgcctgaaaaaaggggtggtaatttgatttatttcggttctagcttttctattctccaaaatatggccgaattgaacttgtcaaatggtgagcttgcatgattttgtggattgtaggaagtttgaagaaattaaccaatttggcaaggtgtgcgacaggcttggttttagtgaggtagagtcaacagtggtcaatttttgcttttgactgtgcttgacttggtacatatatattgaccatcaggaggtcaagctaccagttgtactatacgattttgttttcctgagctaagcctaccaattatatatactagtaataagattacaaaatgaactatggcatatatttctctgaagttttagatatagtcaaccactttaataaaatattaatttggcataatttagtggattatttcgaaataaagtttgtaaacagtaaaattaccaatacgaacttgatctgacataaaaccacttggttaatttgctaattaagggcaaattccagttgttttaaacctaaaagattttatgtgcttatccaacggctgggtagctacttggcttaatatatattgatatgtgcggtttaaataaaataagttgctactccctctgtcccacagtataagggattttgagtttttgcttacaacgt

SEQ ID NO: 7521 - DNA, 4595 bp, Oryza sativa
agtctttttcttcgttttgcgtgttagtttgtcgtttccgtcgttgcgaaggttcgtgagtgcgccggaagtattcaataagattaattgaagaccgattattgcaaggcaagtcacacagaccctaaacacaatcctttgagcatgttgatcctatatttaaattctctatttatttcaactgtgcatttattttcgaatgtcaccgggtggtgtgaacctattcctttgttatggccaatttgcattgattactttattccttgataccttgggttattataacttgactagttgagctttatatattggttcagctagatattagatatgattgcttagccatgcttagaaacattagcacactattgggataacttatgactcattgtttaatgatggtttaatcgtagctcacgatggttaatcgtgttatgataattaattgataactaaaacttgacaatggtgggttgtgagcacatggttttgaaggtcgtgctcatgacaattaaggaccggttcacgagctactgttgtgaaacattaaccgtaccaaccacaagccagcatgggcaacggctttaccttctgtatagcatgattcattgcggggcaccagactgagaagcggcgagaagtccgtgggggtcgctggggagtccatgcctctggttatatttatagagggggtgattatgatccaggaatggtgcactgtggtgagttgtgttgtgcaaagggtattgtcacagcctctattcgggtactttccagtatcgcgacgcatggtagacatgatgaggaggctgtgtcttgtgggtacagtggtacacctctggccagagtaaaactattcgaatagccgtgcccgcggttatgggcgggttgagcaatgtttttcgtgattagtctcacacctctcacaataattatggatgttatatctggtaataatttgcttagctcctggtttggagttagatctgtacagccgggtatggttgttcaggatggttgggcctgtgcagcatgggtgtgctgttcagtgttgattaaaatttctgattaattactccactgttttactcctcttaaatgttttgctaaatgctgcttttgcaaatgagcctatattatgccatcctttggtatccttgtgcacttgcatatttgctgtgtggcttgttgagtatgtcatatgctcattcttgcaataatcaatcaaacctcagttgaagaaaaaggatccagaaggagaagacgtttggcttataccccagttgagctgcctgtgggagtggagccggaccttcgctagaccgtaattccgctgcagttttcttttcttttgaaagtatgtaacactattattgatgattctgtatattaaattgtcagtttgtgtacctcggctgattcctggacgaggattttatgcacaaataagttcggaaattactagtgaatttctgggcgtgacaatttccccctctttattgcgcgcgggggcggcgggatgcggcggaatccgcggcggcggcagcgctagggcacgggcgaggcggcgggcgcggcgcgaggtaggggatgacgggtgggccctacccgtcagcgagggtggcgggcgggcccgcccgtcagcggcacgcgcgcggggaggaggccgattgggccgcgggggagaggagagagagggagggaggtggcccgagccggcccaagaggggaaggggggaaaagactttttagggtttttctttttataaactcattttaactttgtttatttcttaataattattatttgtgctctgaaaattccactaaaatttgagggctctttttagaccaaggagaatttaacaaaaattctccgggccacatttgaatttttcttgtacgtattttagtgtttgccaatttcttttcgaattttaattaattctattattccttttagaaaatgatttttatttcgggatgaatttatcaggacgtgacaaatccaccccccttacaagaatctcgtccccgagattcgaggaggctagcatgaagataggttgggcggtcttctcttcttgtttgacttcttccgtcgcgtcttctaaacgaacttgcctagcaaaacttctccactctggactgcttggctcgacctcctgttgcggatggaatcttctcttcacctgacttatccttggttgcaccttgagctgacttcgactggggtgcggtacttgaagacggggtttcagttcgaggacttctcataattcatacccttggtgtcaatctcatacaagttaccaatttcacgttgtgcgtcgataccaacttgtcattactaggataccatgcttgtcatcatgagaataccatgcttggcgtttccttccagcttaccaccaaatgctttagactatcatatcccgcttaccaaggataccatgattgacaacttgccactaactgtctcatattagcttttctggtctctgggtgctagatacttctgctattcactgcaagggtcgataactttgcctttgaattatgcttcccaagagaaccaacttatcccacttgacatgctttgacgtcttcccaaatggctttattgctggatttgttattgtctaatcattatcctgccaaatctgaggcttcgttgttagatgtgcttttaatctgacctctatagattatcttcgaacatatcacttgattcataactgggaatagctctcacgaacaagcaactcggattcactttctttacattcagtttacttcccattatatcttcaggttgtcctcagttagcattcaacgtattcctttatacctttaaccttgatgtgttctttcccattggatcatctcccaagacatggcattgcctggtaaccggtgcttgcacttttcactccgtgtagcatctgataccgagttgaagatttcactctttgccttcatagaaacacttttacccaggtcatcttgcttacttaatgacaaggtgactgttgcggggcaattacaatcaggggtcttccttgagcgatgcagagcatgtttctgtttatcaatcacctttcggcctacttctttcatgctagagaacatctttgccaatctcttttatcaatcttctttcggcttatctctaacaggtggtattctttaatgtggattgcggacgcttctggggacgatgaggtcctttggcttgctgcctttcagagaaaccttgaagtagttcgtcaaaagctagactgacgattgttgcctttgatccgaagaagacacatctgaaactcttagtccaaacaaatgtctctttggttgatcacttgattttcttcgccatcaacaggttggttattaactcgagattagtatatgattcctctgaaatgagaccctaggtctcctttatcagtaagcaattatacacataatcacatatccgcatcttccaaaagaatcctaatagaacttgtctgtattacacatttctcccttattacatgaatacaaggcactaccttaaacaaaaagggaagatgcttaacatcggtacattgtttctactatgggttatgattaactcgaggcctcacaggtatggcgtttgctccagtgaccacaaggcgagtgacttgtcttcttcttgcataatggccggagtgatggcgtaggttacgcttcggctgtggacaatctctagagaaatgacctggttctttgcagttgtaacaaatcaacgtcttctttgttgagctgtccatctggggacgatcattttgacttggagttggaattggtggttgaaatccttgctaacattggcatcagtggtaccatagttgctatcaccattggagtctttctcagtgtcaaaattgctaaggttgtcattctggattccaacattgatactatcgttgacatcttggtgaatgctactgacattgcacgctttattcgagtggtcgctaatgaggcaagaaccatggttgttggtggtatcatcatcattagtattgctagtgttgttgtctgcattgcgtccatcttcttggggcaggaactcttgatgcacaacagaagatccggtgatctgaagtggctcagtgcgctgtctttggttaccacatggaaatactgggatgttgacaatcctcctcttgcagttcgtcatccgattatgctcactttcgagttgcatggctttgtccacaagtttctcaaaatcttagtaatcctctagaaggagttgcactgcaagctcatcttttaacccctggagaaacttctcttgtttgtcttcatctgtttccacatcttctggtgcatagtgagccaaacgatagaactcgtgcaggtactttgtgacggtcaaatctccttgcttcagatagcgaaactctcattttcttaatgtgatcattcctgcgggaacatgtgatctcctgaatacagatgaaaactcgttccaggtgatggtatgtccttctggccgtgatgcttcgtagctatcccaccactctgaagccggtccaaccagctgaggagttgcgaagcca

SEQ ID NO: 7522 - DNA, 3809 bp, Oryza sativa
  unsure (1)..(3809): unsure at all n locations
agcctcttgtgtttaataattatggaggcgctttactacctcataaaagaatggctatatattataagtgtctcctcncntactaanaaaanaaaagttancctggatnactattcgcatacacccaagncgacnctagaggaaccccttagctccagtgaacacttggcgattggcatgtctgcttcttgtaaattggcgaaaatgtggaggccgattttttttccttggttagggacagtccctggagtaatgtcgtggttctttgcagttgtaacaaaccataacttttttacactcgagttctccaccttgtacttgatttcttggctgttgttgaacgtgctgatgaagcctagagggggggttaataggctgtccctgaaaacttaaaaacaaatcgcagcgttaaaattcaaacagacccggaacatcgtggtaaggaactccggaacttccggcctgccaggcccaaaacttccggtgttcttaggacaggaacttccgggttacaaaacaaggatgaaattcatatttcgaatcaggagactaagccaatcttcacaagatgatgcacaggtattctaagtagaagatagatcacagaaacattccaaaaaacatcacagaaagaaacaagagcaattcttttcctgaagttcaaatctgcgatcctactctccgttgaggagctccaaagagctgggtctcgattaacccctttgcctgacttgtgcaaaaactccagaggaaatccacagccttcaactacaaacacccctaggcaagtttctagaattgagtgaccaccaagatccaactcaaactacttctagaaattcgccacaagtatacgttgctctacttggaaaacctctagaatctcagcacaagaacttaattaacttacctcgttcccttttggaggagaggagatccttcacaaacttacccgggacatccacaatatgcaacggattctcgcgggcgacacctaaccatctaggagatcatctccaagagtaataagcaccgagatgacagcccacaagatattccaagtgctcacccaagatcctagtcttcacacatctccaaatcttcttctcttcctctcaatctctctttctcataagaattaggctctagattgagtggagaaggcaagaaacacttgggagaggctagcaacagctctaggttcaaaaagtgaaagtggaatggccaatgaacaagctggaaacgagctgtatatgtgacgtcatctagccgttactcacaaatttgaactgaaaactagacaggaagttccggacctagaagacaggaacttccggataatacttaggaaaatttctttcatcatactggaacttccggacctggaaacaggaagttccggacttgcatttttggaccaatggagcatttgcaaaaatgactcctagggaaacttgacacttggttcacactaagagcacttgagatatctcagagcatcacctagaaccccacttaatagtacggtttttcctaaaaactcgattgcaaaaaataaactatcctatgcacttctcgagttccggtccgctttgattttatacttttggggggtctccaagcatccatcttccacaccttgaactaatgcacctaaaagatactcaatgaactcattagtcccttaaccacatttgtcattaatcaccaaaacccactagggggattaatgcactttcagttgtgctggaacatccaaaggtacaacgcggatactggcctctatcttgtcaactggtggctggggctgaaattgagcattgacaccttgtggtagtgcactcattggagtgggagctattgcatcttgggctatacgactgcttcaggacgcatggatgacaattcgctgaggagcaagcttctgattgaggggagttgcatggactgatgtgctggcaaatatgtttctcggtttcgggcacatgtcggcgaaatgacccacttcttgacaattgaagcaacatatatctttccagacttggcattttcttttcccattttgattcctctgtcttggcactggagttaggctgaaactgtagtcttgtcgaggatttgggttgccttgatgcttctctccattgtaactggcgggttggttggccatcttcttcgtcagcagaaaactgaattgacaatcttttggtacatgattagttccttcacacaagaaacaagtgatcctgctcgttggacactcgtcgggtggatggtcttcctcacaaggaacgcaagtggtgacacatgagctggcaaagtgaccgatttctccacaacgagagcatgccttatgttcctttttattctgattgaaaccttggagagacttctcatcttcatcccgtgaggagacttgatctgaatcttcgctatcagacactctacctccattagccaaaagatgttctgtcaactgtggtgcacctcggaagaaatttcttctctgacgttttgtcattcctggtggaggccattctgtgccggtaatggtcatcttacggacctcatcttcggttcgcattggtgcttttcttttctgctgaggacggttccttgcatagtgcccttgttcaacacagataaaacaaatgattcttgcttcttttgagtccacaagtggcatggcacgatgggcctgttgggatgctggcggagcgctgacttgtggtgtgagtgcttggactgcctccaactgcacttgaggttgcatctgactcgggttcagaattggcgtctgatgctgctgtagtatctctataagcaatttgttctggttaatcaggtgttggaccactgccatacaactggtgtctggtgcttcattcactcgggagcttgaggtacccacgtcctgatttctgaccatactgccttttttattgtcagccatctgttactaggtttggagagggagagagggaaaacaaaaggggagagacagattagaaactaaggataggaccttaacagatctattttttttctgttatgatgtatgttaggtttattctgcaagttgattaagcaaacaatctagcatggttacatcacaccccactgatgcaaaccacgcgctacacacacaagcaaggaaacacacgactaacgactctaccctagagggtggcttaggttctgcaacaggttctccaagatcttcacccctgcttcacagctggcttcattgcttccttcgcttcgctagcggatccaacagtcttctggagcttcggcaaacgattgacgatctcttcttcttcacaaagctgaccatctagtactagttgaaattcgaagaaggaagaaggaagtaaaccttttgcaaatagcattagggaaaggaggaaaaaggaactttcgcaaatagtttcatttataaaatatgtccttacgttttatccagttggcttatcctacagtcgagatatctctgataccagcttgtcgcgcccggaaaaataccttttccataacactagtgtattaatccccgtcccaggaaaagcacatcaggcctgacaaacatgatataaaagacacatctttattatatcgataatatttacattattacaaaggcacttcaggcctgacaaacaaaaataaatagcagcggactagtgggcctatggatccatcttcacaggcgctcaactagggtataagccagggctccacctaagacttcttctccaaaggggtaccgagctcgaattcgccctataatagtgcgtttctcacccacg

SEQ ID NO: 7523 - DNA, 4108 bp, Oryza sativa
ataatcagaccattcaatgactaatttaatatttaaataattgctaaaatgctatttgtattattaaaattaggagttgagctccgaaaaatccgagaaaattccagagagtataattaatcatggagaatttaataaaaattaaatccagccatgctttatatttaaaaaattttatttcccacatttaacttcacttgtaaattaattaatatttaatataaattctaagaataatttattaaataatttataaatcctgaaacgaaattcaggatgtgacacactggtgacagtgtcagtgcagtttagctctcggccaatcgtgttcagcatcaacgcacgaagcacgtcgaaatcgacttacactttgttcgcgagaggtcgccctttgtgatgttcgagtgttacatgttcccaccacttaccgctcccgcctgcgatttgacgccgccctcaggacccactgccaggtcgccgtcccctgtctcctcgccgtcgctccgtcctcaagatcggtgggagagcagcagacatgggggatctcgctcggtctcatcggcgcggggaagctcaccagcacgcagagcagagaagcttgccaatggggggagttgcaggtgtggaggtcctcgtcggtgggggtgtagtacgtgattcctgtgagaggtgagtagttgaacacaaaactcatcatgcagtccttgtcgctcttccacagagtacaacgtacgtggggtgctcgcgaacttccatgtccatctccacacctgtaatgccgagatcatgtgttctggagagtgcatatgaattctggattttagatccacacaacgacttgtacgtgtgccaagtcatggcgatcgttagtaatatgaaggtgtgtattcatcgaactattatgcatatgatctttaggtgataaaatattgattgaattgtctaccgttatctttcagaatccatactccagaaatcttacatatacacatatttgttgcatcaaacctaagctttcttttcatacatccctgaacaattcaacttcacaactgctctcgacataatctcattcagaatggtttttttttctcaaattagttggacatagcaaaatattgcttttcaagactgtaacacaaccaactagcagggatattcataaattttccccttctgttgggtgtttttttatagacatatataatgaaggcgtatataacaaagggagaagctgtttgagggtcttaaggacaatagctcaattgactaggaaattgatgtacaaatctctaccttgttttttgatttatagtttctttggtttcaaaaagtaaagtagctcatgacatgagaactttactagcagagaaatgggcttatatattattggaaagataaatttctccatcgatacttgctgccttgattgtgttgcgtgtgccagccctgtaggtggcaaatcattggagaatcagatgcagcttttagatgggcaaagtaaggccatggtcggtctgattaatctgtacagctttcaggcataggctcttgagataaaaaggtatcaaatttcaacttcttgatactcagtactcaagacatctgttaggagtagagctcagagaaaccctatttttagatcctgtaatcagtggcagagcttcgtggaggataaactgggttatggctcctccagcttcatgcaaatacactatattgagtatgttcatcttcatagacattgattaccatctttaacaggttagtttatgtagaaatcctacattatatttcatgttaatggccacttcttgttagtctatgaagctccgccattgtctgtaatgttgtttctgttaatggaaataggggtaatcttcaaaaaaagtctcatcttcgcactttcacattttttttgaaaaaaaaatatttctaaaataaattttttttaaaaaaaagaaatcctacattatatttcattgtataatatgctgatttagtgattttgagtagaatttcagggagtcaatgcaaaaacttgcatagtttggtcaacgccaccatcatgaagagttgcccaggcaagaagaactctggcaagctcatcatcacatgattcataattcgcactcaaaacatagaagttcaagacttcaggttattgtctcatctctacatctgattatcaaattagtttttttttcccatttttctatattttataaattccactacaaatgatcaatgaataacctcaggatttgacttctttttcaactgatctcttttttttttagcaaaacactgtagaggaagccccacagtaaacaatatattaaaaattaaaaaaaatatttacaacaagttcaaccaatgaatgaggactggtctctcaattacatttaactaggtgataccctgcgtgttgctgtgggatttgtaagaagtgatcatgatattttaagtgctgacaaatgctcaagcattacacaacaaagtaatcaattaggggtaggaacggtgcaaacaactctgaagaagggcaatataaatgttttgtacaaatatatacctgtagtctggtacgaataacgggagttcttcattgaaaaaagcagatctcagctcagcggtagtgcatttgtatatctagaagtagctatcaacttgtcaagtgtgaatgtgtgatttcctgaacatcttaatttcccacaattaatgaatctctaacaaaaaaaactgttgtatatttacctgttgtgcatttacctggttaagtggtgtgctgcttctgaactccttttaagtaccgttcaaaccctaatctagctaccaactggagtgattacttgattagtgaaggagcattgcggggttcataaaagtgtgagcagatagttacaaaccatggaggcaatggatattgtgtaattagcagatcatattcaagcctgaaattaaaaacatgtacaattgaggtccaacataagaatgtgacttagcctatgattgtacactgaaatgtcacttagcctatgattggacactttctcattagctgaacatgtagctgaatattaggcatcagagtttgtatgtgggtaaacaacaactaaagaatacatcataattgatgacatgatccaagaaagtcaccctgtagggtggtaataacagtacttaatgaaaataggcaaaacattatcaaaatgtagaagtgtgatgaaatagtaaagttcatttgcaaaacgtagaagtgttttgtatggttagtaaaagtcccatgtaaattggtagcaagatattcacttagaaaaattgatattgcaagatagacaatattaaatgcaggttagtgggacacatttatagaatagcagaatatgcctgatgctgtacgctgctgagaattgcgttcatttattctttgattaaaagtgcttggtatgattgccactggcataatattagaagtgcttgatatgattgccactggcataatatggtatagtccgataataagaattaaacagagaataacgtattgcagttctgaaaatttgataaatcacctttgcattagaaaaaaaatatctcatcaaagaaaataaaactgaaaactgaaggtgaaatttagaggcaagtactataaaatccacaggaaagtaggaatgcatgcaagatgtagcatgaaggacctaactgtacatcggacaaaggatgaacagtgcaaagcctatacagcggaagaactaattgggaaatagtggagcttgaacgaaaccaatgaaccaaatctgctgacgctctgcacgtataaacatgatttagctcaaacaataccaaaccgatgcaataagctgatcaatggggcttagataaaagtagaagaaaagaacttgagaaaaaggaaacatgaagataaacatctcaagtcatacccaaacactgtgagaagacatctacggccaggaaccggatgcaggtcgaagaaatcgatatatgagaaaactcaagtgtgttgatggaattgataattgatttaattgccacagttgatgccttgcagttacctgaatttggggagataaccaaaggttttaga

SEQ ID NO: 7524 - DNA, 5070 bp, Oryza sativa
attatggttgtgaaggccaacttttggctgaaaccccgtccttcacaaaatcaaacaagggaaccggctcccgtgccccacattgccaaaggtgcaggcggtggtgaacaccatcccgccggggaactccctgattttcatcaaactcaacatccggtgttcactcgctccaataacccacttgattgtcgcgcccggaaaaataccttttccagaacgctagtgtattaatccccgtcccaggaaaagctggggtacaccacacaaacatgatataaaagacacatctttattatatcgataatatttacattattacaaaggcacttcaggcctatggctccatcttcacaggcgctcaactggggtataagccatggctccacctaaacttcttctccaaagctttactgaagggggtgaaagatagagcaagaatgagtacaaccacagtactcagcaagtcacaccgggagatgcatgattaatgcaagggagtacaaagggtgataatataggggttaagttttgcaataaacagcatttaagagtcacttagttgcccaaagctattttataaagacaatcctagagctacacagtattattaatcaaggccctgaacccacacgaacctggcttaacccaaggcctatgatgattcagaccaaactggcaacccgacctaggtcccagctcgtcccaagccaacctaggccaaccattccacattttagttgttaagcaagttttaagaattaaaccactaacttgggtacattgctaggcttgcccataaccgagggcgcggctattcgaatagattatactctgatcagaggtgtacatctttacccacaagacacatctttactctgcattccacggccgtggaacccgtggtaaaggatgtgacataacccctttacccatcctagccgtgacaaaagcaccgacccaacctcgcctacggccggaatcccgagacaggtaggtaagattgagcccctagcagcaggacaccggccctgtgccatgacatcttgaataccgagccgcagcccgtgtagccttcatttgccctagagatgtccatcgagccccgacttcgtccatctccatccgtgtactcttgcaaggactagactgagcaccgagttaagccttacccattagacatgtggttagtacggtagtgctttgcaacagaggcccgaagaccggtccttatagtggctgaggtgctactagcagaaccatgcacctcgagcccagcctaaaaccattttgggagttttgaatagagggggggaggtgtgtgttcaattccaccacaagccaaccattccacagtgtccaaatgatatgagaactcccaaagtctaaagttataaaaccacctagtgttgcctaattaatcagcgaagcatctacctaaattcatactagtggaaccgttaatagagtacccactagttggggttttgtttatcctagggtgaacaaggtaataataacaatagcaataataataaggtcataacaaaggtaaataggcatggctaaataaaacagtgataatgcgggaatttatgtaaagcggtaatgcaataatttaaatcaaaataattttataaactgggattcaatatgctaaagggtgatgcaacttgccttgctcagagagaacggccttccaaaccttcgacgacgaccgcgaaccacactttgggaacctccggaacgacagaagctacgcgaagcacacaagcaaagctacaagcctataaagaagcaataataaaacataaaaagaaagcacagggttctttaggttataacaaacattaggagacttgaacaggtcgattcggagctcgtatgaccaagatatggtcatccgaagtttaatgctgtcacgtggagatttacgaattattgtaattaggctttgcaactataaaacatgtgtaagcgctagcctggaaaagacaggaaggctgcgccgttgacatgcggaccccacatgtcaatctaagggaccacggtggaccgggtacacagagacggtccacgggtcgaaggaagcagaccccgtgtgtcaaccgaggcgagtggccgacaaacggactccaccagacaccacgcgggctgcacacgtggaaaccacgcggctaccgagcgggcacacaaacacggtcaccacacgcacccacgaacactactgacaccggtacacgggtaccggggttgacaaccgcacaacgggcacggggcaacaccgaaaggacgaggacggggcagcgagaggaggcaccgttaccaccacccgaaaaggcgcggcacgacgacgacgaacgggcgcggcggagacggctcggggacgacagaggcaaacgacttcggcggcgatccttggacgaaggcgagacgcggccggcacgaggcttgacgacgcggagccgaggacgaagacgacaatagggctgcagcggctcgcttgacgaaccacaggcggcgaacgcgatcggcttgacggagggacgaacgccacgacgaccgggtacgatgggaggatgacgaccggaaccggtgaggaggcgatgagggcagccggcagcagctgcacggatgcgaggacggcgcggaacacgtcgctgtgatgacgacgatggttgcggcgcagcaagacgacgagcggggcgaccgacgggacatcgacgacgaggacgaacggagacgacgacgatggactgcagaggggtttgaatgaagggaaggcgatcccgaggacgatgtcgccggctcgccgctgcgatgccggaggttgtggtggcgcggccgccagcgcacgggtgaaggaagggccgaccgggaaaattccgtcgaggcggatggagaggccggcgctgcacggcggtgttccggcgaaattctgtaacatacccaaattctagaccttaaaaatttcctatcaaaatagttggaagctaacttttccatttttgagagctaaaaatttccatttttaacctaggtgtggtcaatctaacttgaacctaagtaaaatttgagaacaaattaaaactttttcatttataacctaggacataaatgcaaacacgagtaaaagcatgcatacttgcataaaacatgttttgacttgagtccttcatgtgcatttgaatatttgatttgcatttcataataggtctgatgaatattaactaagatctagataaacaactaaaccattatggcctagtgctagctagaggaagttaaaatagaaaccatacaccttaaaatatatcaacatggctaatgtcaagcctcacaaaactaatttggacatccatctgaagacatgtcatgaacatgaaagtgaacaaataaattatatcatatagggtatattctatcttaatcatctctaagcattctcttaatttaatactaaagtaaacttatgcataaataagtaaggagcttatgacatgtgtaaggtaaactgtaattctatcatatcaatatcacctcaggttaatgagagtccaaatataacttttataaacatttacatgcatttaggaaagggaaacacatataagacataagtcttgcgaattatctaaaataattcgtgcaagataaaatcatgggaaaattcctgtaggctctactcaactcatacaactcactgtaattttggtataatttaataactaaatttggtacctcaaataaatcagtcaaactaataaaaactagattaaccgtagttcttaatcggctaaaaccatactttatctaaaagtgcatttaactgcataaaagtgtataagtaaaataatttattcaaatactaggtcatttatcatgaataaaaataatttttccagaatttatcttctctgtttaaattactaaagtgggagagagaaataatcctgaaaatcattcaaaacttttgttcacccacgtttctgcccaaccctctcaccctagcttagtttgccacgacctggacccacttggcagccactctggctcgtcctcaccttgtgcaaatcttccagccgaccagagacagccgagagagagagagagattggcgccggctgtgtacgacgcgtggccacaatgtgtcgacgccatcaaactcctattctagccttctcctcctcccagctgcatctccacacatcattctccacctctaagccgaagaaaccgagggaggaggctctcaacttctccgtcgccctcatccttgctgccggccgcgaagaagacgactatcgtacttgtaaataagccagggtaatccccatctctttcgcgttccatactcttctcaccatgccgatgatttatccttttaatttcatcctctatcgtgcagcggatcgacgggaacgccgtcgtgcccacggcactccggagcgcgctccaagcgccaacgcagccgacatcgtcgtcgttccgaccattgtagaccaaacaaagccgagccgtcgcgccaacgtcttctccttgaagtcttcctcaaaaaccctcaaaaatcctaggcaatggcgcagcaagtgcggagatcggctaccgtcttcttcacctccggtcgccgtcgccattgtcgattccgccacctccggtgagccattgaccgattcttcgcgtatacaccatccctgggacctcactaaccccatgaaaacacatggatgtcaattcgatgagtggatcgagccgttgccgtctccccggagctctacaccgtcgccggaccatcttcttcaccgctgccgctgtccagactttcccgcgcctcgttcaaggttcggtgagcacacttgagcccataggattgcattcatgcatttcattcacttagaatcgagcaccaactcaacatgcagtagcagcctaagcacagccgccgctcggactcgccgccggcgttactccgatgtccactgaccgagaaaagtagaggaatggaatcacaatagcatgatcgtcattttgtcttttggtcgcaccctcaaccgagccaccgtttgccgctgg

SEQ ID NO: 7525 - DNA, 2308 bp, Oryza sativa
gaacccccgggacaggcaggcaggactgagcccctagcagcaggacaccggccctgtgccacgacatctcgactaccgggccgcagctcgtgtagccttcatttgccctggagatgtccatcgacccccgacttcgtccatctccatccgtgtacttttgtttataaccagactgagccacaaagtaagccttacccactagacatgtggaagtacggtagtgctttgcaacagaggcccgaagaccggtccttatatggccgaggtgctactatcaaaaccatgcaccccgagcccagcctaaaaccattttggggattttgaatagagggggcggtgtgaatccaattccacaatactccaacaattccaaagtgtccaggtgatatgaatatcccaaagtctagagttgtaaaaccgcctaatgttacctaattaagtagcgaagcatctcactccctatcacccaaacaaactcagcctaagaagttttaggttatctctaagttaaacttttcatttttaactaactttatacaaaaatatagtagcatcgataataccaagttaatattattaaattcatcgtaaatatatttccttagtatatttcttttgtgttgtaaatgctactaacttttctacaaataaacatgattaaatttaaaaagtttgtattaggataaaccctaaatgacttatctctactaactgaatttgattgctcaatattcgattattcttttacctttgaaagaagaggcattgtcctcgtccccactattgtagtccccacataaaaaaactacccgaaaaaaccagcccatccaaaaaaaacaacccaccaaaacacaagatataaaagacagaaccctataaaacatgtgcatgacactagtaatataaacacggtggagtagtagttaccatggagggccctacataaataaaaaaacagatcaaacatgattcacgcaccacgaatgattaactaatccacatcaaaataactatttcctccggattgataatacttgtcgtttagataagggcacggtcttcaaaaaaataactttgatcattattttttattataatatgtataaaattgttaacaaatatatgattttatgaaagtactttttaaaactaatctatacatatagtcaccatatttgaaagataaatattttaaaaataattcataatcaatgattctaaagtttgatctaacccttctctaaaatgacaagtattatcagttcgttgggagtaaatccttatctaatgtgcaaccaaaatcaccattggctagatatttaggcccctccgaaacagagcaaaatcataggaattccagagaatttcatatcataggaattccagagaatttcatatgagaatggatcctttcgaaacaaaatgattattttctacctattcctttaaaaatcctatggaatggatcattctagaacatttttgaggaaattacgcatgaggtcttacctctggtgtttcttcttcatgtgtatagaattattgtgtttgtcatgtgagcattcaaacaacaattttaaacctttcagtgtttcgaaacactataggaatctaaaaagtgtggcattctactcctcattttttttctattcacgtgttttctcaatcctccgtttcaaagtatcgttacttttttgctagcacatgaactcgatcttggttgcactactgcagaacacctggttgcaaacttggcatacatgccggtttcgcaactgacaccaatgatgctaagtcattggtgccgttgtagaactggcacctttgtgctctccccatttcattggtgccgttgtagaactggcacctttgtgctctccccatttcaaagaaaaaaggagaagctggctccaaccatcggctcggcttgatgaggagatgctttggagccgccccttcaagcaacccctaatcccatccttcacaaatcacaaatcaacaaacaattctcattcccatccatcacagatcaacaacaaaaatcctcaccccatctttcacatatcacagatcaacaacaacacaagatcaagaactacacaagcaagatgaactcactctccccggtcccactgtcgttgccaatttgtgtcaccgacggaggagcgatgtggaggtcatcggtggggtccctctctgcgccgaggtctccaccagggttcctctccgcaccgaggttgccggcgttcgatccagtggcacgacgggcggcgacgctagatgcagtgatgggcggtggatatggatg

SEQ ID NO: 7526 - DNA, 5122 bp, Oryza sativa
gggcgcgcccgaaagtggccacccccgcacaaccgacgggaagccgcgcacccgcgccccgatggtcccgccggcgaccaccggcgcggcggaacggcgccccaaaaaagggaaggaagggggaaacgaatcggcggtccacagctcaccccggggtggccgcgaacaacggaaccgccaccggaaccgaagaaagccgccgcccgcttccggttaacggggacggcggcggttcggccgttggccggccaaaccgaagggttgaccaagttggccaagtttcggccaaaccgaaggaagcggcccccaaaccggaaaaggttcggggcgacgacggcggccagccggaagttggcggttaccgccgaaaaaaaaaaccaccaccgcgagttgtattcggcgaaaaaaaaaaaaccgcgagtgcgaaaccgttgaaggaagccacgggaggtgtttatataggtttggaattaaaaaaggccgcccggataaggggaaaacgggcgcggaagatccggccgccattgatgcgccggcgaggtttagggggaaagattccgaacgaatccgagggagagagggagggaaaaatggggggaaagagggagggaatcacggggaatatttccccctcttgattgcacgcgggcggacgggagcggcgggatttgcggcggcgcggccgctaggcgcgggcgaggcggcgggagcggcgggaggaaggggatgacgggtgggccccacccgtcagcgagggtggcgggcgggcccgcccgtcagcggcgcgcacgcgggaagaggccgatgggccgcggggagaggagagggagggggagggagatgggccgagccggcccaagagggagagggagggaaaggggactttttagagtttttctttttataaaatcattttaactttgtttatttcttaataattattatttgtgctctgaaaattccactaaaatttatttacgcattttaggcttttaggaaatatacaaaaatctcccaagccttatttgacttttaactttgcaccttttaattgttggaggctttcacatggattttaattattcttggcataatttagaggatgtattttagagtcgttttgggacgtgattatagggagatctgtctatataagtggcaaatatacataaaactttagtaaaggagtatgcatattaggtaagatcgactgaaaccccgatactacccttattaacaatcaagaaacaggctagagatcatggttctaaacacgacttagtaggtcgaatatactgatgcggcactaagtatgaaaagaaacatgatatctaaacaatcaagccattgactaaattttcagggtggtagatgtctaagctaatctaatctagcaacacgatttagccgataccggcaggacccctaaagcgagaagcaaccgatagagctaaattgatatgctaagactaaattaatagagacatatgataacgatggtcacgataaaaaggactaaaatatctaaaaatgacatattagcccacgatagcacaagccatcgagacgggttgcttcttgtgaagcaaactcgtcgaaaagtaaaagagaaaagggtggtgatgcgccaaagttgtattggattatctcccgtattacaatgctatggggttcatatttataccccgaatacaaacttagtccattatggacacgactcgaacctttctaaagataaaatacaaacaagaccatatacggtggtctcttaccaaatctctaacaaactgacataactatcctaattaatagatacaattgccttacatgagctctatctctgattggcaatgccggttatcctgatctaggcccatgccgagcccaagttatatcgtaccggccaagccaagcctttgtccaatttttagctgatgcttagtccgtcttggagataaacttgataccacaccaaatccgcttcggtttccttcttcctttttgaatctgatgcaaaattccattgttaacactaagataactgataaccagcagctacaatagatagattagaacatttaaaacgttatactaatccaccgatgcaaactactgtgacaagtcatacctctcatcggaagatcgaagaagatgccccaactcgaaacaagaactcattgagaaaattgaaaacaaaaagtttggcgatgcactgagagtatattgaactgttgttgttcttcatacaagaccctgggcatatatttatactcgtagtacaaaacttgttcatatcggacatgattcaaacttcacaaaataaacacaccagcccattgtggatgctaatatagatttctaaaacacaaaaaggaaagcttactcttatcctaattaatagatgcaattgcttctttggactctatccttgtatggcaataattctgaatcctcaatccgaactcatcatgaactcgaaatcgtatgtatcgactaatcaaatccaactctatatcgactgatacagactccagcagatgcattgtttcattttggaaaccaaactaactccttcaaatccgcttcggatccatccttatgtccacgtatcttaccaaattttgttgttaacatctatgctttgtggattctggctagaacagtcactggttgatgtgtacctgtacaggtagatcacgcatgtgcatgttgttgatgtagaatcgcgccgccacaacttgagcatgttatgtgcaacccacggaatcacccggagacgtgccgctgtagggtgtgggtagaggctgccgaacacacacccaggagggaccctgttagggtgaatgcgctctggtttgtgctagactcggcaggccagctaggatgtcctttaacaccgtagagacgagaggcggcgagcaattaggggatttggggagaatttacttgggattggaagcaaggagggagatgtagaatatagagggtttggataactaaattgagtttgacgattgagtggttattgtttcaatcgaacttgtcccccttatatttatattaggggtggacttacttcccatggtctttcccacgtccaattaggcttagaaatcaactaggactcgagaaatccctattgttggcggctgttaaatacacatttttataccgccagcatttgcataaaactcatataataaaacatccaatatagtggtaggtgttaattctaacatattccacgagtgttggtgtttaattgatgcaggtcctaaaccaccgaagttgggagaaaaatcagtctaaagtgaagaaggaacatatccatacaagggaggggctttacactttactaaaataccagagaatcagcccaaaactcacagtaatggataaagcagaacaggaggagtccacaggccaaaattgagggccagatgggccagcccagaaccctgatctccaccgttgatcctggggtttggcagggacgctcctgatttgatcctaatggcggttggagggcacttcggacaattctcgttccacaaccgtcattaactgcctatttaaggagtttcactcattcgcttcttcacacacttccaagcttgagctgaattataagaggctctgttgtactattttgtatactagaattaggaagagagtagagtagaagaaatcggaggaatttcggagatgtcggtaatcctctcatgtttattttattctgttaattactctattttcaatagaaatatctttctgagtaatttagatttacttgtgagtacttgtgagaattacctcttataagaattattgatcacaaacatatattgatctcgccacaattccgtcatcaccagccacgccaagcaccaacccgtgatgtgtttgtgcttctaacggtggctgctataacaatactgccatttttcatttaagcaggttgtccatagaagtcaaatttgagaacttcatctcttcagtcctttggctcacatagcaaaactctgagttatcgtatacatgatttgttagtaagtcagagtagcatatacgtaattgtagtgcaagaaacataacctaaattacccatgcataacttgagaccacctttttttttattcaaacaagtatggcggtcagattccatttccttcattgtggttctttggcttgccttagtcctgacctgcaatcgataacattgtgcaatacatctaaatgagaaaaaaaagattcatgcatggggttgaaatgaatgaaaatcaatgttgctgtccaccctgaagatgctattgccatttttccaaaacattgcattgacgaaataatgaccgaacaaatgaaaattcagatggaagcagtgctctgcacgtattgcacatgcaaattcaataatgcacacatgaaaatttagataagagcaggaaatggagatgcttaaagcatcacaaaaacaaaactctagcagcaggcctacctatgcatgatccttatccatatttcatatccacaaaaaaaaactactactattttgtagtcataatactgctaaaaatagcatgttcaacgagaccatatatatgtacgtagtgagcagttcagaaacacaatccaatccatctcctttttcaacaagaaacatatcgtcagaagttcagaaaaaaaatcaatcgatgtgctcctttgaacaacaaaattttggaaatgttgctatccaatcgagttatttgagttttcatctatccaaaacttcagattcaggacatgcagtaaaaatttcagaaactacaagcatatgtgccaatcatgtggctgactgatctagtgatgttctgtaaaagctgctggctaatcaactaaggccattcacagagcgccctgcaattttggtgttcctcccatgccaactagacaaagaactttataggctacatactccacaatgcatgtagcatcttttttatttttttatctccctctctctcctcttctcctttcccctgttctccctctcctctcctccttcccatcggcagagcgtggcggcgagggcggcgccggcaccggggcgacgagggcggtgcacggcgacgaccccccaccc

SEQ ID NO: 7527 - DNA, 10159 bp, Oryza sativa
gggggggagagatgggccgggccggcccaagagagggaagggggactttttagggttttttgttttttataaaacctttttaactttgtttatttcttaacacttattatttgagctctgaaaattccactaaaatttatttacgtattttaggcttttaggaaatatacaaaaatcctctaagtattatttgacttttaactttgcacattttaattgttggaggctttcacacggattttaattattctaggcataatttagaggatatattttagggtcgttttgggacgtgacaccaatctttcattctctttcttaagagcttgcatagcatcaacattagtagcataagagttcaaatcaatattgtaacacctagcacaaccattgctagtagatgggttggaagaattagaaaccacatttggttgagaagtgctattccaaagagtgtcaaattgaacttcaagatctttatgacttttgtctaaactagcaaatttctcttgaagagtttcattgacatccctacggctagctagagaaccattagccaaattaagctcattagctagttgttcatttttagcacattctttagctaggctctcctctaaggcaaggtttcttttcttctcaagaataagtaattcttcttgcctttcgagagattgttctttactatccaaagctctcattaacatagccaaatgttgcatagcgggtttgctaaagctcttaagcacatcatctaattcattatcactttccgcatcactagaatcaacatcaagagagatgtgagaggacttttgagtcatcaccttgcggccttgggccatgaaacaagagtagtggtaggagtcgtcgtcgtcatcactccagttgttgaagagacgctccttgattgaagaggatgacttgaaggcgacagtagcaacaccaccttctccttcaaccttgtcttgaggcttgggcttgggcttgacctcgagatcttcttcatctccggagtaccacacctccgccatgtgtgcctccgccacatgagcatgctccggcttcttcttgcctcccttagccttagcttcatttgacttgggacaatcggcaatgaagtggccatgttcaccacaattgaagcaagctctctttgattgcctctttcccttgtcatcatccttcctccctttgccatagccactcttgcgaagaaagtgcttgaatctcttgacaataaaagccatctcttcatcttcactttcttcacaacatgactcttcttcttgttttgccttcaaagcaacttcttgatttttgatcatggcggcattcttcaccatttgcctcacttcacgagcttcctcttcttgcatctcatgagacacaattcttccaagaatgtcacttggggtgagactcttcaattctttcctttcccgtatcattgatacaagagtaggatttcttggaccaaatgcacggagaagtctcttgaccacaaagtgatttgtcatgtcctcactcccaagtcctttaatcttgttgacaaggatcatcatcctatcatacatctcttgtggtgtctccatgtcatccatcacaaatcttccaagccttccttccaataattcaatcttggcctcacgaacggcgggtgatccctcatgagccaattgcaaagtatcccatatctccttggcctcctcaagcccatcaaccttgttgaactcctccagactcaaggcggagagaattgcattggaagcttgagcattgcggtggatgagttgttcttgctccgaagtgagctccatgttatcatggggtacatcaacatctgtacaaacaactttccaaatacttggatgcaaagagattagatgcaacttcatcttgtgcttccaagcggcattatgtgtcccatcaaattgaggagcatgcccagaaggcacggagacaaagttgtgagggggaatggtaagtttgctgtaatcaaaaggtatagtagctcccttgggtgatggagttcccttgctgctcgctccatcttcatttccattttccccgttctttccccctaagtccgacattgtggatcactcaaagcagtgaagcttgaatcaagagcaccttgctctaataccaattgaacgtgctgatgaagcctagaggggggtgaataggctgtccctgaaaacttaaaaacaaatcgcagcggtaaaattcaaacagacccggaacttcctggtaaggaactccagaacttctggcctgccaggcccggaactaccggtgttcttaggacaggaacttccgggttacagaacaaggatgaaattcaaatttcgaatcaggagactaagccaatcttcacaagatgatgcacaggtattctaagtaggagatagatcacagaaacatccacagaaacatcacagaaagagacaagagcatttttttcctgatgttcggatcttgcgatcctactctccgttgaggagctccaaagagctgggtctcgattaacccctttgcctgacttgtgcaaaaactccagaggaaatccacagccttcaactacaaacacccctaggcaagtttctagaattgagtgaccaccaagatccaactcaaactacttctagaaattcgccacaagtatacgttgctctacttggaaaacctctagaatctcagcacaagaacttaattaacttacctcgttcccttttggaggagaggagatccttcacaaacttacccgggacatccacaatatgcaacggattctcgcgggcgacacctaaccatctaggagatcatctccaagagtaataagcaccgagatgacagcccacaagatattccaagtgctcacccaagatcctagtcttcacacatctccaaatcttcttctcttcctctcaatctctctttctcataagaattaggctctagattgagtggagaaggcaagaaacacttgggagaggctagcaacagctctaggttcaaaaagtgaaagtggaatggccaatgaacaagctggaaacgagctgtatatgtgacgtcatctagccgttactcacaaatttgaactgaaaactagacaggaagttccggacctagaagacaggaacttccggataatacttaggaaaatttctttcatcatactggaacttccggacctggaaacaggaagttccggacttgcatttttggaccaatggagcatttgcaaaaatgactcctagggaaacttgacacttggttcacactaagagcacttgagatatctcagagcatcacctagaaccccacttaatagtacggtttttcctaaaaactcgattgcaaaaaataaactatcctatgcacttctcgagttccggtccgctttgattttatacttttggggggtctccaagcatccatcttccacaccttgaactaatgcacctaaaagatactcaatgaactcattagtcccttaaccacatttgtcattaatcaccaaaacccactagggggattaatgcactttcagttgtgctggaacatccaaaggtacaacgcggatactggcctctatcttgtcaactggtggctggggctgaaattgagcattgacaccttgtggtagtgcactcattggagtgggagctattgcatcttgggctatacgactgcttcaggacgcatggatgacaattcgctgaggagcaagcttctgattgaggggagttgcatggactgatgtgctggcaaatatgtttctcggtttcgggcacatgtcggcgaaatgacccacttcttgacaattgaagcaacatatatctttccagacttggcattttcttttcccattttgattcctctgtcttggcactggagttaggctgaaactgtagtcttgtcgaggatttgggttgccttgatgcttctctccattgtaactggcgggttggttggccatcttcttcgtcagcagaaaactgaattgacaatcttttggtacatgattagttccttcacacaagaaacaagtgatcctgctcgttggacactcgtcgggtggatggtcttcctcacaaggaacgcaagtggtgacacatgagctggcaaagtgaccgatttctccacaacgagagcatgccttatgttcctttttattctgattgaaaccttggagagacttctcatcttcatcccgtgaggagacttgatctgaatcttcgctatcagacactctacctccattagccaaaagatgttctgtcaactgtggtgcacctcggaagaaatttcttctctgacgttttgtcattcctggtggaggccattctgtgccggtaatggtcatcttacggacctcatcttcggttcgcattggtgcttttcttttctgctgaggacggttccttgcatagtgcccttgttcaacacagataaaacaaatgattcttgcttcttttgagtccacaagtggcatggcacgatgggcctgttgggatgctggcggagcgctgacttgtggtgtgagtgcttggactgcctccaactgcacttgaggttgcatctgactcgggttcagaattggcgtctgatgctgctgtagtatctctataagcaatttgttctggttaatcaggtgttggaccactgccatacaactggtgtctggtgcttcattcactcgggagcttgaggtacccacgtcctgatttctgaccatactgccttttttattgtcagccatctgttactaggtttggagagggagagagggaaaacaaaaggggagagacagattagaaactaaggataggaccttaacagatctattttttttctgttatgatgtatgttaggtttattctgcaagttgattaagcaaacaatctagcatggttacatcacaccccactgatgcaaaccacgcgctacacacacaagcaaggaaacacacgactaacgactctaccctagagggtggcttaggttctgcaacaggttctccaagatcttcacccctgcttcacagctggcttcattgcttccttcgcttcgctagcggatccaacagtcttctggagcttcggcaaacgattgacgatctcttcttcttcacaaagctgaccatctagtactagttgaaattcgaagaaggaagaaggaagtaaaccttttgcaaatagcattagggaaaggaggaaaaaggaactttcgcaaatagtttcatttataaaatatgtccttacgttttatccagttggcttatcctacagtcgagatatctctgataccagcttgtcgcgcccggaaaaataccttttccataacactagtgtattaatccccgtcccaggaaaagcacatcaggcctgacaaacatgatataaaagacacatctttattatatcgataatatttacattattacaaaggcacttcaggcctgacaaacaaaaataaatagcagcggactagtgggcctatggctccatcttcacaggcgctcaactagggtataagccagggctccacctaagacttcttctccaaagcttctcttactgaagggggggaaagatagagcaagaatgagtacaaccacagtactcagcaagtcacaccgggatatgcatgattaatgcaagggagtacaaagggtaataatataggggttaagttttgcagtaaacagcatttaagagtcacttagttgcccaaagctattttataaagacaatcctagagctacacagtattattaatcaaggccctgaacccacacgaacctggcttaacccaaggcctatgatgattcagaccaaactggcaacccgacctaggtcccagctcgtcccaagccaacctaggccaaccattccacattttagttgttaagcaagttttaagaattaaaccactaacttgggtacattgctaggcttgcccataaccgagggcgcggctattcgaatagattatactctgatcagaggtgtacatctttacccacaagacacatctttactctgcattccacggccgtggaacccgtggtaaaggatgtgacataacccctttacccatcctagccgtgacaaaagcaccgacccaacctcgcctacggccggaatcccgagacaggtaggtaagattgagcccctagcagcaggacaccggccctgtgccatgacatcttgaataccgagccgcagcccgtgtagccttcatttgccctagagatgtccatcgagccccgacttcgtccatctccatccgtgtactcttgcaaggactagactgagcaccgagttaagccttacccattagacatgtggttagtacggtagtgctttgcaacagaggcccgaagaccggtccttatagtggctgaggtgctactagcagaaccatgcacctcgagcccagcctaaaaccattttgggagttttgaatagagggggggaggtgtgtgttcaattccaccacaagccaaccattccacagtgtccaaatgatatgagaactcccaaagtctaaagttataaaaccacctagtgttgcctaattaatcagcgaagcatctacctaaattcatactagtggaaccgttaatagagtacccactagttggggttttgtttatcctagggtgaacaaggtaataataacaatagcaataataataaggtcataacaaaggtaaataggcatggctaaataaaacagtgataatgcgggaatttatgtaaagcggtaatgcaataatttaaatcaaaataattttataaactgggattcaatatgctaaagggtgatgcaacttgccttgctcagagagaacggccttccaaaccttcgacgacgaccgcgaaccacactttgggaacctccggaacgacagaagctacgcgaagcacacaagcaaagctacaagcctataaagaagcaataataaaacataaaaagaaagcacagggttctttaggttataacaaacattaggagacttgaacaggtcgattcggagctcgtatgaccaagatatggtcatccgaagtttaatgctgtcacgtggagatttacgaattattgtaattaggctttgcaactataaaacatgtgtaagcgctagcctggaaaagacaggaaggctgcgccgttgacatgcggaccccacatgtcaatctaagggaccacggtggaccgggtacacagagacggtccacgggtcgaaggaagcagaccccgtgtgtcaaccgaggcgagtggccgacaaacggactccaccagacaccacgcgggctgcacacgtggaaaccacgcggctaccgagcgggcacacaaacacggtcaccacacgcacccacgaacactactgacaccggtacacgggtaccggggttgacaaccgcacaacgggcacggggcaacaccgaaaggacgaggacggggcagcgagaggaggcaccgttaccaccacccgaaaaggcgcggcacgacgacgacgaacgggcgcggcggagacggctcggggacgacagaggcaaacgacttcggcggcgatccttggacgaaggcgagacgcggccggcacgaggcttgacgacgcggagccgaggacgaagacgacaatagggctgcagcggctcgcttgacgaaccacaggcggcgaacgcgatcggcttgacggagggacgaacgccacgacgaccgggtacgatgggaggatgacgaccggaaccggtgaggaggcgatgagggcagccggcagcagctgcacggatgcgaggacggcgcggaacacgtcgctgtgatgacgacgatggttgcggcgcagcaagacgacgagccgggcgaccgacgggacatcgacgacgaggacgaacggagacgacgacgatggactgcagaggggtttggatggaggggaggcgatgccgaggacgatgtcgccggctcgccgctgcgatgccggaggttgtggtggcgcggccgacagcgcacgggtgaaggaagggccgaccggggaaattccggcgaggcggatggagaggccggcgctgcacggcggtgttccggcgaaattctgtaacatacccaaattctagaccttaaaaatttcctatcaaaatagttggaagctaacttttccatttttgagagctaaaaatttccatttttaacctaggtgtggtcaatctaacttgaacctaagtaaaatttgagaacaaattaaaactttttcatttataacctaggacataaatgcaaacacgagtaaaagcatgcatacttgcataaaacatgttttgacttgagtccttcatgtgcatttgaatatttgatttgcatttcataataggtctgatgaatattaactaagatctagataaacaactaaaccattatggcctagtgctagctagaggaagttaaaatagaaaccatacaccttaaaatatatcaacatggctaatgtcaagcctcacaaaactaatttggacatccatctgaagacatgtcatgaacatgaaagtgaacaaataaattatatcatatagggtatattctatcttaatcatctctaagcattctcttaatttaatactaaagtaaacttatgcataaataagtaaggagcttatgacatgtgtaaggtaaactgtaattctatcatatcaatatcacctcaggttaatgagagtccaaatataacttttataaacatttacatgcatttaggaaagggaaacacatataagacataagtcttgcgaattatctaaaataattcgtgcaagataaaatcatgggaaaattcctgtaggctctactcaactcatacaactcactgtaattttggtataatttaataactaaatttggtacctcaaataaatcagtcaaactaataaaaactagattaaccgtagttcttaatcggctaaaaccatactttatctaaaagtgcatttaactgcataaaagtgtataagtaaaataatttattcaaatactaggtcatttatcatgaataaaaataatttttccagaatttatcttctctgtttaaattactaaagtgggagagagaaataatcctgaaaatcattcaaaacttttgttcacccacgtttctgcccaaccctctcaccctagcttagtttgccacgacctggacccacttggcagccactctggctcgtcctcaccttgtgcaaatcttccagccgaccagagacagccgagagagagagagagattggcgccggctgtgtacgacgcgtggccacaatgtgtcgacgccatcaaactcctattctagccttctcctcctcccagctgcatctccacacatcattctccacctctaagccgaagaaaccgagggaggaggctctcaacttctccgtcgccctcatccttgctgccggccgcgaagaagacgactatcgtacttgtaaataagccagggtaatccccatctctttcgcgttccatactcttctcaccatgccgatgatttatccttttaatttcatcctctatcgtgcagcggatcgacgggaacgccgtcgtgcccacggcactccggagcgcgctccaagcgccgccgcagccgacatcgtcgtcgttccgaccattgtagaccaaacaaagccgagccgtcgcgccaacgtcttctccttgaagtcttcctcaaaaaccctcaaaaatcctaggcaatggcgcagcaagtgcggagatcggctaccgtcttcttcacctccggtcgccgtcgccattgtcgattccgcctcctccggtgagccattgtccgattcttcgcgtatacaccatccctgggacctcactaaccccatgaaaacacatggatgtcaattcgatgagtggatcgagccgttgccgtctccccgggctctacaccgtcgccggaccatcttcttcaccgctgccgctgtccagactttcccgcgcctcgttcaaggttcggtgagcacacttgagcccataggattgcattcatgcatttcattcacttagaatcgagcaccaactcaacatgcagtagcagcctaagcacagccgccgctcggactcgccgccggcgttactccgatgtccactgaccgag

SEQ ID NO: 7528 - DNA, 8631 bp, Oryza sativa
ctgtgggtgcatggttttgctggtcgcacccatggcagttaaggaccggttcgcgggatgccctggaagaacttatcgtacttaccacaagccagcgtgggcaacggctgggcttgtagcgtagcttttctctagccgacgcatccaggcaagggtgggcgtgatggagtttggatgggtcctgcgacggcctatgcggcttccggattcacctaggcacgagaggggactgctcgctgccttgcgaggagtgggggtgaaacctgaggtgtggtgtgcttggttagagggggttatgcgaatggtcctgtcacggcctctttccggtatgtcgtggtggcatgtcggcgcacggaaacgtgtcgtggggctgtgtcttgtgggtacagttgtacacctctgatcagagtaaaactattcgaatagccgtgaccgcggttatgggcggtcgaccagattcaccgtgattagtctcaccctagtgtaatcttttgaatttggatagtttaggtggatggttgggcctgttgcaacgtgggatagcgttggacagtggatagttaatactaattaattattacaactgtttaatctttcaacttctgtttataaatgctcgctttatgcaaatgaaccactttagctcttctttgatgattccctgcatcatgcctctattccggtatgacttgctgagtacagtgggtagtactcagtcttgctctatttttcccaaccctagagtacgagtatgtgtcagatgaaggtttctccgaggagtaagcttagtccgtgccgtcgaggatgcctgtggagtggtgttcccgctgtagttctagtcaaggcttagctcctgttgtctctctttctttccgctgcatttatgtaagacttttatgatgtttgtaagacgtggatctgaatgtcgacattgtcgtttgtgtaccccggccggtcctggacggggatttcaatgcacattctgcttggaattctattcgggaaattctgggcgtgacagccggtgtgagcccgggtgcacccggtccaccgtggaccgtgaggctgccgcgtgggccctactcccgtggacccggtccgcgcgccccctcccctcggctgacacaataaacccttttaaaattaaaatttaaatgaagaaattcgcaaatattcatttaaagagcatataaactttaaatgaccataagttggccatttgaactcggaattggaccgttcaagtctctaatttttccttaagaagtcaagaacccatttttgtgctttgttccagcttgttatatggagtttattagagtaaaagccttttcttttccgttggtcgtgtagacgctgcagcttcggaagatccgctcttcgtggaagttgaagccgacgtttgggaaagcgagcaaggcaagtcacatcatccttgaacatattgaatcctagtttataaaattattttgatttaacttattgcattatcgctttatttaaattcccgcgttatcattgttttatctagccatgcttatgtacctttgttatgaccttattattgttattgttattatttccttgttcaccctagaataaacaaaaccccaactagtggacactctactcatggtaccactagtataattttagttagatgcttcgctggttaattaggtaacattaggtggtttacaactctagactttgggaatactcttatcacctggacactatggaattgttggactattgtggaattggattcacacctcctcctctattcaaaatcctcaaaatggttttaggctgggctcggggtgcatggttttgatagtagcacctcggccatataaggaccggtcttcgggcctatgttgcaaagcactaccgtacttccacatgtctagtgggtaaggcttagtttgtggctcagtctggttataaaaaaaagtacacggatggagatggacgaagtcggggggtcgatggacatctctagggcaaatgaaggctacacgagctgcggcccggtagtcgagatgtcatggcacagggccggtgtcctgctgctaggggctcagtcctgcctacctgtcccggaggttccggccgtaggtggggttgggtcggtactcttatctatggctaggatgggttggaaactatgtcacgtcttccgtccatataccatggtggtatgtggcacgtggttacacgtgaggaagatgtgtcttgtgggtaaagatgtacacctctgatcagagtataatctattcgaatagccgcgccctcggttatgggcaagccgagcaatgtacccaagttagtgttttaattcttaaaacctgcttaacaactaaaatgtggaatggttggcctgggttggcttgggacgagctgggacccagggtcgggttgccggttcggtctgaatcatcgtaggccttgggttaaggcaggttcgtgtgggttcacggccttgataaataatattgcatagttctagaatcgtgtttacaaaatagctttgagcaactaagtgtcttttaatgctgtttgctgcaaaccctaaccctttatattataacccccttgtactcccttgcatttattatgcacttgtgggtgtgtcttgttgagtacggtggttgtactcagtcttgctcaatttttcccaaacctagaagaggagcccctggaagatgaaggctttggtgtctagctcgcgcctgccgtcaagcgcctgtggtcgtcaccctagtcttccgctgtttcccgtttgtctttgtgtgtgctgggtcttcgccgcccatgtaataaattaactatttacgcttccgcttgttaaactctgaactatatcaacttttggtgtaccttgcctcctgggacaaggaataatgcacgcacgtaaggaacgcccgttgggttatttttggtcgtgacaatagttatgtcaaaccagattggtatcggctgggctatctaaactactaaccaattatagtatgatatatttatatagattgattcgtctatataagcatgtactagagtattagctagtacattatcttccttgctctatttgctctaaatattgttctatcagctactttcatagtattgtcttaaacttctttattaaattttgatggacagtattacagccaataaggcatgtttagagtttaatattcactaatttacctagtctatagctaatttggtataactatatcggctgagaccaccaacgatatgctaccggcccatcggccgatcggctatcggttaactaattctgctttttgtctttcttgctgattgcaggattaactcagctagcatgcccttaacacactcgaggctagccttggacctgcactggagttaagcagatctcccaggccgcattgtttttacatcaacacttagttaatctaacccgatgactcgatttacttgcatcggccaagccttttgtatggttttgctagtatcggctaaatcgtttagtcagtttagattagctaagatatccaccaccctaaaaatcaataaaaagcttgattgtttagattttatgcttccttccatacttagtgctgcatcaattgagtttgacctactaagtcgtgtttagaatcatagcaactaaccttgattgcaaataggggaagaatcagggtttcagctgatcttaactgatatgattgcctttctttgtttaatatcttcaatctagtttttcatgttatatctgccctttatataagtatatcactctatttaaatatatcaagcttgtattcaattttggccagattatcatatttgggattgatgcttgtttggtatatttacttagaatgatattcttatataaggttgtatcagagcaatagccaatattgtatctttattaacctaaactctatatcatctgctaagatattattgacgaaaaatccgtgatcggccgatagtgccggaactgtgttggcgcgaactaagccgacgaacacagcggcttgggagatctgcttagctccagtgcaggtcaaaaatattgatgagatgtgggcgtgccagtcattttgatcctacaactgacaagatatgtaaacaatagatcaaatagccgatcgactaacaagccgatggagcaattctagtcgataccgataccagccgatgtcgatagggttttgagcaatcagctctatgtacaattaatgtagattctaacactcgagtaaataatgatatatagataatcggctgataataatatatttaagcaacaatataatctaatagaaaccaatcggctaataatgatcaagtgttgatccaaaggttaaagcatacatcggctggaggtctgatgtcaataaatccaaacgattagataaacagtaaaacctttgctgcaatcggctaaatccaacttgtatgtaatccttataagccgatgcaacatccagataactcatcatctgaaaccccgatgaaacccttattagcaatcaaaaagcaggatagaaattatggttctaaacacgactagggctgatgcagtgcaaggtatgaaaataaacataatatctagacaaccaagcttttcactattttttagggtggtggataccttagttaatctaatctagcatgataatttagtcgataccagcataaaccctaaaacgaatctcaaccgatatgatcaaattaagatgctaaactagattaactaagatatatgataactagcggtcgtagaagatagattagaatatctaaagcgatgccctaatccgccaacgcaaaccactgaaacaagtcatacctcttgtcagaagatcgagccgatgccctaactcaaagcaagaactcgtcgaaaaagtagaaaggtaaaaggtggcgatgcgctgaagttgtattgattgcgaaatagtttacaatgaccccgggtgtacaaatttatacccatgggtagatactagtccttgttggacaagaaagaaactttactaaaataaagaaaatataaattccttatcggacactaaacacactttcctcaagataaaaggaaactaacaaactcttcctaattaatagataaactgtcatggagcatcctctttgaactcggtcatttctagataaacttcctttaatagattcctttaaaccgaatctactaagaatccgactattggtgacttgataactcccatcggccgattccaagatgctaaagctgatagtgaatctaagccgatgatgacttcggggcttatcaaattttgatgttaacacatggttacagatatgatccgcaagcgcacagatataccattgtagcatttcacttggaagtattccaaggtatcgtatttatttaatcccaagggaagatatgataagagagtactttgctactaatttatatattacttgtatacatcaaagtctatgcaggggttaattaattcaagggtaggataaggttgacacgaagaatgaagaactaagatactctcactaatatatataatctaggctaaatggagaaagaataagaaaataatcattcctatacttctagtatacattcatctttagtttacaatcatgtagccaataccccctaactatgccctcgcggtgtttctagagactacccctgatgccgagttccttacaacaatccgttatgaccatccaaccggaaatgaatacggaggagtacccataccaggaaagtgtctttggactatatactaacatggaggaatacccgtactaagctatcaccatcagcagcccacctctactgacctgcagtatataaccccaattaatgatatctaataatctaagcaccacgcttacattattaaatacaactctacatccccaagaacgacatagagcaatcactcgcatgaacattaaacccacaccaatgcatatctcaggtaagctagctacacaattatatcgagacaagtataaagtaaagccgatactcagataatataaattaagtaaaagaccgaaactatataaagaagaatatttcattaactctataagtcttacaaaaggaggaaaagctactagagccatacccaaaatctcttgaagactcgaggactaaatgaactattctattcctactccactagcacaagaatactgaactaaacttgagagagagctcttgattttcttcttggagtgtgtgagggagtggaggaggtgatggccttatataggctactgttggtatttcttaacgacattactagaaatataattcccagcaatggcgcagaaatacttctggtatattatggttacagagttcatctgcaagcgcacggatataccattgtagcatttcacccgagactattctaagggtatcgtatttattttatcccgtgggaagatcaagtagagagagcttaactaatagtttatatattactttgagataatcatattctaagtaggggttaagataatacaagagtagagtgatacacaagcattactactcatcctcataataaattatctaagctaggtggaaagaaaagacaaagaaaatatattcctatacttctaatatacatagtatacatacattctagttaactgatatactagctaataccctctatccgatgctctcctggtacttcgagaagccacccctgactgctgagttccttacgatagcccgtcatgaccatacaaccggggctaaatacggaggaataccctccccaggaaattaacttaggattatataccggcgcggaggaatacccgtactgagctgtcaccatcagtggcccacctctcatccgcaatatatagccccaaataatgataccttgtaatctagacaccacgtctaaactatcagatactactttaatatcatcatcatgacatagagtaattgtatatgcaaacattatacccgcaccaaagcatctcccagataagctagacgtatatttagtataacatgaacataatgtaaagtaggtactcatatactcggaaagtatttcaataccataaatgtatatagaagagtattctaataaaagtacaaagcttacaaaagaggaaaggaaagctgttagagccatacccaaagtcttccgaaggcttccagactcctgatttctactctattcctattccaccagctagatactactaaactaaacttgagagaaatgagagagctattgcttgaggtgtgtgagtgaagtgaggatgagagctccttttatagcctcccaatgacggttgtgactgttggaatggtcggtaataccctccaaccgccactggggagccatctcagccgtccaggagaaccctggatcaaacggagctgcgggaggttcggccgaaccaccaggttcagccgaacttggggccggcccaatctagcccaatttcggctagcggccttctccgttgttcttctcctcagacttgtgaattttggcccagtttgtcgtgtcaattctgagttcttggcccattcatacatacgtctggttctcgacatcgtctgattgatttatcgtttgagttgatgtcgattctcctccactttagtgtcattccctgcaagaggttagcatgcctaatactagtggaagtttattattctaatacatttatgcattgcaagcatcattagttatcctctattttggtaatattaacggtcaaaactgatcgataacgactgtcaatagctaccaatgacggttgtggtggttggaatggtcgtaaataccccgcaaccgtcattggaagggatcctaggcatccacgtgcaagggggagccaacagccaaccctagttaggcccaaccggcccagtttttggtcggtgtgttgcctgttgatccatcagcccagtagtgtgatggttgggcctatttgatattatttctcttagtaaacaaattactattacatcgatggttctcaacattaaatatttatcttgccacaaaatttcacttagtaaataaattaatattacaccgatggttctcaacataacatattcatcttgccacaaaatttctcttagtaaccaagttactattacatgttctcaacatattatctcttagtaactaaattactattacattgattgttctaaacatattgatcttgcccacgaaattccgttccctaaactaattaatcctactgatcacaaacatatattgatctcgccacaattccgtcatcaccggccacgccaagcaccaacccgtgatgtgtttgtgcttctaatggtggctgctataacaatactgccatttttcatttaagcaggttgtccatagaagtcaaatttgggaacttcatctcttcctttttgaatctgatgcaaaattccattgttaacactaagataactgataaccagcagcttcaatagatagattagaacatttaaaacgttttactaatccaccgatgcaaactactgtgacaagtcatacctctcatccggaagatcgaagaagatgccccaactcgaaacaagaactcatt

SEQ ID NO: 7529 - DNA, 5179 bp, Oryza sativa
aaaccctttttaaattaaaatttaaatgaagaaagtcgcaaatattcatttaaagagcatataaacttcaaatggccataacttggccatttgaactcgaaattggaccgttcaagtctctaatttttccttaagaagtcaagaacccatttttgtgctttgttcctgctggttatatagagtttattagagtaaaagccttttctttaccgttggtcgtgtagacgctgcagcttcggaagatccgctcttcgtggaggttgaagccgacgtttgggaaagtgaccaaggcaagtcacatcatccttaagcacattgaatcctagtttataaaattattttgatttaaattattgcattatcgctttacttaaattcccgcgttatcactgttttatttagccatgcctatttacctttgttatgaccttattattattgttattgatattattaccttgttcaccctagattaaacaaaaccccaactagtggacactctactcatggtaccactagtatgattttaggtagatgcttcgctggttaattaggtaacattgggtggttttacaactctagactttgggaatattctcatcacctggacaccatggaatggatggattattgtggaattggattcacacctccccctctatgcaaaaccctcaaaatggttttaggctgggctcggggtgcatggttttgatagtagcatctcggccatataaggaccggtcttcgggcctctgttgcaaagcactaccgtacttccacatgtctagtgggtaaggcttagtttgtggctcagtctggttataaacaaaagtacacggatggagatggacgaagtcgggggtcgatggacatctctaggacaaatgaaggctacacgagctgcggcccggtagtcgagatgtcatggcacagggccggtgtcctgctgctaggggctcagtcctgcctacctgtcctgggggttccggccgtaggtggggttgggtcggtactcttgtctatggctaggatgggttggaaactatgtcacgtcttccgtccgtataccgtggtggtatgtggcacgtggttacatctgaggaagatatgtcttgtgggtaaagatgtacacctctgatcagagtataatctatttgaatagccgtgccctcggttatgggcaagccgagcaatgtacccaagttagtgtttttaattcttaaaacctgcttaacaactaaaatgtggaatggttggcctgggttggcttgggacgagctgggacccagggtcgggttgccagttcggtctgaatcatcgtaggccttgggttaaggcaggttcgtgtgggttcatggccttgattaataatattgtttagctctagaatcgtgtatacaaaatagctttgagcaactaagtgtcttttaatgctgtttactgcaaaccctaaccctttatattttaacccccttgtactcccttgcatttattctgcacttgtgggtgtgtcttgttgggtacggtggttgtactcagtcttgctcaattttgcccaaacccagaagaggagcccctggaagatgaaggctttggtgtctagctcgtgcctgccgtcaagcgcctgtggtcatcgccctagtcttccgctgtttttcgtttgtcttcttgtgtgctgggtcttcgccgcccatgtaataaattaattaattacgcttccgcttgttaaactctgaattgtatcaacttttggtgtaccttgcctcctgggacaagaaataatgcacgcacgtaaggaacgcccgttgggttatttccggtcgtgacaattgggcacattggtgaaatatggatgcgtgaagacatatcattcaaaagatgccctttacaagaccatcaccgctcatcctaacaaggatggacatgggctcgggttttctggtggaagtcatgtgtctaagcgtgtgatggtaaatgggaaagaatgcttgatgtttgtgagagaaggaaaagctccacaagcaagtgaggtgacttgtcccctcactggtcagacacccggaagttccgagcaaaatgaccggaagttcctgccctgtaagacaggaagttccggacattttgtcaggaagttccgggcttctgataggccgaacggactaaccggaagttccgggtataatggcaggaagttctggctagagggtctttactatgattcatatgtaattttcaaaaattcagagggcaaagtggttgcttatttcaatgggaattacaatgatgagtaccgtacttgtgtgtgggtgccaaaggctttggtgactaacatcaagggacccaaacttagacaagtttgggttcctaaatcccaagcttgatttcttttgtaggcatactcctccagtggctcaagttgggttgtggacagtggctgcaccaatcatatgatgggagagaggagtatgtttacaagtcttaatgaggagggtggaagtcgtgaaaatattgtctttggacatgatggtaaaggaaaggtaatgggtctcgatcgtgtgtgtagtgcttgccaagccgggaagcaagttggcagtccacatcctataaaaaacatcatgactacaacaagaccactcgagcttcttcatgtggatttatttgggcccgtggcctacataagcattggaggtaacaagtatggtttcgtcattgttgatgatttttcacgcttcacttgggtgtactttctccatgacaaaagagaagctcaagatgtcttcaagcgcttcgcaaagcaagcccaaaacctctatgatctcactatcaagagggtgcgaagtgacaatggaggagaattcaagaacactcaagtggaggaatttcttgatgaagaaggaatcaagcacgagttctccgccccctatgatcctccccaaaacggcattgttgagaggaagaaccgaacccttattgaagccgcaagggcaatgcttgatgagtacaagacttcggatgtcttttgggcggaggccgtaagtaccacatgtcatgccatcaaccgcttgtacctccacaagatcctaaaaaaaacttcatatgagctcttgagtggtaagaagcctaatgtttcatattttcgtgtcattgggagcaaatgttttattttaagtaagaggcctcgctcatctaagttctcacctaaggtggatgagggattcttacttggctatgaatcaaatgcacatgcctatcgtgtcttcaacaaaacctccggtattgttgaagtcactagggatgtgacatttgatgaatctaatggctcccaaggagcgtaagttgttgtacatgttgtaggtgatgtggatccaagtaaagctataggcactaaggctattggagacatacgaccagtcgagacgcaggatgaccaacaagatagggatcaacctccgtcatcgacatccaatagccctacaagtgctgtctttgctgagctgaaagttccgggtcctattgatcagaacctccggaagttccgggttctacagtctggaacctccggaccagtggcagtgaaaacgtgccaacggcacaagtggatgggatcgatgctgcgggcactttagagcatactgatcaggctcaggtcccccagtgcaccatccaaggatacatcacactgtccaaagagatcatcccgtcgacaacatacttggtgacataagaaaaggggtaactactcgctctcgtgtcccaagtttttgtcaacacttctcgtttgtctcttctttggaaccaaccagggtggaagatgcgcttggtgatccggattgggtgatggccatgcaaggggagttaaataacttcactcgcaaccaagtatggactttggtggagagacccaagcaaaatgtcatcggcaccaagtggatcattcgcaacaagaaagatgaacatgaggtggttgtaaggaacaaagcccggttagttgcgcaagggttcacccaagtcgagggccacgatgttggtgaaaccttcgcacctgtcgctcgccttgagccaattagaattcttttagcctatgccgctcaccatgatttcaggttattccaaatggatgtcaagagtgcctttctcaatggacctatctctgagttggtctatgtggagcaaccaccggggttcgaggatccaaagttgccaaaccatttgtacaagctccacaaggcgctctacgggcttaatcaagcccctagagcttggtatgaatgtctccgagattttcttttgaagaatggttttaaaattggaaaggcggacactactctcttcactaaaaaatataagagtgatttattcatatgccaaatttaagtcgatgacataatatttggttctactaatgcctctttttgtgaagaatttagtagtatcatgactaaaaggttcgagatgtctatgatgggcgagttgaccttcttcctcgggctacaagtgaagcaagcacaagagggcaccttcatctctcaaaccaagtatgtgaaagacatactcaagaagtttgggatggaggatgccaaacctatcaagacgcccatgcctactaatggccacctagaccacaacgataatggtaaatgtgtggaccaaaaggtatatcgctccatgataggatctttgctttacttatgtgcatctcgtcccgtgtcgcgaccgagaaaattgcattttcccgaacgctagtgtattaatccccgtcccaggaaaagccggggtacaccatacaaacatgatataaaagacacatctttattatatcgataatatttacattattacaaaggcacttaaggcctgacaatcaaaaataaacagcagcggactagcgggcctacggctccatcttcacaggcgctcaactggggtataagccaagactccacctaagacttcttctccaaagcttctcttactgaaggggggagaaagatagagcaagaatgagtacaaccacagtactcagcaagccacaccggcagatgcacgactaatgcaagggggtacaaggggtaatgatataggggttaagttatgcagaaaacagcatttaaaagtcacttagttgcccaaagccattttataaagacgatcctagagctacacagtattattaatcaag

SEQ ID NO: 7530 - DNA, 3881 bp, Oryza sativa
aatttagatttatcttgtgagaattatctcatggttagtttctaaatagcatacgggattattgtctactataatcaactaaaatatagtgattgctttggtgagttataaacactaaagtagatagtaattgcttagatatagtgttcagacagttgttatccagtaattgctgcgtatcccacagtatgtttgaggtgggtgtagaggtggtgacagccctcgagatcacttaagtcctctctgtccgggtacgtagtagagcgacatctaggaacaacgggttgccagtgcctgaagtattgcatctaggaacagcgggttgctagtgcctgaagtattgcgttaggattaaaattaagttttccctggttggtgtccttggatgaactggaggaagatctgaccacacacgttcccttggattcgatacccttagaatactccgtatggagaagtgctacatcggtatatccgtgcgcttgcggaaacacttcgcgtgcacgcgcggcgggcgcggacggcagcggggcccgtgcggctcaacggcgggcgcacgcgacgacgacgacgagacggcaccaccggctccgcttgcacgcgctacgggtgcggatggcggcggggcccgtggctcagcagcgggcacgcgcgacgacgacgacgatgaggcggcgccgccggctcctcggcacgcatggcggggccccacgcggctctcggtggcgggcttgatgatgacgaggcggcgccgccgactccgcgtgcacgcgctagatctcaagcatctcctactctctttcttctccatggctgctacgacagcaaagtggtgtggttgtgatgttgaactactggttccagtctcttgatgatttctctcaagcttgagttgaatccccagccaaaccactggtggtggctgctattgctaatgttctggtagttgaagctgttgcgctactaatttctccatgccgatatagccagtgcttgagttcttgctctctcctttctttgatgtcactctctctctctctctgcgcgcgccgccggctccgcgtgcacgcgcggcagcggctgattttcctacggatggtttctatggctgtaactactaactagtactactgcagttgctgcttgtttcggtttctacgaccaaaatacggcggcgggcgccacgacgacgacgacgatgaggtggcgccgccggctccgcatgcacgtgcgccggccggctgttgctggtcgcggcggcgcccgcggcgatttttgcttttttttatttttgtttttttccgtgcggacggtataatttgactgcacggggtaatcgattatcccgtgcagtcaacttaacccgaccgtacgggaaaatgattatcccatgtggttgggccacccgcacgcgaaaatattgatttttccagacgtattgctgcatacgggcaagtcctccgcacggaaaaattattttgaccgcacggaaaaatgcttttcatagtagtgtgcgatcccctccaacagtgctgttgtcgccacgctctttgtgttgctgccaccgccgccgaccgccgcaggtggcctccatgccgtgggggtcgaggtgcgtcgccgccttgggagccttccccatccctctttcttccttgagctcggctcgccgctcgctgggcctgtgtcgtcgtcgttgttcgcttctgcccgactaccgcgtgctcaatcgccgcggtggaccactgcccctcctccgatggcaacgacacgtcagaattgaaaggggtagtggtgctgacaagtgagccccacatatttttatttttaccttttacgtgtaggatccacttttaccttccattcatttgacgactgagactaagtcaacctaccacatcagaataaatcacctccctaacaatcaatgagttcatttgcaccggtttttaaacttgaggaacacgattcgaccaagggcaagagttgaggtacgtgaaatagacttattccatcccatttcatcgcattctgaaacctgtgcccagcccagcccattgaagttcggcatagtcagcctgcaccgaatttttgtagagctcccttgctggctggagctggagaagtggagactggttgcggacctcaccctaaaccctagccatggcggcggccaaccttctctctcgcgcgctcctccctgctctaaaccctaacccaagcagccacagcaaccgcgtcagcccttcggccgtatctctccgctgccgccacggcctgacggcctccgttcgcgcctctctctccacggcagcgccgtccccgccgccgcggccggcggcggcggcggccgacggtcgggcgccgaagcgctgtttccggcgcggcgccgatgggcacctgtactgcgagggggtgagggtggaggacgcgatgggggcggcggagcggacccccttctacctctacagcaagcctcaggtggtgcggaacttcaccgcctaccgcgacgccctcgaggggctccgctccatcgttgggtacgccgtcaaggccaacaacaatctccgcgtgctgcagctcctgcgggagctcggctgcggcgccgtcctcgtcagcgggaacgagctccgccttgccctccgggcaggattcgatcccactaggtgcatcttcttctcttttcgtttttcgtttctatctcccgctatatttgattttttgatggattggaattggaatgcaaatgaacaatgatttgctggtggacaaaaggcctttttgactattctccatggacactagccatttttttatcttcatgttaattataaaatatccatctagtgactttctggggaaggtccgatttcagtgtcaaaagacatataaatgcaatagttggaccggaagaaagtagtatgaaaatggttcattaatatgctatatttatattttttttgccatattacgatgataggcaactttgttaattctaccaattttgttcacagagcttgactcgtgaatatgattttgataacactatgtttgcacaagcattagaatttataaccaaaatggtccgaacttaagaccatgtgttgggtcaaggagcacagccaaatttacatggcagaatgtagtgtaagaaattacgatcttcatatttcacagagcatgcgaggtgacaatccatgatgaaatctaagcgtatctatgaatgtttccaagttatagattgcacagttttctaaagtctttatctgtaacaaataagtacttcagttcatgtcaattgataccaaacaaaattgtagtaactaactagtttaagtatttatttaagttcaggtgtatatttaatggaaatggaaagacattggaagatcttgttttagctgcagagagcggagtgtttgtaaacatagacagtgaatttgatttggagaatattgtcactgctgcgagagttgctgggaagaaagtccctgttttgctcaggataaacccagatgtggatccacaggtaaagtttttcctcccacctcaggatacagtgggggatttagttatattggtatgctattgtgttattgtcatataatactagaaatcagattatatagttttgggtacccttgtgttttccattttttcttgaaaaaagttgtgtactacataggtgattattgatcttagttgtgcgcggtatcaaacatgtactactccctccgtcctaaaatatagcaacctagtacttgattagacactagggcatttcttttgcattaattaattgaatggataatgtaggcaaattttgctacgggacatcgtgacttgaggttttagctgtaggataccgtgcaaagtgacttttg

SEQ ID NO: 7531 - DNA, 14704 bp, Oryza sativa
catgtcgaagcgctagcctggaaaagacaggaaggctgcgctgttgacatgcggaccccacatgtcaacctaaaggaccgcggtagaccaggtacacagagacggtccacaggtcgacggaagcggaccccgtgtgtcaaccgaggcgagtagccgacaaacggactccacaagacaccacgcgggctgcacacgtggaaaccacgcggctaccgagcgaacacactaacacggacactacacggtcaccacccgcacacgtgaacgactaccgacaccggtacacgggtaccggggtcgacgaccgcacaacgggtacggggcgacaccaaaaggacgaggacagggcagcgagaggacggatccttaccaccacgcgacgaggcgtgggaacaacaacgacgaacaggcgtggcggacggcgagggaatgacttcggcggcgatcctgggacgaaggcgagacagggccggcacgaggcttgacgacgcggaggcgaggacgaagacgacgacggggctgctgcacacttgacgaaacgcgggcggcggacgagaacggcttgacggagggacgaacgccacaacgaccgggaacgacgagaggacgacgacgacgacgaccggggccggcgaggagacgacgagggcagccggcagcggctgcacggaggcgaggatggcgtggaacacaccgctgcgatgccgacgacggaggcggcgccgcgagacggcgagccggcgaggatgaacggtgaagacgacgacggacaccggcggtgttcggtcggaggggaggcgaggccgaggacgacgtcgcggctgcgatgccgaagatggtagaggtgcagcaagccgacgagccggggaggtggaaggggcggccgaaaggacactggcgatgaagaggatggagaggccggcgctgcgacggcgttccggcgaaaccgaggagcagccggggtggagggcgatgcggcgacgccgagggaggggacggcagcgccggctgatgcacgggcgcggtggaaggggctgccggaggagacgtcgacgaggaggaaggagaggccggcgcgggcgatctcggctccatcaatgacgccggcgaagtttgcgggaggatttccaaacgaatccgagagagagagcgagagggaaaagtgggggggaaagagggagggaatcacggggagtgatttctgtcacatcctgatttttgtttcaggatttataaattatttaataaattattattagaatttatattaaatgttcattaatttacaagtgaagttaaatgtgggaaataaaatttcctaaatataaagcatggatggatttaattttgattaaattctccatgattaattacactctctgaaattttctcagatgtttcggagctcaattcttaatttttaatcatacaaagagcatttcagtaattacccacatattaaattaatcattaaatggtctttttttaatattgttaaatactttgggtgtccaagtatgttcaagatttttcttggaattatttgagcataggaagtatttttaacaatttaaagatcatttcattgattaatttaattggaaaagtaataataatcctcttcctagtcttgggccctttccagcccatctccctcttttgtctgcacggccgtgcagcccaagtcggcccagccgagcttcccccttctctttctttctttgctttgttttcagccagcccaagacgaaaagtctaatttgcctccctcgacactgtttatcttctacctctagcagccgaactgagaccgatttggctcggtttttctcctccaaatctgacctttccccttgtgtttttctaaaattagttgaggggaaatattcctcttatcctcctctatctttacccccaaaaatcggagctaatcgttgagtatcttatccgaatcgaactcgttttcgagtttatctccaaaaccgagtttttgatttcccggatcgatttcttgcgggaggagtccgatctcttcaatccaaggctataaataggaccccctagtcctcctctttcgtttgccccctctcccgtggtctcccgtgcctcgtagcgccgccgccacgtgctccaccccgccgtcgtcgccggccgagctccatccgcgtcgcgccgccgcctccgtcgtcgccgccggtcgccgttaccaccgttaggtgcgcgggagggtggagaagcccggccgctatctccccgaagccgcccaccaccgcagccccgtcgccgccgtcgaccgaagccgcgccgccgctagacctcgtcgccggccgtcgtcgttcgtcgtttggttcgagggtgggtaccgttgggttcgtctcgtcgtcctctacgtgttcttgtcctccaaagtcgcagccgaccatccaatctccggcgaggtcgccatcttggttcggccattgatgaggtcatcatcatgacgtcatcatcgttttttttctttttcctgtttttctaatagattaaatcttcggaaattcataactaaatcatcgtaactcggttttgagtggttcaagttgctaaattcatctaaaatcaggatctacatgtttgtttactttatatgtactgtttatttggtttttattagtctttttcttcgttttgcgtgttagtttgtcgtttccgtcgttgcgaaggttcgtgagtgcgccggaagtattcaataagattaattgaagaccgattattgcaaggcaagtcacacagaccctaaacacaatcctttgagcatgttgatcctatatttaaattctctatttatttcaactgtgcatttattttcgaatgtcaccgggtggtgtgaacctattcctttgttatggccaatttgcattgattactttattccttgataccttgggttattataacttgactagttgagctttatatattggttcagctagatattagatatgattgcttagccatgcttagaaacattagcacactattgggataacttatgactcattgtttaatgatggtttaatcgtagctcacgatggttaatcgtgttatgataattaattgataactaaaacttgacaatggtgggttgtgagcacatggttttgaaggtcgtgctcatgacaattaaggaccggttcacgagctactgttgtgaaacattaaccgtaccaaccacaagccagcatgggcaacggctttaccttctgtatagcatgattcattgcggggcaccagactgagaagcggcgagaagtccgtgggggtcgctggggagtccatgcctctggttatatttatagagggggtgattatgatccaggaatggtgcactgtggtgagttgtgttgtgcaaagggtattgtcacagcctctattcgggtactttccagtatcgcgacgcatggtagacatgatgaggaggctgtgtcttgtgggtacagtggtacacctctggccagagtaaaactattcgaatagccgtgcccgcggttatgggcgggttgagcaatgtttttcgtgattagtctcacacctctcacaataattatggatgttatatctggtaataatttgcttagctcctggtttggagttagatctgtacagccgggtatggttgttcaggatggttgggcctgtgcagcatgggtgtgctgttcagtgttgattaaaatttctgattaattactccactgttttactcctcttaaatgttttgctaaatgctgcttttgcaaatgagcctatattatgccatcctttggtatccttgtgcacttgcatatttgctgtgtggcttgttgagtatgtcatatgctcattcttgcaataatcaatcaacctcagttgaagaaaaaggatccagaaggagaagacgtttggcttataccccagttgagctgcctgtgggagtggagccggaccttcgctagaccgtaattccgctgcagttttcttttcttttgaaagtatgtaacactattattgatgattctgtatattaaattgtcagtttgtgtacctcggctgattcctggacgaggattttatgcacaaataagttcggaaattactagtgaatttctgggcgtgacaatttccccctctttattgcgcgcgggggcggcgggatgcggcggaatccgcggcggcggcagcgctagggcacgggcgaggcggcgggcgcggcgcgaggtaggggatgacgggtgggccctacccgtcagcgagggtggcgggcgggcccgcccgtcagcggcacgcgcgcggggaggaggccgattgggccgcgggggagaggagagagagggagggaggtgggccgagccggcccaagaggggaaggggggaaaagactttttagggtttttctttttataaactcattttaactttgtttatttcttaataattattatttgtgctctgaaaattccactaaaatttgagggctctttttagaccaaggagaatttaacaaaaattctccgggccacatttgaatttttcttgtacgtattttagtgtttgccaatttcttttcgaattttaattaattctattattccttttagaaaatgatttttatttcgggatgaatttatcaggacgtgacaaatccaccccccttacaagaatctcgtccccgagattcgaggaggctagcatgaagataggttgggcggtcttctcttcttgtttgacttcttccgtcgcgtcttctataacgaacttgcctagcaaaacttctccactctggactgcttggctcgacctcctgttgcggatggaatcttctcttcacctgacttgaaccagggcgcaccttttagctgactcagactaggttgcggtagtttaatgatgcttccgctccagaacttctcatgattcataccttcggagtcaacctcatacaagttaccacttcatgtcatgcgtcaacactagcttgtcattactaggataccatatttgtcatcataagaatatcgtgcttgtcattcacttctaacttgccaccaactgcctcatattagctttcccggtctccgggtaatagctacttctgctatttgatgcaagggtcgataactttgcctttgaattatgcttcccaagagaaccaacttatcccacttgacatactttgacgtcttcccaaatggctttattgctggatttgttattgtctaatcattatcctgccaaatctgaggcttcgttgttagatgtgcttttaatctgacctctatagattatcttcgaacatatcacttgattcataactgggaatagctctcacgaacaagcaactcggattcactttctttacattcagtttacttcccattattatcttcaggttgtcctcagttagcattcaacgtattcctttatacctttaaccttgatgtgttctttcccattggatcatctcccaagacatggcattgcctggtaaccggtgcttgcacttttcactccgtgtagcatctgataccgagttgaagatttcactctttgccttcatagaaacacttttacccaggtcatcttgcttacttaatgacaaggtgactgttgcggggcaattacaatcaggggtcttccttgagcgatgcagagcatgtttctgtttatcaatcacctttcggcctacttctttcatgctagagaacatctttgccaatctcttttatcaatcttctttcggcttatctctaacaggtggtattctttaatgtggattgcggacgcttctggggacgatgaggtcctttggcttgctgcctttcagagaaaccttgaagtagttcgtcaaaagctagactgacgattgttgcctttgatccgaagaagacacatctgaaactcttagtccaaacaaatgtctctttggttgatcacttgattttcttcgccatcaacaggttggttattaactcgagattagtatatgattcctctgaaatgagaccctaggtctcctttatcagtaagcaattatacacataatcacatatccgcatcttccaaaagaatcctaatagaacttgtctgtattacacatttctcccttattacatgaatacaaggcactaccttaaacaaaaagggaagatgcttaacatcggtacattgtttctactatgggttatgattaactcgaggcctcacaggtatggcgtttgctccagtgaccacaaggcgagtgacttgtcttcttcttgcataatggccggagtgatggcgtaggttacgcttcggctgtggacaatctctagagaaatgacctggttctttgcagttgtaacaaatcaacgtcttctttgttgagctgtccatctggggacgatcattttgacttggagttggaattggtggttggaaatccttgctaacattggcatcagtggtaccatagttgctatcaccattggagtctttctcagtgtcaaaattgctaaggttgtcattctggattccaacattgatactatcgttgacatcttggtgaatgctactgacattgcacgctttattcgagtggtcgctaatgaggcaagaaccatggttgttggtggtatcatcatcattagtattgctagtgttgttgtctgcattgcgtccatcttcttggggcaggaactcttgatgcacaacagaagatccggtgatctgaagtggctcagtgcgctgtctttggttaccacatggaaatactgggatgttgacaatcctcctcttgcagttcgtcatccgattatgctcactttcgagttgcatggctttgtccacaagtttctcaaaatcttagtaatcctctagaaggagttgcactgcaagctcatcttttaacccctggagaaacttctcttgtttgtcttcatctgtttccacatcttctggtgcatagtgagccaaacgatagaactcgtgcaggtactttgtgacggtcaaatctccttgcttcagatagcgaaactctcattttcttaatgtgatcattcctgcgggaacatgtgatctcctgaatacagatgaaaactcgttccaggtgatggtatgtccttctggccgtgatgcttcgtagctatcccaccactctgaagccggtccaaccagctgaggagttgcgaagccaacccgctcctggtcggtgcactgaatcaaccctagcttcttctcgattgtgcgcaaccaatcactggcttccataggatcgacggcaatggcaaaggttggaggctcagttttgagaaattctgataacttgcactgttgctggactgtaggtacttgaacgttggttgtccctgctgggttgttccaattctgtaatagttgaaaggctgttgccaacatgttggtttggttaaccacaatttggattagctctggtgaggttttgttgatgcttttctcattcccactggcttgggttcttgagtcatcggatccatcattcccatagcctttgttaccagtgttatccatctgtcacaaggtagaggttgagaggggaagcagacaaggaaagaatggaccagaactagggacaagaccttaaaggaactaactcttcttgttgatatgttgtttgtttcacttattctgcaagttgattaagcaaacaacctagcatggttacatcacaacccaccgatgcaaaccacgcgctacacacacaagcaaggaacacacgactaacaacactaccctatagggtggcttaggttctgcgacgggttctccaagatcttcactccttcacagctggcttcactgcttcctccacttcgctagcggatcctgcagtcttccggagcttcggcgaacaactgacgatgtcttcttcttcactgacctgaccatctagtactagttgaaatttgaagaaggaagaaaagggtaaaccttttgcaaatagcattaggggaagaagaaaaagaggaactttcgcaaatagttttatttataaaatatgtccttaggttttatccacttggcttatcctacagtcgagatggctctgataccagcttgtcgcgaccgagaaaattgcattttcccgaacgctagtgtattaatccccgtcccaggaaaagccagggtacaccatacaaacatgatataaaagacacatctttattatatcgataatatttacattattacaaaggcacttaaggcctgacaatcaaaaataaaaagcagcggactagcgggcctacggctccatcttcacaggcgctcaactggggtataagccaagactccacctaagacttcttctccaaagcatctcttactgaaggggggagaaagatagagcaagaatgagtacaaccacagtactcagcaagccacaccggcagatgcacgactaatgcaagggggtacaaggggtaatgatataggggttaagttatgcagaaaacagcatttaaaagtcacttagttgcccaaagccattttataaagacgatcctagagctacacagtattattaatcaaggccgtgaaccctcacgaacctgccttaacccaaggcctacgatgatccagaccgaactggcaacccaaccctgggtcccagctcgtcccaagccaacccaggccaaccattccacattttagttattgagcaaattttaagaattaaaacactgacttgggtacattgctcggcttgcccataaccgagggcgcggctattcgaatagattatactctgatcagaggtgtacatctttacccacaagacacatcttcctcacgtgtaaccacgtgccacataccaccacggtatacggacggaagacatgacatagtttccaacccatcctagccatagacaagagtaccgacccaaccccacctacggccggaacctccgagacaggtaggcaggattgagcccctagcagcaggacaccagccctgtgccatgacatctcgactaccgggccgcagctcgtgtagccttcatttgtcctagagatgtccatcgacccccgacttcgtccatctccatccgtgtacttttgtttataaccagactgagccacaaactaagccttacccactagacatgtggaagtacggtagtgctttgcaacagaggcccgagcttaatccttatagtggccagggtgctacttcccacaactggcatgcacccaaaccccaccggaaaacaggttttaggggttttgaaagaggaagagaggtgtatgtccaattccaccataagccaaccattccatagtatccaaatgatatgagaattcccaaagtctaaagttataaaaaccacctaatgttgtcctatttaatcagcgaagcatctacctaaattcatactagtggaaccatgaatagagtacccactagttggggttttgttttcctagggtgaacaaggtaataataacaatagcaataataataaggtcataacaaaggtaaataggcatggctaaataaaacagtgataacgcgggaatttaaataaagcgataatgcaataatttaaatcaaaataattttataaattgggattcaatatgttcaaggatgatgtgacttgccttgctcagagagaacggccttccgaaccttcggcgacgaccgaaaaccacgcttcgggaacctccggaacgacgaagactacgcgaagcacacaagcaaagctacaagcctataaagaagcaataacaatacataaaaagaaagcacagggttctttaggttataacaaacattaagagacttgaacgggtcgattcggagttcgtatgaccaagatatgatcatccgaagtttagtgctgttatatggagatttgcggattattataattaagctttgcaacaataaaacatgtggaagcgctagcctggaaaagacaggaaggctgcgctgttgacatgcggacccgacatgtcaacctaaaggaccgcggtagaccaggtacacagagacggtccacgggtcgacggaagcggaccccgtgtgtcaaccgaggcgagtagccgacaaacggactccactagacaccacgcgggctgcacacgtggaaaccacgcggctaccgagcgaacacactaacacggacactacacggtcaccacccgcacacgtgaacgactaccgacaccggtacacgggtaccggggtcgacgaccgcacaacgggtacggggcgacaccaaaaggacgaggacggggcagcgagaggacggatccttaccaccacgcgacgaggcgtgggaacgacaacgacgaacgggcgcggcggacggcgagggaacgacttcggcagcgatcctgggacgaaggcgagacacggccggcacgaggcttgacgacgcggaggcgaggacgaagacgacgacggggctgctgcacacttgacgaaacgcgggcggcagacgagaacggcttgacggagggacgaacgccacaacgaccgggaacgacgagaggacgacgacgacgacgaccggggccagcgaggagacgacgagggcagccggcagcggctgcacggaggcgaggatggcgtggaacacaccgctgcgatgccgacgacggaggcggcgccgcgagacggcgagccggcgaggatgaacggtgaagacgacgacggacaccggcggtgttcggtcggaggggaggcgaggccgaggacgacgtcgcggctgcgatgccgaagatggtagaggtgcagcaagccgacgagccggggaggaggaaggggcggccgaaaggacgctggcgacgaagaggatggagaggccggcgctgcgacggcgttccggcgaaaccgaggagcagccggggtggagggcgatgcggcgacgccgagggaggggacggcagcgccggctgatgcacgggcgcggcggaaggggctgccggaggagacgtcgacgaggaggaaggagaggccggcgcgggcgatctcggctccatcaatgacgccggcgaagtttgcgggaggatttccaaacgaatccgagagagagagagagatagggaaaagtgggggggaaagagggagggaatcacggggagtgatttccccctctttattgcgcgcgggggcggcgggatgcggcggaatccgcggcggcggcggcgctagggcacgggcgaggcggcgggcgcggcgcgaggtaggggatgacgggtgggccccacccgtcagcgagggtggcgggcgggcccgcccgtcagcggcacgcgcgcggggaggaggccgattgggccgcgggggagaggagagagagggagggaggtgggccgagccggcccaagaggggaaggggggggaaaagactttttagggtttttctttttataaactcattttaactttgtttatttcttaataattattatttgtgctctgaaaattccactaaaatttgagggctctttttagaccaaggagaatttaacaaaaattctccgggccacatttgaatttttcttgtacgtattttagtgtttgccaatttcttttcaaattttaattaattctattattccttttagaaaatgatttttatttcgggatgaatttatcaggacgtgacatcccgacatcatgcttagtgtgtgtatgtgtgcccgttttcaagcggagcctaaagagtgccatttgattgccgtcaagagaattctaagatatttagttcacactcctaatcttgcttgtggtatcctaagggttgtgactttgagcttttgggctattccgattcggattatgccgggtgtaaggttcatagaaaaagtacaatcgggacttgtcaatttcttgggcggtcccttgtttcttggttctccaagaagcaaaattccattgctttatccaccgccgaagccaaatatatcgccgccgattcttgttgtgcccaactcctttggatgaaacaaaccctaaaatactttggctacaactttaccaagatcccactcctatgtgacaatgagagtgccatcaaaatagccaataatcccgcccaacgctcaagaaacaagcacatagatattcgccaccactttttgagagatcacgagactaaatgagacatatgtcttaccatgtgagaaccaagacccaattagccgacattttcaccaagcctttagatgagaaaagattttgcgagcttaggggtgagctcaatatcttagactctcgtaacattagctgatgggtggttggctaattcatagccaaacatgtgtcactaaaatgtaaattaaaaaaaaaagagcttttgtgtcttgagatcacttcttgtgtagaagatggtcttgatactaggaataaagctcaaacattccctctattatccaaaaacccttttgtgaaattttgcaaaattttttgtgtgtgtttttattgagaaaatttggtttttatcccttcttgtgatgtatattgaccattcttatgtaatgttgattgttggctggtcatatgcatcataagtctctatatattcataggtttttatttctaaatcattgaattctcatctattcctttgaacttgggcctgactgccctctgttctgtcaggccggaagttccggtcatcccagtccagaacttccgggggtcgggggtataaatacccgggggagcccgagcctgttctctctctcctcacttcttctcctccctgattcccaaaccctagccgccgctacagtgctcctctcggcgattttctattcaaaccgtggaaatttgattcctctccgtggaatcaactacattggtggctaggaggttcatcccgcgatcgatttgcgatttctcctctctaggtagcacttttgatcttctcttttggttcatcatgtttttgccccgatctctaaatatgtgaacctagggagaaaaccttttggatagaattgttcctgctaccttgtagattgccgatctataggattttgtcacatgcactggcctggttaaatcctctgttcttcagttttgtaggccggaagttccagtgttcttggcccggaacttccggtctctgtctagccagccagtaaccttgattctgctactgtttcttttaaccattgcactccaaccttgttgattcttgttgcagtggtcattatgcctcgtgagaagagacagaagctttcacaagatgttcctgctgactcgagccccccagttcatggtcctagggggagattgggcaaagaaaacgttggagatttttacagtgggagtcagattccgatccatttcaggagggatggtagcattgtcattcgtgatgctccccgctctccctctccagctgcatcagagtcagataatggtggcaatgaggatgagcctggttctgaaagcaatcccttgagactttacaagacaagggttgttgatcctgatcctagacgcccaagagtgaactatctgaaaaatctgctcaagtgtggaaaggacaatgatgagtcctgatactttgcctgctaactctcaggatgacagattcaggaccttggtgcaggttgattggtataattctgtgatcatgggaagatctcatccagtggtagagatgaagtggctagactggcagtacatgtcctcaaagaacaacttagttttcaatgaggtgcgcaaggtgtgtgagcgcaagcacgtggcagatttgttagccttgcagtattcctggaatgaggaagtgactggtcagttctactccactgctttctttggcaccaccaagaaggggcttgattttgtgaagtggaccattcaggggcagcagtatagtgtctctatggcacagtttgctgcagctttggggttagatgatgatgacctgagtcgcccacatatcattgtagaggatgctctgtcaccgaccaacactacctttatgtatgagaaggatgctcccaaggattgtttggggactactcgagggttgcgtccatactatagagtgttgtactcgatcttcaggtggtctttgctccccaaagtgggagatgctacagctctttcaggtaggcatgcgctcctcctcagtcgcatgcgctacaacaagccagatttcagcatcatgaagcttatctggagtgagatctacgagacagtgtgtgagccaaagaggggttgcatctatgctccatatatcatgaagatgattgaggccaagactgggatttgttatttcaaggacaatcaacacaagcctttttgtcctcatgctcccactacttcaactacttctactgccagagtcactcgtgcttccacctcagctgctccttcttcctctgctgcaccacagcgttctgagtcttcttctcccataaagaaggctctcagggctatcttttgtatgtgtgccaagatagctaagaaggtaaacaagatagagaggcgtcagaaggaagattggattgcagcaggcaaggatgactctgacatttctgatgatgaggagtttgttgatccttttgctgcttatgagactgcttgagacattgctagtggtgagggtccctctggcacttctcgtttcttcaatgaggagtcctctcactccgaggagagcagcgatgatgaggagtcagatgcacctactgagaatattcct

SEQ ID NO: 7532 - DNA, 18704 bp, Oryza sativa
ggggtccctctctgcgccgaggtctccaccagggttcctctccgcaccgaggttgccgccgttagatccagtggcacgacgggcggcgacgctagatgcagtgatgggcggtggagatggatgtggcgcaaagggaggagaggatgagagagagagagagagagaggataaggatggagcagatgcgcgaggacttggtggggttaagtagtggctcgtttcaggttttttgaggtgtcggttctctaagaaccgatacctacaatatattattatagttgttgaaaggtgttggttttgtattttttttcttcccatggaggtgagaacggtcaataggtgttggtattatgagctggtatgtatgagggtttaataggtgttggtattatgagctggtatgtatgagggttttttttaagtagtgttggcaacttggcataaaaggtgaacgagaatttattttccctgctttcacatggaaacaactgaacacacaaacaatgtagggggtgtttagatcttgggggtgtttacatccaggggtgtaaagttttggcgtgtcacatcgggtattatatagggtgttgcatggggtgttcgggcactaataaaaaaactaattacataatccgtcagtaaatcgcgagtcgaatttattaagcctaattaatccgtcattagcaaatgtttactgtagcaccacattgtcaaatcatggagcaattagacttaaaagattcatctcacaaattagtcacaatctgtcaattaattattgttttatcctctatttaatacttcatgctgatgttcaaacgttccatgtgataggatgtaaaattttagggtgggctctaacccgggccgtaatcttctgcccagtggatacagttcagtcagtgtgatcattatgcttgtatggactacaaggcacgctgagaactgggctgctggtatcgcaatggttacagtatggttcagccaccaggcataaccgattctttgttgatgtgggagtctcgccaaatgtcctacaaatgaaagtgcgtgtgcttgaagagagatcaaatttgaaaagtgacaagacagcgttggatttctcgggtagagaaaggttctttcctctgtttttttacaaaaatatcaggtttttcccttttctggaaaattaacttgggggcgagagaagccagaactctcgacctcaggatatctccttaacgttcggcagcagcacattgtgtgaaagttatttcgttttccgcgagcacgttttccaaattactaaatggtgtgtttttttaaaaaaaaatttctatatgaaagttgtttcaaaaaatcatattgatacagttttaatttttaaaataatttatatttaattaattatgcgctaatggctcacctcgttttacgtatcttctcaatcttctcttctctcctctcaaactcaatgttccaaatagtaagagagattgagcctcattgatcacggggtttacaatatatatgggggagagaggcatgttggcaggagtgcgtgagggcctgaagacgtggggcaccaccgtgccccggagttggttgccgatccatccatatatatggatgagatcatatatcttgtttcataatagattcaatctattttcatccctacacatatttttttattgaaagtctatctagcagcttgaactttgaaatgagatatccagccctccgaactactatataatatcgtttatattgcaccctagtgtagtttttacaaaatgatttttatctaatttacatatatgttggattagtttaactaggtgacatatgcattggaatttggacatatgtgttaaaatcatcagcgaaatcttctgtttccccaactttttgctcttaattgcttacaaaagaatgcccatataattctagtatgacaatactatggagtataaattggtcacatgtgatttgacgatatgtaaacatgctacattagttatttaaaactgctgatttaaggttccaaatacccaaaactactatccaaaagccactatactatatgattgacgatatgcaaacatactacattagttagcagtgttctttccgcgcccgctttttaaactgctaaatggtatgttttttgtaaaaattttctatacgaatgttacgttaaaaaaatcatattaatctattttttaaaaaagttattaaacaattaattaatcaaagaaaatgcgttgttccgttttacgtgcgcaggaggtgagttccaaacttcacctccctaacacagcctatttttttacgatgctagataaacttttatcaagtatatgtggtacatagactttttcctttttaggctgagctaaacaagtacttactcgccagtgtagaaaaattatttggcatggtctgaatttcgtgaatatcggcgatttttcatcatgtccaaacagttgggcgaacaaattttttgcggaaccctaagaactactggctactgtcaacttgccaattgagctatggagatggggaagaagtgaaattagcttccgttaagaaaagacaaaaaaactaaaaagcaaatctgtttgttccatgtcaacgttcacaaacattcataagcaggcaccatgctaactcttgcctgtacaaaaacaatgctagctgccgcttcaacgcaggaagaaacgcaaatccacgacgctcagaaccttgaacccgttcaggctgcaacccatcacaagcctcggcttcttcggcgccggtgggcagtgcagagcaccttcaagtcctcctcctcctccacagagagctgttggcgtcgaagctgctgcttcttcttcctcctctgaacggggccgcttcgtcttcgcgggatgtagggttacagcttgcgcctcctggatggttctcttggctagaattttgattttcctctgcaaacccatgttttcctgatgaacccctgagcattgaacagaactagagattggtcagctagctctcagacttgagggtgatgtgaacaatcaaaacaaaacaataggagaaagagttgtgcatactagcagcagcagcagcctaggctcgtcggagatgtccacgggagggaatggatatgacagaacgacagtgcgatgtgcatgcttataagcagttcagtaaaggaagcaggaaagatccttgcaaggggctggaaaaggaagaaacaggaacgctagatacagtaaatgccagtgcacaaggaggcagagggctgagatcaagcaatttaggaatctgaggaagttgcaaacgagatgaaaaggaggaacccatcagttcatttgcgctaaaacttgtcttctttcaataacagtaaggaaagattaccaggatgcaaaggaaagaggaaagtgcttaatttgcgagaggacggagggaagttagtactgaggggcacgtgagcatgagcaaaagtgagcaagaaagagaataaaaggaaaaaacaaagagaaaaagaatagctttgtctttgctgcaaaaagaagattgaaggccgctaggtatatgcaaaaagccaaccagttataattatccatatttttggtgtgttttggaggaatcagctcgatactttaaagttaaatgcaaactttttgagctattaaatgatacttttcaattcaactcatcttttcttttcttcttttttttttttgacaaaaggcatacacgacccagctttactgaagccataccgggttctgatacaactacacgctggagactcaacacagcatagctcgcttagaacaaaacagaaccgtctatatctaagaaatgccatcgatgaatacaacttccgggaaatgccatcgtacgaatcaacctctcccaaaaatgccatcaccatcactactcccttagctatactccgttggacatggtgaaaagaccatttgccccatgtgaatgctacataatgtatctgcaaaactattgtatgatactttggtaaagagtggattttctcttgtaatatttgcaccaggtaatattcttactaaaactaaaaatgagacattatgatattttcaattttcacacacatgtaatagtagcacaattatataggaactcattttcgagttctagaccaaaatttgtctaaatttattgaatgtcaggaactaaagggaatggccaaatacctaggcatgaactcacatgaacaccactatgctcagaacagcacaagcagaactctaaaaaagtgaaccttgaaaaaaacaggacttcacatcaagataaaatcattacaaacatcaataatcatatattcataattgaatcattacaaatcaacacatttcagtgggtaaatggacctataccaatttttgtcaatgacaatagaaacttggatttcctcacttctggataatatatcgcagatgaccaccttcagggaccacagtgctgtcgcctgcgtcccccgtatcactacctgggagtgaggcgccaccgcctccagcctcacttccaccgccggttggagtggccctacctcctcctcgggcccatgcaccattgtctggggccaccctagcacctccttgcgcccccatgccgccgcctaggagcgcagcatcgcagcctcgcccccccccccacgccaccgcccaacgtagccctggctgggagacccacgccgccgtcgccgtgaggattcaccccaccgctgccatcattggtcgggagcgccgcggtgccgccgggatccaatcagcttcctcctagatcggggctagggttaggtgttgtttccattttgtcgaatttgtctttactaggtaaaaagaaataaaggatagagtaagtatagtatgtactgagggcactttgggcttttctaaaaaaaaataaataggtgtaacggagtggaattaacagaaaccaaacggtagtggcatttttgggagaagttaattcgtacgatggcattttctagaagttgcgttcgtcaatggcatttcttcgattaggacacttgtcaattgcatttcatggattttctcgagaaagaacagcgaactattctttttatcgcagtccaagcacaagagatgaaattgccaccattgtcatcttccgtggagaatatgggtacccggtacccatacggtctgcatatccgactatagataggaggtgggctggattcatgtattatataactagaaaagatgcccgtgcattacaacgggttgagccaatttaatttgtacatgtgtcggcggccattgtttcgtttattcatgtgcttatcggaatcacttacaacaaaataaaagactatttgtgtgcaaatctctcatacacaagttcttagcgactcaaaagcaaatactgtaaaataaagtacgataaaaaaaccaaaaagtcaaatttaaaattacgttctaaaatttaaaacttggcttataggaataagcataagccaaacaatgaggccttcaaacacgagctcgatttgttgcccagctttatctcaagtcgggcaggaattgatgacggatggaatcagcaacttcgatcatactctatttcggttggcgtgttcttttcaaaagtaaaactgattctggattattgtaacggtatctctggtagtacgtacgagcatgtgtggagagtgacttgaaatcatgctaacatgtcccaggaaccgtgtcgtgtaatatgaatagaattggataatctgggcaacggcgtatgtgatatccacatggactctacgacacggactttctttcgcagttcgctcgcgagtcatgacttcgcaatgaatgttacacgtaacggaatcagatacaggcgacgtaccatagttttcacaaaaaagaaaaaaaattttaaatcacgggtgagggcgacgcagtcccaatcggacatacggcaaaggcaaatcatgcgcgcgagggcgttgccgtgcaaaggcgcctgtggaaatattctcaggcacgggcccgattgccgtgtgtggcaaggggcgcgtgaaatgctacgggcctaattaatttgcacgcatcttagataagagggacactctggcgtaagaaaaaaggaaaggatttgacataaatataaaattctagcaaaaaaatcttcaatttttataatagtagagatagagataaagtatggctcggtcacaatgttgccttgtgttctattgtaggacctagagtcccgattgagtactaccatgtaatagattagcaaactgtatcgtgtccggctaggtttttctctttaatttgtatccctgcccctaacctatataaggtgagtagggagaccttaaagggtatagcaacataagccacagtcagatcatcggaccaatacaatccccaaacaaaagtaatgtattacctcttattcagagagcctgaacttgtctaaactctcgtctttcgcatctatccacttttaggtctcgtgccctacccccttatcattgtcaatttccaaaatcgatagtttggcacgttaggtagcggtcgcgtcgagtttgttgtcgagaagtgcgatagaatcaacttctagagaagtgttgagatcaatctcaacgagtttgatggctcaaatctctaacctgggtttgtcattccaatctaacttctattagattgatatctaaaggtagattgatctcctgttactttcttgttttcaaatgctagctgagatcgagatgagtggtcgtcatcccagtgcgtcagcccgacgtgctccttgatgcactcaatgcacacgccggtgcgggtcacgctcatcatgggaacaaggcaggtctacgggttgtgtccacaacctattaacgttaatcgcacgcggagccgccggcaaccacgatttaactcgtgtgcatgtgtaattcaaccggcatgcatgacttaatcacacacaatacattgatatatgaagcatctatatctttcagcttactgacggattgattttcatgattgctttgttttgcatgtatgacgattcaatcacctgataagatcgatcaacccacctccatccgagctatacatgtgttgataaccaaatttgacacgggtcatgttatagctagtttgagccaaatttagaacggaattgctaactatcgtttgactgatttatgagccttccatcattcgcatttttgccgtaggatatggtttttgagatccgtgctagcatctagctgctaattaactaggtccacgttgctaattaactaggtccacgttactgttccctgttgttaaactagccgtacgtgtttttcaatgctaatttatttatgatcccacgcgtactaattacatcgtacttacactataattatatattaattacatatgtaattttagtgtatttacgatgtaagtctgaaaattacatatataattttagtgtatttacgatgtaagtttgaaatctacttgagcccatttgagccccatgagcttcagattgtccacgtggctcgtttgtttgttttttgtattttgtttgtgcatattaatgtcatccgttagatgttgatttaaagggtaagaaatgtgcatcataggaggctaaaaaatctgtcacatgatctataggcagtaaccaaatttgacacgggtcatgttatagctagtttgagccaaatttggaaactaccaagtcattcccgcgaaggccagtctaaccgccgtagtgtggctggtcagaccggacaatgagctgtgatcagaccgccgggtggtcagaccttcagcatagagtcagagtccaatttaggtatttctcgtatttccttgttttagatcggtgttggtatttcttaacgtcacaaatgcagcacttcacctgggattattcttaggtatcgatttccacaggcaacgggtattacttccttatcaggttcacccaaggacaccaagctaagatgcgcaaaggatagagaggatttcctagtgagaaacattgtctaaggaaagtttaattttaatcctaacgcgataattcagacactggcaacccgctgttcctagatgtcgctctactacataccctgacagggaggacttaagtgctcttgagggctgtcaccacctctacacccacctcaaacgtactgtgggatacacaacaattactggatataaattacctaaacaccacgtctgagcaattaatatctactttagtgtttctaactcactaaagcaatcactatattttagtcgattatagtgaacaataattcttataagaggtaattctcacaagtactcacaagtaaatctaaattactcagaaagatatttctattgaaaacagagtaattaacagaataaaataaacatgagaggattaccgacatctccgaaattcctccgacttcttctactctactctcttcctaattctagtatacaaaatagtacaacagagcctcttataattcagctcaagcttggaagtgtgtgaagaagtgaatgagtgaagctccttaaataggcagttaatgacggttgtggaacgggaattgtccaaagtgccctccaaccgccattaggatcaaatcaggagcatcccttccaaaccccaggatcaacggtggagatcagggttctgggctggcccatctggccctcaattttggcctgtggactcctcctgttctgccttatccattactgcgagttttgggctgattctctggtattttagtgaagtctaaagcccctcccttgtatggatatgttccttcttcactttagtctgattttcctcccaacttcggtggtttaggacctgcatcaattaaacacgaacactcgtggaatatgttagaattaacacctaccactatattggatgttttattatctgagttttatgcaaatgctggcggtataaaaatgtgtatttaatagccgccaacaatagggatttctcgagtcctagttgatttctaagcctaattggacgtgggaaagaccatgggaagtaagtccacccctaatataaatataagggggacaagttcgattgaaacaataaccactcaatcgtcaaaatcaatttagttatccaaaccctctatattctacatctccctccttgcttccaatcccaagtaaattctccccaaatcccctaattgctcgccgcctctcgtctctacggtgttaaaggacatcctagctggcctgccgagtctagcacaaactagagcgcattcaccctaacggggtccctcctgggtgtgtgttcggcagcctctacccacaccctacagcggcgcgtctccgggtgattccgtgggttgcacataacatgctcaagttgtggcggcgcgattctacatcaacaacatgcacatgcgtgatctacctgtacaggtacacatcaaccagtgactgttctagccagaatccacaaagcatagatgttaacaacaaaatttggtaagatacgtggacataaggatggatccgaagcggatttgaaggagttagtttggtttccaaaatgaaacaatgcatctgctggagtctgtatcagtcgatatagagttggatttgattagtcgatacatatgatttcgagttcatgatgagttcggattgaggattcagaattattgccatacaaggatagagtctaaagaagcaattgcatctattaattaggataagagtaagctttcctttttgtgttttagaaatctatattagcatccacaatgggctggtgtgtttattttgtgaagtttgaatcgtgtccgatatgaacaagttttgtactacgagtataaatatatgcccagggtcttgtatgaagaacaacaacagttcaatatactctcagcgcatcgccaaactttttgttttcaattttctcaatgagttcttgtttcgagttggggcatcttcttcgatcttccgatgagaggtatgacttgtcacagtagtttgcatcggtggattagtataacgttttaaatgttctaatctatctattgtagctgctggttatcagttatcttagtgttaacaatggaattttgcatcagattcaaaaaggaagagatgaagttctcaaatttgacttctatggacaacctgcttaaatgaaaaatggcagtattgttatagcagccaccattagaagcacaaacacatcacgggttggtgcttggcgtggccggtgatgacggaattgtggcgagatcaatatatgtttgtgatcagtaggattaattagtttagggaacggaatttcgtggcaagatcaatatgtttagaacaatcaatgtaatagtaatttagttactaagagataatatgttgagaacatgtaatagtaacttggttactaagagaaattttgtggcaagatgaatatgttatgttgagaaccatcggtgtaatattaatttatttactaagtgaaattttgtggcaagataaatatttaatgttgagaaccatcgatgtaatagtaatttgtttactaagagaaataatatcaaataggcccaaccatcacactactgggctgatggatcaacaggcaacacaccgaccaaaaactgggccggttgggcctaactagggttggctgttggctcccccttgcacgtggatgcctaggatcccttccaatgacggttgcggggtatttacgaccattccaaccaccacaaccgtcattggtagctattgacagtcgttatcgatcagttttgaccgttaatattaccaaaatagaggataactaatgatgcttgcaatgcataaatgtattagaataataaacttccactagtattaggcatgctaacctcttgcagggaatgacactaaagtggaggagaatcgacatcaactcaaacgataaatcaatcagacgatgtcgagaaccagacgtatgtatgaatgggccaagaactcagaattgacacgacaaactgggccaaaattcacaagtctgaggagaagaacaacggagaaggccgctagccgaaattgggctagattgggccggccccaagttcggctgaacctggtggttcggccgaacctcccgcagctccgtttgatccagggttctcctggacggctgagatggctccccagtggcggttggagggtattaccgaccattccaacagtcacaaccgtcattgggaggctataaaaggagctctcatcctcacttcactcacacacctcaagcaatagctctctcatttctctcaagtttagtttagtagtatctagctggtggaataggaatagagtagaaatcaggagtctggaagccttcggaagactttgggtatggctctaacagctttcctttcctcttttgtaagctttgtacttttattagaatactcttctatatacatttatggtattgaaatactttccgagtatatgagtacctactttacattatgttcatgttatactaaatatacgtctagcttatctgggagatgctttggtgcgggtataatgtttgcatatacaattactctatgtcatgatgatgatattaaagtagtatctgatagtttagacgtggtgtctagattacaaggtatcattatttggggctatatattgcggatgagaggtgggccactgatggtgacagctcagtacgggtattcctccgcgccggtatataatcctaagttaatttcctggggagggtattcctccgtatttagccccggttgtatggtcatgacgggctatcgtaaggaactcagcagtcaggggtggcttctcgaagtaccaggagagcatcggatagagggtattagctagtatatcagttaactagaatgtatgtatactatgtatattagaagtataggaatatattttctttgtcttttctttccacctagcttagataatttattatgaggatgagtagtaatgcttgtgtatcactctactcttgtattatcttaacccctacttagaatatgattatcacaaagtaatatataaactattagttaagctctctctacattatcttcccacgggataaaataaatacgatacccttggaatactctcgggtaaaatgctaaaatggtatatccatgcgcttgcggatgaactctgtaaccataatatactagaagtatttctgcgccattgctgggaattatatttctagtaatgtcattaagaaataccaacaagcatttctggcgtcgttgccggggaagattcataatagagattacttgaactaatactttatatttacatctatataatcatttcctttgcaggctaaccttggttgttttcactttttgttgtgaaaacagggtagtgcatgacaggtttcaacctgccggaaaacttcaaagaaaatccagaagctttcttccgagcgtcaggccgcgagtcgttgcttcgcagaaaactctaccaacggagaaaccagccctaccagtgccaccgaccttcaagactatggccagcaagactcttcgcgagttcgctgctccctctgctgacaatgtggccattgggccgcaggtcaacataggggacgtggattttgacttgaagtccagcctcatgacgatggcacaggctagcccgttctatggcaagcctaatgaggatgccaatgctcatctgcaacagttcctggagatctgtagcacgtacaccattaagggtgtcagtcccgacgtcgtcaggttgcggctatttccgttctcccttctcgggagagcaaagtagtgattttatgccaaccatgctgctgtcaacacctgggacaaatgctctacggcattcctctcgaaattcttcccgacgggcaaaaccaatgcccttcatggaaggatttccagtttccagcagacaagggacgagtctattcccgaagcatgggaatgactgcaggagtacgtggccgcctgtcctcatcatgggatggacgactggctgatcctgcagaatttttacaatggactcaccccaatgtcccgcgatcacctggacgctacggctggaggagccttcttttctaaaacggttcaaggagtcgttgaactgatagagaagatggtctccaatatgggttggagcgaggaacgactccagacccgtcagcgaggcatacacaccgtcaaggagacagagctacttgctgccaagctggacctcctcatgaaacgcttggacgaccatgagaaaaggccacaaggcaccgtcaaggccttggactcacacgtcacgtgtgaggtctgcggcggcacgggtcattctgggaatgactgcccggaaacccgtgaggaggcgatgtacatgggcaacaacaacgggtaccgtccacaaggaggtcaggggtggaaccaaccacgcccatattatcaaggaggtaacaataacggtaacttctctaaccagccctccctgaaggatctcatttttgcgcaagcttaaaccactgatggattaagcaaaaaacttgctgccaatgataaggtcctagagaacattaatgtcaagttagatggctttgcttctgcctttcaaaatcagctgagctttaacaaaatgacataaacccagttagctcagttagcatctttagtccctgcaaatgaaactgggaggattccgaggcaacccgactcctccattgaaaatgtcaaggcgatcacgacgaggggaggtaagtccactcgtgatccgccatatcctaaccctgcaggaactaatgggatgtcaaaagaagcgccatctaatgactcggctgacaaggagattcagccagaaaagaccgtgctgcaggaatactgtgacacacggttgctgccgtttccccaacggatgaggaaaccgtcagtggacgagcagttcgctcgttttgttgaagtgatccagaagatccacatcaacgtgtcgttgttggacgctatacaagtgccgacatatgcccgttatctcaaagatatactcaacaacaagagactgctcccaacaatggaggtggtcaagctaacggaacaatgcagcaacgtcatactccataagctcccggaaaagaagaaagatctggggtgtcctacgatcacctgctcgatcggggcacaacaattcgaccaggccttatgtgaccttggagccagcatcagcgtcatgccaaaagacgtcttcgacaagctcaacttcacggtgttggcactaacactgatgtacctccaattggctgactcatcagtccgttacccggtagggatagcagaggatgtgccagtcaagatacgggacttcttcatcccggttgattttgtggtgctagacatggacacggggaaggagacgccactcatcctggggcgtccattccttagcaccgcaggatccaacatcgatgtgggaacgagtagtatccgtttccatatcaatggcaaggaggaaagatttgagtttcaaccaaggacggaacaatgctccatggtcagaataaagtacgggtcgaacccgcagaatattcaagtggttaaagtggagccacccaaaacggacagcctggtgaaatttatgcagaacttcctggagaaggaaacaacgatgcccaggaaccgttattggaaaacgccggtaaaatcacccgtaccggccaagaagttagagcaaccggctcagaagaagccgtcttccgcaccaaaaccaaagaaggtgtggaaggaaaaccaaagacgcccgctccatcacctccggagacgggtggaaaatccgcgcactgaaccgaaaggagggacggtcttgcacgtcggacctaaaatgatgcgaccttcatcaaaaggtaaattggtatgtatccgcatatttgctttcaacaatttgaattcttgcatcatcacatatttgaatttcaaaatgcatttaggctttttgaattttgaggaaattcttcaaatgaatttttcagagcaaaccaaaataaaattttcaacgaaaatttactgtgccacgaccacactgatcgttggaatccaacggccaaaagtggggctggttgggcccaccaggggttcggccgaacaccctggttcggccgaaccggccaggcaacggctccctgccacttttggcagggtaacggctagtaggtcccacatgtcatttctgaccgttgtgggcaccctataaaagccagtcggctgggagagggaattccatcccatttcaacacattttcattcccgctccaaagtttgctctcaagttcattcaagctttgatagtttccctcaaattcaaaaatttagttgcatatatatacaagttgctttggtgaaactaactggcaggtgaaattcttgtcacttctaacccccgccgagttagtccacttttgctccattgtgcagtatgaggaggcgactgtctcgtctattcaaagggtccggctcttcatcaagtcatcatgatgagtctagtactcgttcatcagctgatgtcttgatggaagacgccaaagttccgcgatgactcctgaacgacaccgacctcgaccttgtcagtgatcgggagagacaagcctactacatgctgagcgaccgggagtatgctcacacgcgagaatactcttcggagttgctaaaaaagataggtatggatgttgaattttgttctatctggaaagtttttggttggaagagatttgctgtggtagatgagcctggttctcatttgcttactttgcaatttctgtgcacttgaaagaaatagaatatggtatttcttttcacttttttcgtaaggagttcacactcacatggaaaggcttgagtacacttcttggatttcacaattcctataaaatcgatctccggaaaggaatttctgggttcgagaaaaataggttttgggaagacatttctggtgcttcaatttgcaagaaacctagaacgaatgatatccataatcctacacttaggctcatgtacaaatggattgctatgactttgtttcctagaggtgatctgatacccattaggggatgaattaattatcatgtttgccatggttagaaaaatcaaaattgctcctgtgaaatgtatgataaggcaatggttagaaagtataaagttctctgctcctgtttagtgcacttctctgattactcggatagcaaaagggctaggggtcgttagcgaccaaattgcttttatctcagccgctcgtccgcgtattgatgaggcttatctagtgcaagggcatattgtgaaacatggagcagatggatctttgatatactttttccccggttgtacaaatgaaatcccgttgccaaatgcggggtatcatttgtacaactgccatgaagtaaccattcccctgcagaccatagaagaatctcgtgcaggtggaacatacagggagacgcgcaacatgacaaggaatgagcaagaaagttcatcatcctcaacacccgtgcagatgtatgatgcaggttgggcaccaactgggatgcacccgggtggacccaagctccacgccatagcatcggaatctcaacctggacaagcgccagtgaggaccggtggcatgcgcctcatgacatccaatggggggacaatcaacctcccagatcaagtggtgtgcctccatctccaagtgaatggcgctcgagttcctctcgttgggacttgggtgaaatcactaagagaatggacacccttgatatgcagacgggggagatccagtacaacctcacggaacacatagctcaaacgcaagaatggcaacaatctgctaatgctcagttcgccaacaacaacaacatgatgcagcaaaagcacgatgaccttcaagcgtacttccgttttcgggggttcaatccttatcaaggaccctgagcgaaagccaagcttggggggagacatcgctcccccctattgaggtaacttgtatcacattgcatatttccctttccaattgcattttataaaacttgaaaacaacataaaaatttgcaaaatataaaataccaaaaagataggataggtttgagtcaagctaggtaagacaagctagttctctttgttgaaatgataaatagttgctctattttatatctctgatatatgggttcttggtaaatactctctcaaaggttaaatataagtagccaacaattatccgggaacctcaggtaaatgggctgcacttgctgatctaagtctaggttgttgtgagatatgagatagtaaataagagttactatgatcctgatactagtttgacttgaattccggatgttttgtttttcaaactaataaatttgaaagttcctcatttgatataaattcctaccagagccaaaaatatgctatcatgattaaaccatatacattttggttgcttgtcattccattgaactctatcaaactcttgtgacttgtgtagatacttctcatgctctatgatcaaggtcatacacccacatatatgcatatgccaaactcctacactgggagctaagcaatattccattccatttccatattaccatcaaaataaattctccatgctttcatgtgctttcttctcctaaagaaaataatatactttttgaaaaaaaaagagagaaggagggaaaggcatggttatgaaagaaaaaaaaataaagttatgctccatcaagcatgagcatgattgaaaaaaaataatatagccatgccctctcctaatcaataaaagaaggatttttgggagaagaaagtaagcgcaaaggagaagcattttctttatttttttattcatgtgccattccaccatataccacacacacattatgcacgatcttgatcttgagtatgtttagttatctgctctagtctaagtttttgacttagtaataaatgtgaatgcaagtatgccatgtttgatccctaccgagctctacatataaaaccttagagtaggaatcaacaagacaacatttggtgaggaattcatgttgatacactaagagagactgagtgaatcatttgaggaacttggttttctttttgcaaaatcatttgaaaacttccggaataagagttgaatataaagatcgggtgattggtactctaaattgctgttcaatctttcaaccgcccaaggcaaggaaaagcagtgtctcgtgggaatcaggggtaagggtaagccaccgtgccaaaaattatttaatctgagagagagtacatataccttgcacctgtatctttgagatatgcagcatagtagcaactcctgatcaacaaccaagtctttgattcctttcgtccttcactcgggacgagcaaaggtccaagcttggggggttttgttgacggtcgttatagatcagttttgaccgtcaatattaccaaaatagaggagaactagtgatgcttgcaatgcataaatgtattagaataataaacttccactagtatttgcagggaatgacactaaagtggaggagatgctttggtgcgggtataatgtttgcatatgcaattactctatgtcatgtcgatgacattaaagtagtatctggtagtttagacgtggtgtctagattatgaggtatcattatttggggttata

SEQ ID NO: 7533 - DNA, 26067 bp, Oryza sativa
ctccaccatctcgctgctagcaattgtggcagttacctccatcaatgatcatgcagcaagaacgctctttgatgacgtacattgtttggacaatgtgtgtcagtgattttgctccgccttctccatttgtgcactgaggacacgctgcacaatgaggttctcatagtgctctgcatcattagccctaatatgctcttctggcggctcctcattatttgcatggtcagctgcaagcaaagcaagtgtatcctcatcgaaatcactagtagacaaatattcaccatcatttttgactaccaaaacatgcttgctagggtagtcacgctgcatgtgcccaaagcccttgcaatggtgacactgaacatctcttgttttacccgtggatgcaattgaagaagcactcgcggctagctaaacagcctttgtcgttgaacttgcaggagggccacgtggcttgttactggatggaggaggtgctgctcgactgggtgtgggtgtggaagatgaggaaggagtacggccggccggagaagtggtgcctgcctatcataatgtagatttacctgcacttccctttcagctttacaagcaagatgaaacaatcgagtcatattagtgtaatctttgtagtctacgatgtcataaatctcaccatttaaaccacccaaaaatctagccatagcagcgtcctcagtttcctctaaattacaacgaagcatgcccatttgtaattcctgataatattcccctatacttttcacaccctgtctcaattgttgcaacctattcaacaaatcacacgcaaagtaaggagcagatcatgcccgcatgacccgtttaaaagcatcccaagtttgtggcatgttattaggatttttcttgccatgttctattcaccaaaccgaagaaaaatcagtgaactaactagtaactttagaattctcaggaaaatcatgccatgcaaatttttggtcaacaacaatctcccaagaaaggtacgcatcgggatcatattttccatcaataggaggtatcttaaatttaattttagaaaaaaaaacatcatcattattgcgtaccttgcgttggcggtgaccacccatacctctatgattattgcgtagttgtcaacgatcaagagcatctcgatcatcttgtttagtgtcagcgtatattcatcctcaatgccgtcttcattacgtcgaccattacctctagcattgagatcatcaaaatgcctcacaagagcagcaaggctagtgttaatgcaagcgatcgatgtctccaaccctgtaagcttgatgttggtggcgatctgtgtggactccaattgtccattcttctcatttgtcacctgcaaatcagcatcaagtccttctttgtgctacttaacttgccttgtaaaatattttatgatgcctttggtgcgtggggaatgaaacgcaccctcctcatcattatcctctgaacatgccatggctaataaaacaaaggcaacaaaaacaacaaatgaggaaatataagccctacaactattgggatgtagcttttgcaagatgctcactctcagcctatcttacaagcccttaccaattcttaccttactcataggaggggacgtcaacccacaagtctgcaaccgtggaacgaggtgtatcggtgccgtagcaacaagacctatcaagttgtagtcaggtttgtggttgagttgtcaatgggctgaaagtaatgctcaagagaaaactagcaaccaagttagccaaatcaagttgaataatataatcgttcaaggtttgtacagtgctggtcacaggcccggtcctgtcaattcagtggcctggagcgaagctagaaaaatgggccctttaatacaactataataatataactatgtttctaataaatttaatgcataaaaaaacattcttataaaacaagttatatatcttaccttaaaattttcttctaacatgtaccgatgcgaagtcatcgacgatggcatcaatatcaatttcatctaatagtttcttctcgatgcataaagttgccaaaccatttaatctttcttgagacattacatgatttcactgtaaatttagaaaaaagtaagtaatttatgaaaattatgtcatactagattcaattcaacattataataaaaatgagtgctggcaaattacctagttgagaactaaagaaaataactattcactgccctagttgcacagctgcaccgcgactccgcgaggatccctaaatcctaaatcaaaatttcagaaatcagaagaggagcaattggggagtaacattttgcatcccaaaatttaaacatataaacttagcatacatcaaaggggagagcaatggggtacctcctggtctcctagaactgaacagagagtcagagagataagagatttgcatctggctaccggctgtcgtggtgccgctgacggcactgagcacgacaccggccgttgacgcatagccgcgcgcagtcgtcgacgtagctgaaacatggctggaacctgggagggtggcgaacagccgaacatgcgaagagtcaggcgattgcgagcgaaggcgaagcgatcggacggaatcacggaaggaagccaaatcgacgcaatttttttcctgtacatttgcttcttcctctcctgagctagtgggcttcttagttcctatgggctattatgtacagcatatatggggttgggccccttcacttcgtgggccctgtgtggaggcccagctcgacccccccgggccgggcctgactggtcctaggctagccgaagtagagacgtgagcctaaccacaaagaacatcacaagacacaaacctaaacaggaacgatgacagtggtgacaacaggaaatggcggaaggtgctgaggagagagatggaacttttatttttatttttttgatattttttcacagttaggagcacattggaaccaaccacataaattcttagctcaaacggacaaaatatgaagcatgtaaatttttttcaaagttctatctaaaggttttgcaaagcttctcgcctcaaaaacataattttgcaagtggaatttcgcgattttaattttgtcgagtgtggaatttggcgatgtaatttttttaggtagatgtccgtggatatattatgccaaatttcgagtccatatgaaaaagatacgactattttaagggagatcactcgaatcagggttctatttcctttaaggtagatcactcgaatcagggttctgtttcctttctggtggcagcaggctcaacgacaattaaactcaataaaaggaacatatcaaacacaaacagaaaggaatttggtggatggctgtgatggtgctgatgacgacaaaagtggtgatggcggcggtgatgaagatggcgatgtgcgtggtaagaacaagaaactctaatagactaagtgctaagaccaacaagttgacacaaccgatgcaatcgaaaactcaacaagccctaactaatctaattttttttggctttttctagactataggaaaaaaaataaacaacggagggtaaataatctctcactgatcaaccacgctctgataccacctgttgtgaacccgcgagggatttgtatcccaatctttcaataagaggcggagataactcgattggatgaagacgacgtttatggcccaactataaccgtccaaggacgttgcgccttagcaaccgatataccgtcaccaatggtcgtcacgaacttgtggtgcacgacaacccgacctagagggcactcgtatgccctgcaagcaatcgaagaacaagtagaactgctagatgaatatgaaagtttcactaggaaatcacaatatggcagggttccgaatagaagcagacgggcggtttcgccaacacgcgcgctgcaagcaggtagcaagttgctaactctgatcatcaaaaaccaattgttcttggcagtggctataaaggtataagaagagggggagaacaaccacatgggtgttggggttgtgctctaatcataggacgcgtccttaatggacccaacttgatacatagcctattgggcccaaataagttgacgcaatacctttgatagaaaaaggctcggtgataaagcgatgattgcggccactccagaattgatatggacatgaggccagatccatttcaaagtagacttgataagctttccatgaagtacttgcacgcccaaatcggagttcgtaggaagtcgtggcggtcgtcacaagttggagttgtcctgtagtttgaatccagcccgcgcgaatcctctcccttttgatcctctctatcattcctaagtaaaacaagagtgcacatgtctctgggggtataaataagatgaacatgaactcaagaatgaactcacctgatagttgagttgacgtgcacaagcgcaggtaatgttgatattgacgtgcacaagcgcaggtaatgttgatatttcttaacgacattactaggaaattaatcccaagcaatgttgccagagatattagacggtattcttatgggttatagaataaatcctcacggatataccactgtagcatttcaactggaaatatttccaagtatcgtatttatttaattccaagaaaagatatggtaagagagtactatgctataaattcatattacacttatataaaatcaaagtcttttgcaggagttaatcattttaggataaggataggttgacacacagaaggatcagtttagaatactcttgataattgataagtctaggctaagtggataaaaaaaaagaaaaatatcatttatgcacttctagtatatagtcattttagtatacatttgctattgtacaactttatggctaataccccctaactatgtcctcctaatatattgagaaaccaccccatattgccgaattccttactacaatccgtcatggctatccaaccggttaaagatatggaggagtacctgcaccaagaaccttcttagccctatatacgacgtggaggaatacccgtgctgagctatcaccatcagcggcctacctctacagatctgtggcatataacaccacttaataatatctaataatctaagcaccacacttacattactaaatattactctacacctctgcagatgacatagagcaaccatatgaatgaacactaagccaataccattgcatatctttggtaagctagccacatatttaatacgagtcaagtataaaccaaatttggtactcgaataattatacaagtatagtaaaggaccaaaactatataaagaaaaatatttcattaatggataaaatcttacaagagagggaagagatagtagaaccatacccgaattctccagaagacttgaagaactaaggaagactattctaattctgactctactagcactagagcaaaatatgtaaactaaaaagcttcttcacttgattccttgttggtgtgtgttggaatgaaggagatgaggtccttttatagcttgagaatgacggttggaggtgccaaaacaggtacaaccgtcattggaaggtcagtagtaaccgtcgttggcttgggcctaggccagcggagccaagcctgggtcggccgacgcctggcaggcctccctgggccagtccttccttctgaacgtctcctgatggatcctgggcccagtggtatggtggttggtcccatttgcaagtgtttcaataggtttgtgggcccatctatccatatgtctaccgcatgtcgacctctgattggtgattttccatcatttcttcttaatttatgaagtgatctcctgtatacaagtactttgtcaagtactagtggaaataggttatttctaaatgaatatgcatgcaagcatttctagttctccattatttccaacagtattgatggtcgaaattcgtctataatgaccgtcaacaggtaataggaccatgaggttgtagtcgtggagacgtggatgtatcgatggtgttgatgtcctcatcatgagagctcatggagctggagtcgccaccgggccgtcacacgagatccgccaccggggatgccgctcgagatccaccaccggtcggcagcgtagagatccaccactggggccgcctctcgaagcgaggaggaggatgactgtcacatcctgattttcgttttaggatttataaattatttaataaattattattagaatttatattaaatgttcattaatttacaagagaagttaaatgtgggaaataaaatttcctaaatataaagcatggacggatttattttttattaaattctccatggttaattatactctctggaattttctcggatttttcggagctcaattcctaattttaaccatacaaagaacatttcagtaattatccacatattaaattaatcattaaatggtctgattataattttgttaagtactttgagtgtccaagtattttcaggatttttcttgaaactatttgagcattggaagtatttttaacaattcaaagatcatttcagtgattattttaattggaaaaagtttttaaatcctctcctaagccgttgggctgatttcagcccaacatctctctccctcgcgcgcgtgctgtgcagcccaagtcggcccatccgagctcctcctctttctttctttgctttgttttcagccagcccaagacgaaaagtctaattctcctccctgctacagtgtcgtcttcaagcttggacagaagcccgagctgccgtcctgtgctctagccgacgccgcttcctccaccaaatccgccgcatcccgtgctccgtttgcaaaattagttgaggggaaatattcctcttatcctcctctatcctttcccccaagaatcggactttatcacgaagaaatcaacgcggaatcgaattcgttttcgagtttatctctccaactaaccctcggattttccggcttcgattcctctcggttggagtccgatctcttcaatccaagcctataaatagcatcccctagtcgtcctctttcgtttgccccatgtcccgagctctctcgtgccccgtagtgccgccgccgcgccacccaaaccgccgccgtcgccgccggcgaacagccgcctcgcgccgtcgttttagccgccgccgccgcctcctcacgtcgccgtcgggtgcgcgtggaagaggggaagctcggccgccccttcgccgtcaccaccggtcaccggagagccgccgccgccgcacaagctcgtcgccggtcgtcgttcgtcgcattggttagtaccggtgagatcgcgttgttctcctctacgcgtaggtaccctccaaaagtccggccgagtcttctagcgccggcgaggtcgtcgctgatgtcgagtcgacattgatgatgtcagcgatgacgtcattaatcccttttcttagttttctctattagatgaaaatcgattaaacttcggaaattaataactaaatcatcgtacctcggattcgagtggttcaagttgctaaatttttctaaaatcaagatctacatgttaaaaatatccacatgtactggttatgcttgtttttgtactattttgttgattttgttctttcgttttagtttccgacgttccggaggagagcgttttcgttgaggaaggttcggaagtgtttgcggaagctcaaggcaagtcacaaagatcccaaacaaccctttgagcatgttgaacccgtttaaagctattgtttgatttcaacttatgcattattttcgaatgtcatcgggtggtgagcctttcacaattaattaatggccgaagatggctttattttcctatgggttataatttgattagctagaaccttatatattggtttgggttcagctaaatgctatatatatataattgcttagccatgcttagaaacattagcacatgattgggataactaatgttacactatcacttatggttatatttaatggtagctcacgatggtcaatcgtgattggttaattaattattgccaattaaaatttgtcaatggtgggttgtgagcacatggttgtgaaggtcgtgctcatggcaattaaggaccgattcgcgagctactgttgtaaaacattaaccgtgccaaccacaagccagcataggcaacggctttaccttttgtatagcatgattcattgcggggcaccagactgagaagcggcgagaagtccgtgggggtcgctggggagtccatgcctctggttgtatttatagagggggtgattatgatccaggtatggtgcactgtggtgagttgtgttgtgcagagggtattgtcatagcctctattcgggtactttccagtatcgcgacgcatggtagacatgatgttgaggctgtgtcttgtaggtacagtggtacacctctggccagagtaaaactattcgaatagccgtgcccgcggttatgggcgagttgagcaatgtttttcgtgattagtctcacacatctcacaataattattgatgctataattggtaataatttgcttagctcctggtttggagttagatttgtacagccggggttggttgttcaggtttggttgggcctgtacagcattggggtgctgttcagtgttgattaaaattgatgattaattactctattgttttactactcttaaatctttgctaaatgctgcttttacaaatgagcctatattatgccatcctttggtatccttgtgcacttgcatatttgctgtgtggcttgttgagtatgtcatatgcttattcttgcaataatcaatcaacctcaattgaagaaaagggatccagaaggagaagacgtttggcttataccccagttgagctgcctgtgggaatggagctgaagtcatcgctagaccgttatttccgctgctgttttcttttcttttgtaagtatgtaacgttattattatgatggatttgtatattaaattgtcagtttgtgtacctcggctgattcctggacgagggttttatgcacaaataagttcggaaattactagtgaatttccggacgtggcaacgaccacgagtgggcctgccgctgctctactcgccgcttgccagagatgagcccgaggatgccgtcgatgctccacgtcgcgatggccccgacgttgctccacttggtgcttgccggagacgagactgccccgcccacactgtcggccttgatccacgtaggagaaagccaaccttgttttgcgccgtcggagttcaattcgctgatgccggagttcggtcccgccgccgaagctccaccgccaccgagcttggttgcatcattggaacttgatttgccgctggaggggaggggatggatggggaacgggagagggtagacggagatgggtggcgccgacggagatggagaggagagtaggcgatgaagctgggggcgatgttggtgaggcggcgaagatggagaggcgtcggcgtcttcgttgggacttgggaggggatgaggattaaatgcaattgggagcgagagaacggggtgagggggaggaaaaagtaagggatggctgacaagtgggtcagtgggcaggcatgattatgtgtgtagatcttttttttttgttgcagggtctgaaatataaaaaattggatggtttgttaatacaaaatataggaagggctgacatagaagaatttaagggctgagatgaaaaaaagttgttaggtggagcctccattgtggagctagtgtccatataggaacctcatcctatgtggcatagcgaggcatgattttgagtagattgtactgctattgtccttagggaatccacaatgtgagccacttctagagtgctgtagaggaactcagctcggaatggaggatacccctggatgggctcctcaaaatctgaaacaacttaatagagacactccaacccacaataggtatcacagcctacaaagccccatatttatttttactatcctacccctaatctctctctctcttgccccctcctttttttcgccaccgcactcgcctctccctctcgccgccgcctccaactcaggcccagcgcaccgctgcggtggccgacggcaagcggcgagaggcgggtggcatcctccctggccttctccgtcacgccatcgtcgccacccaccccagctctctctctctccggtggcggccgcaagggcgacgagtaggaccaccctcgccgccggagctttgtcgacgagggcgacgaggagagccgcctactccgccgcgaacccgttgcctccgccggggatccgccgttgccgccgctcgccgcgcgctctctctctctcgtcgctgctatttccggccgtagctcgagatcccgccgctccctctgccgatggctaagacgagcccggcagacggctgccgcacggtggccgactccgcccaccgcctctctctctcccgctagcagaggctgaggagacggcgcacctcggcggtgcccgaggaggagctcggctcagcggggtaggccgtctcgcgatgagaacggaggagaggagagagagggggagaggggtggaaggggaatatggtggtggagagacagtcgcctgaggcgtctgtcgccgcagcgcgtgcctctagcccgttccctagccgaaaaggaggaggcgcgtctcccaagcaggggtcgcgcgccatcaccagggcatggctcgaacggaaaagcgaacggccgtcgctggggcgggttgaagacacattgtagatggccttattcacccagtgaatagctaggagtaatttagaattatatatttgagaccaaaatatgatagcagaattagcggcgaggtccgaccttggaagtgagctgtttacacggtacagaccagtgacaccggatagtaggggaggcagtttgagacgttggatgcatttcaagggtggattttggggcactggacgcaagtcaatagtatccgagtgcagtacggcgtaggtggcctccgagtcgtcgcgcccggcctagggaaattgatctcccccgcatccccgtcccctcggcctcgactgcccacccgccgcctgcgccgatctccatctcgcgagggcgagtagcagcctgctgcttctgccgcatcctcgcaggccggtgagcaccctgctcgcgtcatcctctttttaatcccttatcttctctcctagatctggaagcttttctctccgccttagttccacaaacaatagatttgggggttcaactgaaccccatcatgcccccggttaggtcaaagattctgtctttggcgaattgggaggtgaattcatgggtgagccgacgagcttcgtcgtgatttcctattcaatttggggatcttctcgctgtttgacgtattggccgtatggcatatgcagaagtcgatgtgaattcattgcttctccaccttttacaacgatatcttgtgggctagattttttgtcgggctgggactagcttgtgtgtattcttgattttgtcttcaaagatgttatcctaaaggggtggacaaactgctttgcttttgtcgagaaatttggtcagtttattaactgggagttggttgaaattacacccaaagtctgccaacttttagtgagcgcagtttgtagaatctattatttacttggtcaagaagattgtgcctatacataaatagttactgctagttgagaaatcttttctacattcagttaagcttggatttggatgagatattacaatcttctgccaacaaaagacatagttttcagcatgttgtttttgttgtaaccagaatttctatactgtgaagatgtatgtacaacagaaaatttctcttatgccgcaaagctgcatgccatactcttatttgccacatgatttgttggctttgtaaaaatgccacaaagttcagttgtatactcgtttatctgccacactttaccattttaacccaccaaatgtgcaattttcccttcttctgcaccctctttctctcttctatgagtttgtgaatggagcttggccgcacgggctggtgcccactgtgtttggcccaacagaaaattatatcttaaaaatgtatgtctctctatgggcttttacacccaggcctaggacctaggtccgccactgcggccgggagcagggcgcgtggaactggctttcaggaggaaagccgtgcgcggagtaggtgggctgcacagagccagttgctgagggcaggacgcatattgttgtgctgctggcggccagaggcggaggtaatgctaaggttgaagctggctactggagctagggtgtcatagctcatgccgagctcaggtgcacggagatggcgtgcgcgttggacatgcaggagtggggcgtcggacgtgcaggagtgggctggctgccaggtctggctcaaactttggccggacagagctaggtctgtccttgctggacacagagaagaagggtggggataggacaaaaatggagaaggagaagaaggtgggcattaatttggaatttcacactgtattgtggtaaaagaatgaattggtactcaattttgtggcattttagtaaaggcttcaaacttttgttcaaaatgagagttttcgcatccaactttgtggcataagagcattattctctttgtataatggaataccgttaacttgtctcaggtgcaattgttattaagcagaacccaagggccgtgtaccacatccttgaaattgtgtattgtctgcttctaaccggaaaggcaatacatgcgaaaactttcaatgggtaatgtgtagttgcacattgatatatgggaaaaacatgcagtggatattaaacatgggaaaactatcgcataaatttctaaaatatctcacatacaggaaggttatattagacaaccatataaaatttcaggacatatgaaattgataaacagtgaggaaaaaaagagtattctttatttgtgtttttttctttgctatttgtaaacttaatatctcacaaacaaagttgagttttatcttgaattttgtatgcccatctaatttcatatagctatcattgagttctttttttcaaataaaactctttttgagaacttatattctgtggtttacatgtttccgacctagttaaacatttcaccatgtatttacactggatatctcggaaatctcacatcgtactcctatatccacattgtctcatgtatagttgtcgatagatcccatccatacaatgctccacattgcatggcaacagatcagaatgtctgatgtttgcacttcagagaacacaaacaacaatttaattggcacataagagggcacaaacaacaatgaactgaaatgaacagacaaatcagtaattgcaagatgtttgcatagaaatcttgaaatgcaactgataagtgattatggttacaaattggaccatgcaagtaggctttagaatttctaagctctgctcagtgctattttccttttattagtgcattgaggcggatcaaactcatctacatttttggtaaggttttggaatttagactttggaattcaaactcatcagcacacattgatttcctctggagtatagacgcttcaatgccggatatcgtcttccattaggagtacatgttcaaaagattcaatctcgtggaattcacatgtctgtacaggttctgaacaaaagagttttaaatggaaggaaatgtaatgaatataactgcacacagcattttgatgaatataaatcagtatccgtgactcttgattagttatggataaaattgaaataggtcatcttatggatttcttttaaagtaaaatcatcagatgattagcattttaatgatgatgacatggcttaatatgatggctcatgttatactcaaaaatataggggagagattttctgggatggaatacattagtatcttgttataccatgtatgttaatttgattaaaaaatatcatcttcatcaatataatttattttcctttgtggctatgagaaacttttttaacatttctgttaatttcgttctctgccaattgagggaaagggaggtaaaaatgttcacagtagcatggtgaatgcaactgtagcaagctatcaaaggaatagatcatgtaaaacatgcacaatttagctataatctgtacatattggcttaaatttacattcataatgttcgttgctcagtatgtggattcatattgtagatatttttattatatacataaatttcatggttctgcaggctgttcagcacaagcaattcggaagttctgtctgaaactacactgaagattttggagggtccttaagcaggttttttcaaacatactgatggatggggaatcccagacgagtaaattatcatgtgagcacatgtactcttggtacttcaccagggaagaactggagaaattttccccatctaggaaagatggtattactgagataatggagtcagaaattcggcagttgtactgttcattcattcgggatgttggcattagactgaaactgtatgtgccaatttccttgttgagtgtaccttttaatgtcagtatagctcacttttcaaacttatatgttggttttacggctagtttgtgcccttagttagcacacaataatttcttttattctggaagtttgctaagcttgttacctattttaacatttttctttcagaccacagatgactatagcaacagcaataatgttctgccatcgcttctatctgtaccagtcccttgccaaaaacggatggcaggtaaggagcttttttttttaatttatctcttttgttgtggtgggttggtgtcttttagaaaaagcatttttctgaaagaatgttttagaaaagcaattggatacaatcttctctttaaaaaatatttactggcaaaggttctcaaggaacatatataacccttgcatattttttatacttgatcagttcatatactctttgcaacttgtgcttaactttccgatctattatcggttgtacaataaatatgaagctgcataataacactaacatttaatcttgtattgcttattaagtgcatggcgatgttacagtgccattaggtgatttagaaattcaattccaaagggatctacttgtgccaatcagtaatcctatattgtaattccttacttttttactgtgctgtaaagttttgatatagtctgatttatggttgatttgcttgggatgtttggaagatacaatagtattgagatgtattgtacaatacaatagaacatcctttttgaggacaagtctgttcagcattcctgttgaagttacactattgccattagccaacaggaatacagcttacaatcctgttattagaagctaaaatactataactgaccatctaataagtataaatcctccagtaagttttatagatttgattcgcctcaccacattcactgtattcctgtcatgcggttatttaattgagaaacacattcttgtctctgcaattaatctggagttgtgctcgttatctgcacttgcagatgttacttgctgacatgtttcttcattgctcaagaaaagaaaaaaaaagctgtgcatgtgatgcaagctgtctataactaaatactattacaagtaattggtgtttattttatttgcttattgtcattccagagccaatagctttacttgttttttattgcagacgattgcaacagtgtgcatatttctggcttcaaaagttgaagatacaccttgtcctctggaccaagtaattagagtggcctatggaacaatgtacaggagggacccagctacagctcgaagaatccaccagaaggtatagttggatcattaattgagttttcagtatatatgtaccatccagttaatggttgacaagtagtatctatcaacaggatgtatttgagaagcagaaagcactaattttgaccggggagagattagtccttacaactgttcggtttgatttcaacatccaacatccttacagaccactacttgatgctatggaaaaacttgggatctctcagaaggaagtgaaacaagtagcttggaactttgtaaatgattggtatgagatgtgacatatcactttgtgacattattgttttgatgcttcattcattcaactgatcaatctggatgtattcattctgttgctcgtaggcttaaaacaacactgtgcctacagtataagccccaatacatagctgctggttcgctctacctggctgctaagtttcagaacgtcaagcttcctgtgcatggagggcatgtttggtggcaccaatttgatgttgccccaaaacctttggaaggtatgtagactactaagctgaaacataatagtaccttgtgtattcttggtatttacagtaagagactaagagttacactgctatagctgtccttcagcaaatgagggagatggttcacatgaaagcaaagctgtttgctcatcccagtccggctaagcaaaaggaagttctttttgaaggaatgctgctcatatcaaatagcccagattctgtgttgactcaatctagcttgtcagtaagcagctcgagtcctgaaattggagaccccaatgaccacctgcaggtggattcaagtcaagacatagtgcatattgaggatcgtagcaagtcatatcctgaaaggaatttatcgaatcttactgctgatatgaataatcccggtaaaacacacaataaagaaagcttggatcaggccttaaaaatcaaacatggtggactgatctcatgtaatcagcagataccattagatgcaattgcaaagattgatagcagcactgctaaatgcgtggaacagaatattggcatttgttgcagctcaagtaacacattcaatggcaaaatcttgaacccgttctcaataagtcagcgaagtggtgataaaacaaagttatgctcagagggtggatcatcgcttacagatgtggacagcaaaagcactcaatctgtcgaaccgcccactacaatttgtaaccataccagtgacagtctcaatgtggacagtttgtgctctgatcagagactggctaattccactgcaggtaccacggagaaggcatcatttgtattgcctgtccagataaaggttgatcatttgtgtgtggagcgtaaaaaggtagatgtggcacggataaaggatttgttgatgaagaggaagagacgaagagaaagacaagggcggtgcattccttcagttgacctaagtgaagaagcctggattgagagagaacttgagtctggtatagtttttaaaaaagttgaccatgttgttgcatcgtatgatttaagtgatgaaggctggattgagagagaactggaatctggaattgttattggacaaaaaaatgaccagcctgtatctttagatggtttgactgaagatgattggattgagagagagcttgagtctgggattatagttgaaccaggaccagctggtaagaagctaaagtcaaagcttctttcagagggtcatgagataatgaatagcaggtgggaaataaatggcaaatcaatgcaaaatcaagtcacatagaatatgagatatccatacagataggagcaccattgtttactcgtgttctttatttgattgaattaactatacacctcgtgtacttgaaatgctaggggtgtgcatgggaaagatttttgttctttgtataactagtaacagtgggaattcacaatttcaatctttaggttgtaggtgcaactgtacaataattaagtgtaaatgtacaatccgtccttgttagcagctaatccttcattgtaaactgtacctgtcatcaaaacgaaaataatgttctggtgtaccgggaagctttttttttttttttttaaatctgcaacgacgatttcttattactgaaattcagtgagatcacgaatcaccaggaaccttacaaattctgggatggggtcaacccaaacaaacgattgacccgggttccaactcacccaaatgagcaagttcgtgagcaactttattacaagaacgaggcgcaaaagagacctcaaagctagcaaactgaaactggagaagcgtttttatttccgtgaagattgtagcaccagtggctaggtcatgcgatgaggacttaatcgccaaagccagtatggccgagtcagtctcaatttccacagcagatacaccttggaccgagatggttaacagagctaccaagcatgcccttgcttcagcagaaatagcatcattgacgaattcgatgcgcccagcacccgcaaacaaaagcatgaccctcatcgttgcgcaaaacaaaaccccatccatctgttttgcgatccgcttgaaatgcaccatcaatattaagtttgtaaactcaagctaaacgtatgctataactttgttggagtagaagttggccacattaatgaatcaatcagaaagctacagttttgttgtttccattattaaactgtggggttcgtaagcctgatggctgtgctatgttcagctcatggaatagcattccttgtgcccgttgaacaactagatgttgtggagcgcctagggttgctaataccttttgtttgattatctttttatatcttttgtccgatcatatgtttataccttttatcctactatgtagtaatcataaatacatgtttatgtgctatatgtagaatgcaggacattgaacacacttcatatatatttcatatatagatatatcttggtttccgtaaggaactagaaactaaccacggctttgccgcgcattagtatatataggctagctcaattggatggacccaatgcactgttaattatgaagtcaggtaaataagaattgatcataactaaatatgtatatccaaaacaaaaaaaagggctacataatcacaaaattttacattcaacttacccgataatctagttttacataccatcaaactaagttgcttttgttactgacaatgagagatcaactttgtttctccttataaaaagaatatgaggttcatatcaaataggtaaaatttgcaacaggacatctgaaaaacgtgtaattagctaggggacatcgtaagaacgtgtatttgctgtagggcatcgtaaaaaactggtaattagccgctggacactggtgggattattttattatttttggaggaataggagagagaaacaatcattaaagactagtttacccttggctcaagttaatccaacgtgggccgctaaacattttctttagttagtcttcactaatcacgggcttaaacacatcttacattctcatcaccaagcaaagagcaagagaggagaagaaacgatggtggatgtgaagcacacggtctcatttttacaggatcaaactctcactctcacaatctctgaaccttttgtcgaatatatgaatagttaactgaagaacagagtagaacgagcagagttttggcacagcgaagtaccctgctgcttttctggtttcctaattattctcctcaattacagagtttgttacatgcataacagaaaaaacacccgattgatctggatccactactgaccgtgccatcccacgatccaattcagtccaaccgaaaaactagctagaaaacagctacatgctaactggaagtaaaacggctgctgacagattctaacacagccaaccatatgcaatgcaactacagaaactagatgcacaagattgcattatttagctaacatcgcaggccgccgctgactgctcgttcggcaccgcgttcgcgccaatggtcgccgtcggctactgatgagtggctgagcgcgttcatgtctacatcaccgtgctgggcatgaaggacatgaagccatggagcagtagcaccggcgacagtgggcgagcgaaggaggagcggcaacggcaggcgagcctgggaggagcagcgacagcaagcgagcgcggtgggcggagcagcgacagtgggcgagcataggaggagcggcggcggccgcgggcgaggttgaaggcgacggttgagagcagagagagagagagagagagagagagaacgagagagggagaaaaggataaggaagaaaaaagaaaaagaaaaaaaaatcaaagggtagatctgtacttacacagctgtttctctctccaattcttccggatataataaaataatcccgagggtgtccagtagctaattaccagttttttacggtgccctatagcaaaaacgcgttcttgcggtgtctcttagctaattacacgtttttttggatgtcctatagcaaattttgcctgtcaaatatgttttccttacaaagatattgtatgatcaatactttcagattagcatcaatgatgaaataaggagatttaactatttgtaatgaatagaaagtaagacaatattttcagtgaggataataatataacttatcaccgaatccaccgtcttgtgatatctcatttaccacagccttgtttggcatgagcattgctctctcactgaattgtacagtggttaaagtcccagttctgcacctgcatttctcagtcccagcactctatgtcaacttaagaaaatgtaaataaggtcatgaacagaaaaaacatgtgttctgaagaaacggaacataacaatgtagctccttgaatttgagctatggtagactttaattcagattttaatatctaaaggataaggcagtgactcggttatcagaatataacatgaaacaaataattttgagagagcataatacaagtatatgtgatctaaaagaaatgcagcttgttatcaagacaaagttctttgtgactatagggtagcccaagcagaagttctggttgtgatcttcgttcatgcagaggtgaaaatggaaagcaaagaaactctagttttaaaagcaaaatagaaagggcaatttctttctgctgttcttataggtcaaaattgtcccactgatgtgagcatagtagaaacgatttcttggggttagttttgctagattactccgtgccataaaaaagataaagaagattttataaacaactagacaaatgtccataaaattagcatcaggtaagcaaaaggttttggatcttaacgaacaatcatgtaaataacttatataactgctaactttttttaactaatgctaactaaatttaagctcaaaatgccttactatgttttctttttctctctttctttttttttttccttttgcagattagtgcagcagctacctgaccataggtgaacgcatcgctgctaacaaagtatacagataatgaaatgatttggaggtcatttaatcgatatctgattgacgtcctcaaccattgacacatactcatcagattataatatacatgaaggttacgggtcattaatctgctgattgtatgcatggaaagcatgaagcatcatgtcagatatggaaaccttgctaataaattaattgaattcagaaaaaaaaatctagatgcatttttccagttcaattaagaaagtgtagatgagtcagtattcacctaaagaaacgagtaccggaattgataacttgtgtgtatctccggtgagctttattgcctctttgccagagaataaacaaaattgaggatgacggtggatgaaaggctgccgccgtctagctcgttcctccacagcgaggtcagggagaaggaggcctaaagatgagcaggaataaagggagaaaacctgcagcagctgtggattaaccagagaccgtcgggggtggtcgactggagcatctcgctgaggaggatgtcgtcgtcgtcgtgtcgtcgacagtgtcgccgctcagcccgtgcatgtcgtccgaggggagcccagaatagggatgggcaggaggcagcgtcggcgctcgttctgcccggatctggcgcccttgagctcgtccgatgagggactggtggcgtggcttggatggtgcagcggtgacgtctgaaggggatggataggaggcggtgatggggaggagaaggttgccgtggtgcctggcatgggaaggagatcaggagaaggatgcagcggcggccggcagcaataggaggcggagcgatgaggaggggaggcggcggcgtttcgggatggcggataggcgggcgagaattttcagaatatgccatcgaatacgcaatgcttttaggatttaccatttaatttgtgctactttcagaatacgctatcggagtgcgaattttcttcgttcggtgccattccgtacccccaacgtcaatcacaccgtcatcgtccatctcccggcgccgccgacgtcagttcgccacctcccgcgctcgcgggcgtcacgccgtcgtccgtccgccgccgcccgctctcatgtgcgccacgcagtcgtccgtccgcccggcgccgccgtcgtcagtccgccaccgcctgtacccgcgtcagccgcgccgttgtccgttcgccgccgccatcgtcgtcgtcctccgcagcttcagggcaagcaagcgcggccaccgcgcgtgtttggggcggagctccgcatgtggggcgcggcgatgctccagggctgagcccggagctgcgtcaagatggcgacgatatgacgcgggctcctcgttgcctggattggtgtcgtcgatgccctggacgtcgacacgacgatgcgaccaccaaggccgtagaggccatcgccgtcgaggcctcatgccgcgaccgtgagaacacctcggttttaatcaccggggaaaaaaaggagtggctgtgtggggaacaagtagaagaaaaggaagctgaaaagaccaagcaagcaagcaacaaggagtctcctgcttgcttatgcgtgatattttgcattttaaggttgatgcttcgttctgggaaaaaaatatagcgatttgtgaatgttttcagtctaagattctggatggtgccattttgttttgagctcacacgtttcacccacccatcattctcaagttcgtcttgctgctatgtttgcatggtttctcctctcgaaataccaaaaaaagagagaaaagattgttgtctttgattcataagaacgaatgtttcctgaatattgagtaaggaaagagaatctgcttaaacggctttgtggcggagctggcgagcaggcagaggccgccacatacgacaacgtcgacgagctgttggtgaggacgacgacggggcggctgatggtgggcgacgacgacggccaagctgatggtagatgacgatgagggcggcgccgggcggacggatgactgcgtggcgcacgcgagggcgggcggcggaggacggacgacggcgtgccgcacgcgagcgcgcgaggtgacgaactgacgtcggcagcgccgggagctggatgacgacggtgtgaataacgttgggggacggaatggcacggaatgaagaaaattcgtactccgatgtgacgtattctgaaagtagcacgaatttggtggtaaatcttgaaagcggtgcatatttggtggtatattctgaaaattttcccggcgtgtgagctggtgacaccgccggactgacctcttggtgctaggtggcaaacgacaagataggggaagcctcgaggttggacctgacgcaaccaccaacgtcggaggagagtggagaagagccgagaggagtaggaaggcgacgacggtgacgatggagcgaggcaccggcaatgccacaaaagaaagagtaggggccggtgttggcagcagcaggggcctgggaggtaaggagcggagcgaaggagggaggagtgcgaggcgaggagctcaccggagcccaataacctcaccgccttgggaaaggaaggggatgaaagagacgtggggagaaatgaaaaagaagggcaagatggccattttgttcttagatcgggtgacatggcctcttgcgggctcaaaaatgacacacgagcaagaaatcctctctatccgatggcagaacagcgaagttatccgagagagtggcatttgagaacacgccatccgggagagtggcaaatagtccaaaaccccctccctccttgccatagaggccgtcagtgacggcgacagttgctgagccggctagggcgtgcacgaggcgcgttaccctctgcctccttcctagctggagccgttggtgagggcgagctggaagtggcggaagctagaactggccggatctggacctacaactcgacaccggcgatggagatgaatgcacgttaaggctgccgctaaaccaagccacaaatgaggagattacagtgaaggcaatctggcaatgcgagtggagcaccttgcaagcaaatgaagaaaatacctagaagtgaaatgtcttttgtagttgctatgtcagtcatttggcaaaatgctgggatactggtttattctatagtttgacagaattagttcctttagctagcttgcaatttttagttgcagacttggcataagtgatgggatggcatcactgacactgagtaagctgtttttatcttctttttccctttacctttcatgctggatataacgagcctcgatatacttgtactaatgaaactaggaggggttagacctcaatactattatactattaatatgtgatcctacttgtcgtacacacaatatatcttaaagtctgtgttatagctggctataaatttgtagaacgttgctcttctctctcctcttttatccttttgaaatatgtttataaccgacttatagtctactattgtatctcctctaagatatacaccgtcaacagcaagttctaatcagtgaatccaccggcagctatacaaacatcagaacacaagaaggaaaaaagcagcagcaacctaatgaagtggtaaatgctgcattcaaacggcagaagaaaaaggaaaaggagcacgtgtcacgccttgaaacccccaacacagccttgcaaaccgactggatatgaggaatctttatctcttataccgatttctgggtccgatcccttagcgttgattgggccacgtggctaaacctggaagcaattttacatatgataaaatcgcgccacgtgtcctatcccgtaacacggccccacacagggaggaaggttggaggagagagaccccgagctagaggaagaagaagggcaagatggtcattttgccctcggatcaggtgacgtggtgctttgcgggctcaaaaatggcacacgagcaagaaatcttctctctccaatgaaaaaaatagcgaagtcatccgggagagtggcatttaagaacacgccatccgggagagtggcaagcagtccaaaaccttgatttttatggatctcgattctcgagcgacgagaggttgctggcaacaatgggagcaaggtgaagcgccagcgacaccgcgtggccggccaatggtgagcaccaacgataagcttgcagtttctgataatttttagtgtagcagagctattaggccattcacaatgggtctacatggcattcagtctcaacccctaaaagcgaatattccttgccacatcatccaaccgcgtggctttctcaagtccgagtagccaactttggctatgagttcctgctctcaggcgggccccacactcattgctacaggaaagaggggcgaggggcgaggcagccaacggggagaggagcggcggcgccgcggggcaggtcgccggcgagctcgatctgcaaccggcaccgtcgctactagggccacccgatgttgtcgtcgctgctcgggccgtccctccacccggcgcctccgtcgggacggggtcgacgttgttgccgctgctcggtacggggggcgccagatctgagtgctggtaggagaggaggcggcggggtcgtcgccgctgcatgccgccggtgggaggagaggagggggcgggggctggggggtcgtcgccgtgtgccgcctcgtcgtcccagcgccggcgctgccctcgccgccgcgctctgccgacgggtgtcgaaacaaggattcggcca

SEQ ID NO: 7534 - DNA, 17023 bp, Oryza sativa
gcctcatccctcgccgctagcctcctccacagtcgccgcctcgcctcgctggagcagcgtgagctcccgttgccgccaccgcctcgcctcgcctcctctgttgcaccctgccaccgctcgccgcctcatcccctgccgctcgcctcctccgccgctgccgcctcgcctcgcttgagcagcgcgagctcccgccgccgctcgcctcctccgccgccgccgcctccgcacccaccaccgctcatcgcctcatcccccgccgccgccgctcgccgcccgcctgctgctgtgcgcgtgagatagagagagagaggagagagagaggaagagtgaaagagaagagagagaggggggaatagtggaataggagtatgataggtgggtcccacattttttaaataaataaattgctgactggactgccatgcgtacgccacgtagatcaaaaccaccgtggattggatcaaggggggtaattcatccggtttgcatagttaggggtgaagaatgtccggttttgtagttagggggtaattcggactaccgcaatagtttaggggggtaattcgtactttttcctttagaaattatactgggcccttagctttctcctcagcaatggtcgtatctaccactgatctgatcatacccgtcaatgtattgactagcacaccagattaattaatcaaatgcatgatgcacagctaagtcaatgtgaccttccagagttggcttgtattcttctttatctccatcaccttcagacttcttatctatcttttcttcaacaagctttgggaactcgactttattcttctgaatcagcttcccttgccgagtcatactataagaactgagatacatccgctgcatatgttgaacaagcttctctctgctttcttttcatcagacaagtgctcaatagtgacggggatgatgttgtcgtcggtgatttcaatgagagatggcggcatgatgaatggtgaagtggtcccaccgggcgcgctaaaagagtgttgatgagaaacacaacggtctgggagatttctttcactcctatgctggttcaaggcttgcctcaagtatcaagaaagacaataaacgtaattagatgaacgatacccgatcggccaatagagccgataacgtatcatcaagacccagccgataagttaaatcaaatcggttgcggttttgagatggatacgtaaagcaaaaagtctgaatatgtcctatcggctgtaatactatgtcttttgtttttatcaatcacttttagatagcattatagaaatagccaatgatccaatatttagagcgagaatatataataatccaatacaaacttatataaacaggttaatctagataaatgtatcaaataataatctatcaccagatataatagattagttgagatcaatcagacttgatatatttatacagagtgatctatctatataagtggcaaatatagataaaacagattatgaaatatgcattattatgtatattaggtaagatcagctgaaactccgatgctatccttagttatgattaattccaggctagtttatagggttcgagacaagactagggttgttgcaactcaaagtatgttaagaaacctaaagtctaaacaatcaagaaattaaccacttgttaggatggtaaatacgttagctaatctaatacagtaaagcaatttagcttataccagcataaaccctaaagtgagaatcagccgatatgactaaatcgaaatactaaactagattaactaagatatatgataaatgatgaccacggtaaaaaggctaaaatcgacataatagccctgatagtgcaagccatcaagacaagttacctcttgtcgagatatcgcagccaatacccgactcgaagccagaactcatcgaaaaagtaaaaaaaaaagtggcgatgcgccgaaagttgtattgattggattctcgtcccttattacaatgatctagagtttatattcataccccaagtacaaaacttgtccattatgggcttgactcaaactttcccatggataaaaacaacaaataagtccatacgatggactcttaccatatctcaaattcaaactgtcattaatatcctaattaatagatacatttgccttaaatgagttccatctttatatcgcaatattggttatctcgtggcccaaaccgaacccaagtctaactgtatcggctgctttccatatcggctcaatcaaactccgactctattttcagctgatacgctgtcagttgatgcgcaatctgttagaactatatacgatatgctccctccattctaaaattagttgatctctaggatttaaactttctcaagaatagttcgataaattcctacaatcctatctacccttatcagcaaattaaattcaatattacttaccactcaccaccaataatattttttccattaataaaattgtcactggatacaaggaatacttctattttgtgatatagagggagtagaaagtacacaccaatagttgataccccttgcttggttggtgttctatgcacgcatgatgcatatacataggttgtgaaatgtattggagaacaacccaagtgcaacctcatattcctttacattcatataaccgcagcatacatatagatacaaaaactagagaaccagtcagaaaacaaaactagagcataaatacttctcacaaatacacaacgtaagaaattaacccgaaaaagggaaaggaaatataccacccttcagttttctcttccctcttaagcttacagttatcatctccactgccacgtcagcaggacgtaataatatataaacgagataaaacagtcatatgtgttatagatcaagcaattttttccttttatttgataaggattacctaatgttggcttttctttttcagtaagccaccgaatttcttcatcaaagccttcttttgctggttctgcttgactaccaatttggtgttactgttggtcttctctgtggacaacctactgccattgccatcagcagcaatgtctctgtctgtgtccaacagatcaacttccggttcaccgtcgtccctctccttagataagttgtagctgttctcccacatcttagaaactagcaaaactggcccatctttctccgtgtttccctcgtcatttcctatcagagaatacaagtccttgattttctctgaaccagatgattctttgacatgcagatgcaggccatcattctctttgtacgcttttgtgtctttgcctcctctgtaattattatccttgtccatcagagcttccagttctcttaccttctcctctagttgagcatttctgttctccatgtctcttgccgtctctagtgctttacccaaccgagttctcattgacatgatctcttcttctgattttgtgatagagctaacaaagctaagctctttggatcgccactcctcagatgtggtcttggcttctgcttccagctgttccaccttattcttcaagcagatcctctcgtagtttgcttcatcaagcattacctcatagttatccctggtgttgttgaggctgatgttgagctcttgtaattttgccctggtgtgctcgatctctttttctttgtgcaggtaattctcctgtgactctcttgcctcagcagacatctcttgcaatgcagaggccatatcctccattgcttttctaactttctcgcattcatatttgctagattctagttccttagctagcttatccttctcttcacatatggcctcaatttgggagcttgtaaagcttccatccttgatagtacccctcttctcttgttccatcgcgccaagccttgacctaagctcctggatctctgtccttaaggctaatgctcctctctgcgcggcatcgacgcgctgacctgatgcattgatatcttcattctgcctcaccacttcatgttccaaggactctatcttgtcgtgaagaagagcaatttgagactcttttacctgcaacaaagcattcgccgcatccaattccttcatcaccgaactcatggattcagccttgaggatgctggactggttggctagctccagtttgatctcaaaaagttgagccttcttcttccattcaccaaccaatccatctgcttctctcctggccttgatggcattggcaacatcagctctgagaccttcaacggcaccttccaattcagccaccttctcttcggcaaccttggctttcttgagcttgatccttagtaccgacgtctcggcctccagcttcctggttttctcagcggattcttttaccttgctctctagctcagaattaaacgaatccttgagtcggttgatttccgcgttgaggagctccacctgggcggcgttcgcctcgccggctctgatggcgtcatcggcgtggctgagcgccaggttcttggcgtcaatagcgtcagccagttctagcctcgcctcctccagctgcgctaccatggaccgcagcgccgcggcgtcggcctcctgctggcgccgcgttgcctccagcctccgctggagctcatccttcctctgcgtggactcgatggtagtctgctccagctcgatggctcggaacatctcggtctcggaggcttcctccgccttcttgagctcggcgagggcgtaccggagcttggcattggcctcatcggccgtcctcctggcgtcgtcggcgaccttacgatgctccgtctccttctttgccagctgttcctttgccctcctgagatcctcctggatcgccgcgagctgttccatggactgcttcttcacggcagtcctgtgcttctgcagccagcaattcaattcaattccagtgggcgcaggacaggagtcgctcaaaaaaaatttacaaccaaacaaacatctctcaagaatctaagcaagcagtaaagatgatcaatggaccgtacctcggcagaaggcagtgtactgatccgggaggagatcttgggcgagcggtggtcggctgacgacggcgacggcgtcttctccaccaacgccggggacctctcggcacgcgccgccgcatgacgtgggatgccacaggccaccggcctagcggtggcggccacatgtggcgtgctcttgctgcttttggcagcgtcggccgtgctagaactgcagcatgtgtccaacaaatcttattttgctcagaccaagaactaagtcaaatggaaccaaaaaggcagccaaacaattgcgggtaaagaagatgagagattgatgccggattggcacacttacttgagcctggacgagcccgccattgcttctgcctgctgctccccgagcttccgaattggagcgcgcggtgggttgaagaaaagaaaagaatggaggggaggggcagtgcagtgggtgtcggtgttgatcgcccactaggggcaaggggaataatagaatctcatcgccaacaccagcaaaaccagcaatcgctgtttggcttcaagaacagatcttcctttttttcttttttactgtgaaagatcacaatcaccatcacattctgtggtgtactggtgtggcatgggtaggctggctggctttacttgggtttgcagctgttgccgcctcgtcctcaaagggcaagttttataataaatgtggtggtcacctccaattttattcacatcatccatccaaaaaatcaaaattaacttatgtaaatgcattgcatttaatacactagtctcaatacacttgccaccaatcagtccttttattttctcttgttccttaaaatttgtgtagaggttgccctttgcatgaggggtggctcctcccctctctcttcttttctctcctccacatcattatttaagcatacatggcactttggagtttgtgcttaaaaccttatagtacttgccctaaccacccttgcaaatcctgcctctccgagaaaagcgacagcgcgtgtgtttgtgtgtgtgacggaccgcacaaaaaagccacgcctcctgtccgccttgtctcgcgcttgcttctcttccactccccccctctctcaccgctgtctggttttcagtgtgacatatgtgtgggaaaaggcaggaggttttataattttttttattttctttttattttctaattttattaataaatctttccaaaaattatttttaaaaaccgaactggcgtagcagcgttggttggccatgctagctacggtggcgtggaagatctattaataaaattaaaaaaataaaaagctctgaaattttttttaggttttataagaaatacaaggaaaaaaacataatatttgctactttgtgcaaaactgcaaattaaaccatgttgatgagcaaacgaaataagccacaaccgtgtacatgcaccgtgaaggacagcaagctggatggagtattggcatcaaatatgtggcattagcaaactatggcgtacacatgacatatagtactgtgctctttgggcagccatgatatatgccaacgtatagttcactttttgcctcacaggagctagctttgttggtcgagctggcacgtattcatgattaactaggtactaattggtacattacatcagagagggcacgaaaaagaactggacacagaggagcacacctcgagacaatttaatttaatttatttttgcttctgaatacggccatccgggcgtcaagcatgtggggcagttgttgtgcagtgaagcatcaacacacaacaggacattcatgctggccaattcgtcaaaacgatcagggcaatgtaaaaagtgtacccttgtcatcctaaaaggtattccacgcacagttacatacaccgacaatgtgccttatggaatacgccgacgaggaaaatcaactcgatagtacagtgctaggagcctaggagctctacaccactatcaaatgcacgtatatgcaagcgtacaagtaaattaatatttgtttaaacaagctagtaatggtacttacatagggtttaattagtggcggaaacgtgttacttacatgggtatgttaaggcatattaagagatattccattcaaacatataaccacataattttttaaggaatattttaggttaaataaagggagcaaaatagatgcctttcgtttagccactcgtgaacatataccatcaaacacaggtacttattcattatcatactcgcacaaatggtggccaaatgataacgccaagataacgagttcatcctatcctgacttttatcaataggacggtagctagaagatgatatatgagtgtctgtgcaaagtcctattgatgcaacagagataaaaagctagaatgcactacaaaaattggggtgtagaatatccccaaaatgtcacgaccggaattaacccaacgggcgtttcttttgtgcgtgtattattccttgtcccaggaggcaaggtacaccaagagttgatacaattcagagtttaacaagcggaagcgtaaatagataatttattacatgggcgacgaaggcccagcacacataaagacaaacgagaaacagcggaagactagggcgacgaccacaggcgcttgacagcaggcacgagctagacaccaaagccttcatcaaccaggggctcctcttctgggttgggaaaaattgagcaagactgagtacaaccaccgtactcaacaagacacacccacaagtgcataataaatgcaagggagtacaagggagttataatataaagggttagggttgcagtaaacagcatttaaagatgcttagttgctcaaagctattttgtaaacacgattctagaactatgcaatattatttatcaaggccgtaaacccacacgaacctgccttaacccaaggcctacgatgattcagaccgaaccggcaacccgaccctgggtcccagctcgtcccaagccaacccaggccaaccattccacattttagttgttaagcaggttttaagaattaaaacactaacttgggtacattgctcggcttgcccataaccgagggcgcggctattcgaatagattatactctgatcagaggtgtacatctttacccacaagacacatcttcctcacgtgtaaccacgtgccacataccaccatggtatacggacggaagacatgatatagtttccaacccatcctagccatagacaagagtaccgacccaatcccacctacggccggaacccccaggacaggcaggcaggactgagcccctagcagcaggacaccggccctgtgccacgacatctcgactaccgggccgcagctcgtgtagccttcatttgccctggagatgtccatcgacccccgacttcgtccatctccatccgtgtacttttgtttataaccagactgagccacaaactaagccttacccactagacatgtggaagtacggtagtgctttgcaacagaggcccgaagaccggtccttatatggccgaggtgctactatcaaaaccatgcaccccgagcccagcctaaaaccattttggggattttgaatagagggggcggtgtgaatccaattccacaatactccaacaattccaaagtgtccaggtgatatgaatatcccaaagtctagagttgtaaaaccgcctaatgttacctaattaaatagcgaagcatctacctaacatcatactagtggtaccatgagtagagtgtccactagttggggttttgtttaatctagggtgaacaaggaaataataacaataacaataataaggtcataacaaaggtaaataggcatggctaaacaaaacagtgataacgcgggaatttaaataaagcgataatgcaataatttaaatcaacataattttataaactgggattcaatatgttcaaagatgatgtgacttgccttgctcactttcccaaacgtcggcttcaacctccacgaagagcggatcttccgaagctgcagcgtctacacgaccaacggaaaagaaaaggcttttactctaataaactccatataacaagcagaaacaaagcacaaaaatgggttcttgacttcttaaggaaaaattagagacttgaacggtccaattccgagttcaaatggccaagttatggccatttgaaggttatatgctctttaaatgaatatttgcgaatttcttcatttaaattttaatttaaaatttggatctattgcgtcagccgaggggaggggcgcgcggaccgggtccacgggagtggggcccacgcggcagcctcacggtccacggtggaccgggtgctcccggctcacaccggccggcgccgtgggtcccacgcgtcagccgcacccgagggcgcgggcggctgacggccgggccccacatggcagccgcggggcgcgcccgaaggtggccacgccggcacagccgacgggaggcggcgcacccgcgccccgatggtcgccgccggcgaccaccggcgcggcggagcggcgcccgagagaggggagggaagggggaaacgaatcggcggtccacagctcaccccgggtcgacggcgacgacgggaacggcgaccggagcggaggaaggcggcggcgcggctcgggtagacggggacggcggcgttccggcggtcggcgggcgaaacggaggggtggacgaggtcggcgaggttgcggcgaaaccgaaggaggcggcgccgaagcgggagaaggtccggggcgacgacggcggcagaccggagctcggcggtgacggcggagagagagagcgacgacgcgagctcgattccggcggagagagagagagcggcgagtggcggaaacggtggagggaggcacggggagtgtttatatagggttgggagtgagagagggcggccggatgagggggaaacgggcgcggaagatccggccgccattgatgcgccggcgaggtttagggggaaagattccgaacgaatccgagggagagagggagggaaaaatggggggaaagagggagggaatcacggggaatatttcccccctcttgattgcacgcggggcggacgggagcggcgggatttgcggcggcggcggcgctagggcacgggcgaggcggcgggagcggcgggaggaaggggatgacgggtgggccccacccgtcagcgtgggtggcgggcgggcccgctcgtcagcggcgcgcgcgcggggaggaggccgaatgggccgcggggaggaggagagagagggaaggagatgggctgagccggcccaagagggggagggggggaaagactttttaggatttttctttttataaaatcattttaactttgtttatttcttaataattattatttgtgctctgaaaattccactaaaatttatttacgcattttaggcttttaggaaatatacaaaaatcctccaagccttattggacttttaactttgcacattttaattgtgggaggctttcacaaggattttaattattctaggcataatttcgaggatgtattttagagtcattttgggacgcgacaaacctaccccccttaaacggaatctcgaccccgagattcggaagaactgacgaagagatcgggatgggctgccttcagctcgtcttcacgctcccaagtagcttcttcctcggcgtggttgctccattggaccttgcaaaaacggattacccggttcctggtccttcgctccatggtgtccaggattttcactggcctctccacgtaggtcaagtcttcgcgaacttcaatttgctctgagtcggcctgctcggatggcactcgaagacatttcttgagttgcgacacatggaacacatcatgcacgttgcccaaggaggcgggcagctccaactggtaagcgacttctccgcgccgagcaatgatacggaaaggacccacaaaccgaggtgcgagcttcccctttgtctgaaacctgtgtacacctcgcaagggcgtgacccgaagatacacaaagtcatccactgcgaattctaggtcacggcgtcggttgtctgcataactcttctgccgagaccgggccacctttagattatcccgaatggttctgactttagcttcagcttctctcaggatatcggtcccgaacacttggctttccccaacttggtcccacaatagcggtgtccggcatttgcgcccatacaacgcttcataaggtgccatttgtatgctggcttggtagctgttattgtaggagaactcggcataggggagactcttatcccaggtcttcccgaaatctaggacacatgcgcgaagcatatcttctaggatctgatttagacgctcggtctgtccatctgtctgcgggtgatacgcggtgctgaaatttaatcgggtacccagctcttcttggagcttcttccaaaagtgagaggtgaattggcttcccctatcggatacaattttcttaggaacgccatggagactcacgatcctagcgaagtagagctcggctagtttgttccctccataggtggccttcacaggaataaatcgagctaccttggttaatcgatccacaactacccatatagaatcatatccaccttgggtttttggaagtccggtgatgaaatccatcccaatttcatcccatttccattctggtacttggagaggttggagaagtccggccggtcgttggtgctctgccttgacacgctggcacacatcacaaagggccacgaactctgcaatttcccgcttcatactaacccaccagtatttctccttcaagtctaagtacatcttcgtactgccagggtggatggaataaggactttcgtgagcttcctgaagtatcagctgtttaagttctctgttatctggaacgcatacccgatttctgttccatagggttccgtgttcatcctctgtgaaaccagcggctttaccctgtttcatattcttgaggagtccatgcatgtccggatcgttcttctgagcctcgcggatttgatcgagcaaggtgggcttggcttccaacgcagccaagaatccgcgacccactatgcttagattcagggcttccatctgttgattaagttcgggtggaatgccacggacgttaagagtgttgcaatggctttttcgacttagagcgtcggcgaccacgttggccttaccaggatgatagtgaattcccacatcataattcttgatgagttctaaccatctcctctgccgaagattcagatccgactgggtgaagatgtatttcaaactcttatgatcagtatatatttcacagcgattcccaatgagatagtgccgccagatttttagagcatgaaccaccgcggctaactccaaatcatgggtagggtagttgccttcatgaggccgtagctggcgtgaggcataggccaccacatgaccgtcctgcatgagcacgcaccccaatccttggcgcgaagcgtcacaatacaccatgaagtccttgcgagtatccggcaagattaacactggcgaggaaaccagcttttctttgagagttttgaacgccttctcgcattgcgggctccacacaaatttctcctctttcttcaacaactgtgtcatgggtcgagcgattttggagaagttctcgatgaacctccggtagtatcctgccaaacctaagaaactgcgaatttgagtgactgtcttgggttgcttctaatcggtgacggcggtcactgtttcgggatccacagcaactcctttagcggatatcacgtgccctaagaatttgacttcggacaaccagaactcacacttgctaagtttggcatacaattgatgttcccgcaactttcccaacaccagacggagatggtgctgatggtcttcctctgattgtgagtataccagaatgtcatcaatgaaaaccacaacaaacttatccaagtattccatgaacactttgttcattaagttcatgaagaaggcaggagcattggttaaaccgaacgacatcaccgtgaattcatacagtccgtatcgcgtggtgaatgcggtcttcggaatatcttcttcacggatgcgcaactggtgatatccagaacgaagatcaatcttggagaataccgtggcacctttaagctgatcgaacagatcatcgatccggggaagagggtacttgtttttgatggtgacttcattgagagctctgtagtgaacgcacatcctcttcgtcttgtctttcttctccacaaaaatcacaggagcaccccaggaggaagtactcggacgtatataccccttttctttcaactcttccaactgtttcttaacttcggccagttcatttgctgccatacggtagggtcgcttgtacagaggagtggttcctagagcaagatctatccggaactcaatctctcgcttgggcggcataccgggtagttcttccggaaacacgtctccgaactctctgacaatggggatttctgacagtcctatctgatgaagttctgaactactgacagaggttgggggtgcaaagaaaacaaccggttgttccggccctcggtacagagtgacagtgcgtcttgcacaatccactactccttggaattgagccaaccaattcatcccaaggatcacatccaagttcttggtgtctagaagaatcagatccgagggaaaaggaatcccctgaatttctatagggacggcaggactataatactttgctgtcataacccctccaggggtggtgatgagtagagggttcctaagcctttctacccccaactgatttctccccacgaatggcacagatataaacaagtgggaagctccagagtcgaacaaaatggtagcagggatggaatggatgaggaacgtaccaacgatgacgtctggagttgtcagcacgtcctcggccgtcacgtggttcacacgaccccgaatgacatccttaccaccgttgttggagcggggaggcgcttggccttgctggcgcctcggcttcgggcatttatccgcaaagtgcccgggctcgaagcagttgaagcacagacgctgcggaccttgaacgtccctgcggccttgtccagactgcgcggctggcgtaggaggacggggcgcacgggtcccttgctggctctgctgttgctgcggctgtgggacgcgcaccacgaattgaggtcgaggcgcggagcgaggttgctgctgctgcgaggaagatccccctggatagggattggtgtagcggatcctttggttagcaccctgttggttgcggaaattcgccaagcgacgcttgtgcgactccagttccttgtgcttggcttccaagcggatgctcttttccaccagacgttggaaatccggatagtcaccggagactagacggacagacagctccgggtccattcctgccaagaacttctcttgcttctcctcatcttcccgcacatcctccggggcgtaccgggccaagttgttaaactcatgcaaatactccatcacggagcggttgccttgcttcaactctcggaactcccttttcttaagggccatgactccggcgggcacatgggtcctccggaaggcggcggtgaagcgggcccaagtaataggctgcccctctggctgcgtagcctggaaatgatcccaccatagagatgcgggtccctgcagttggtgggcggcgaagacgactttctcctcatcgctgcactgcacagtgtctagctttttccccacggcatgcaaccaatccaacgcatccacggggttgttggagctagagaaggtaggtggacggatgcgtaggaactcggcgagtttagagtgttgtgggggtggtggtggagcattatgttgtggcggattttggatgtggtggaggaaagcagccatcatgttggcctgctgggcgaggatttgggtgagaatggcgttggtgtctggtggtggtggtggaggcggtggaggaggtggaggtgggctgccatggttgttgtggttgctgccttcaggttggttgccatcactggtggcagcatttctcctggtcgtcaccatctgaaaaccccacacagaaccagcaaacagagagagctgacaattaaagctaaccatccacgactaccataactcttgaatttattactgctattaaattggttcattaaagttcaagttgcttaagcaaataaaataaagacaggctccgacacagttatgccacacaccggcataaccatgctccacaagaccccaataagaagacaaacgagaaagaacacacgtgcaagcctactaactgctcgtctaccactgcgacgggccaggacggaaggtgagcaacagcgcatcctccgtgctaccgacgccggaggcttccccctcctgaggaaccacgggcgcgggctcggcacgaggggtctccacgaagcaagtccacgccagggactgacgaacaagctcgggcctggaggtgctcttgcgggcggtgatcttctggctgcggcagacgcggcgacgcttggggcgacagacctctccctgggtgatcttgagctgatgcagctgtgcctccactgcgtctaggtccttcttcagctgcagattctcctgacgcagctccaggatcttcaggtcgttctcgaccatcccacggcgcaccatctgatggaagtcgatacgagccgcgtcgtacgcctccaccatgcgcgccaggtgcatgatggtagcgtcatcctctgagctagcatcccagaaggtggcgtagtcgcgggctcctccgcgacgagggtggtagcggtagggcgagtgctgcagctcgtccgggtagcgctagtgaagagtgccgatggcgaggagagcgacgctctggcaagcggcggagaaagaatctccacccgcggtgactgccaacgaagtccgctcgggtgagccagtgaggatcactgcagtaacctcccaagcagcgtggggctctgcatcgtcaccctcctgctccgggagcggcctgccctggtagtccactccatgcggataccccaggacaacgcacataccccgcagctccaagacgaaaccagtcatgtccagaccacgacgactaacgctgccggccatctacaaacaaaaacaaaaagaaaagcaacatttaaaagtcagattttggcgataaatgaagcagcaggacagagagagactagagagttttcacaattagcaaaggatttttatttttgatgatattgctaaggcttgggatctacggctcgtcctagggtcaagggggctctgataccaacttgtcacgaccggaattaacccaacgggcgttcctttcgtgcgtgtattattccttgtcccaggaggcaaggtacaccaagagttgatacaattcagagtttaacaagcggaagcgtaaatagataatttattacatgggcgacgaaggcccagcacacacaaagacaaacgagaaacagcggaagactagggcgacgaccacaggcgcttgacggcaggcacgagctagacaccaaagccttcatcaaccaggggctcctcttctgggttgggaaaaattgagcaagactgagtacaaccaccgtactcaacaagacacacccacaagtgcataataaatgcaagggagtacaagggagttataatataaagggttagggttgcagtaaacagcatttaaagatgcttagttgctcaaagctattttgtaaacacgattctagaactatgcaatattatttatcaaggccgtaaacccacacgaacctgccttaacccaaggcctacgatgattcagaccgaaccggcaacccgaccctgggtcccagctcgtcccaagccaacccaggccaaccattccacattttagttgttaagcaggttttaagaattaaaacactaacttgggtacattgctcggcttgcccataaccgagggcgcggctattcgaatagattatactctgatcaaaggtgtacatctttacccacaagacacatct

SEQ ID NO: 7535 - DNA, 53492 bp, Oryza sativa
aagatggatgcgtggagaccccccaaaagtataaaatcaaagcggaccggaactcgagaagtgcataggatagtttattttttgcaatcgagtttttagaaaaaaccgtactattaagaggggttctaggtgatgctctgagatatctcaagtgctcttagtgtgaaccaagtgtcaagtttccctaggagtcatttttgcaaatgctccattggtccaaaaatgcaagtccggaacttcctgtcttccaggtccggaacttcctgtctagtttccagttcaaatttgtgagtaacggctagatgacgtcacctagccgttatacatatacagctcgtttccagctcgttccttggccttccactttcactttttgaacctagagctgttgctagcctctcccaagtgtttcttgccttctccactcaatctagagcctaattcttgtgagaaagagagattgagagggagagaagaagatttggagatgtgtgaagactaggatcttgggtgagcacttggaatatctcgtgggctgtcatctcggtgctaattactcttggagatgatctcctagacggttaggtgtcgcccacgagaatccgttgcatattgtggatgtcccgggtaagtttatgaaggatctcctctcctccaaaagggaacgaggtaagttaatgaagttcttgtgctgagattctagaggatttccaagtagagcaacctacacttgtggcgaatttctagaagtagtttgagttggattttggtgatcactcaattctagaaacttgcctaggggtgtttgtggttgaaggctgtggatttcctctggagtttttgcacaagtgaggcaagaggttaatcgagacccagctcttgagctcctcaacggagagtaggatcgcaagattcgaacttcaggaaaaaaattgctcttgtctctttctgtgatgtttttttggatgtttctgtgatctatcttctacttagaatacctgtgcatcatcttgtgaagattggcttagtctcctgattcgaaatatgaatttcatccttgttttgtaacccggaagttcctgtcctaagaacaccggaagttctgggcctggcaggccggaagttccggagttccttaccacgatgttccgggtctgtttgaattttaacgctgcgatttgtttttaagttttcagggacagcctattaaccccccctctaggcttcatcagcacgttcaacaacagccaagaaatcaagtacaaggtggagaactcgagtgtaaaaaagttatggtttgttacaactgcaaagaaccacgacattactccagggactgtccctaaccaaggaaaaaaaatcgcctccacattttcgccaatttacaagaagcagacatgccaatcgccaagtgttcactggagcaaatgcagtacctgtcaagcctagtgctagtcagaagcaaccataacactcttgtatcgatgttcaagtacttttgttttatagttgttctctaccaaccgtgtaataaggaagaaacgggaaataatgaatgagtttggcaaatgtatgaaggatccatattgagactgcaagtgttgtgagttgtgtacattttgttgatgattaaggagacctagggtctcacttccgtaagctcataatctgttatgaatcaaataacctagcaattgatggcgaagaaaatcaagtgatcaaccaaagagacatttgtttggactaagagtttctgatgtgtcctttttcggatcaaaggcaacgatagtccgtatagcttttgacgaactatttcaaggtttctctgaaaggcagtaggcccaaggacctcattgccccagaagcacccacaacatccggagtgaagagtacttggttgagaaaggtcaaaaggtgattaacggaagagatcggaaaagatgtttggttactgggaaaagaagtaggtcgaaaggtgattggtaaaggataatgagaaacatgatttgtgtcactcgaggaagactcccaatagcaatcgaccctacaacagtcaccatgtcattaaggcagatgaattcgtgagtaagcaagatgaccacaggtagaagtacttccatgaggacaaggatggaaacctttgtgacatgaccaagaagtcaagaagttaacctgaacagttggaatctaaagctcggttcaaccttcggctctgtattagatgctacctagaataaaagcacatgcactagtatcgttcaacacaatttcctagcaatcgatccattgggaaagaacacatcaaggttgaaggtgtgaaagaatacgttgaatgctaaatgatgacaacatgaagagaatagtggaaagtaaaccgaatgtaaagaaagtggatccgagtttcttgttcatgagagccattcccagttatgaaccaagtgatatgttcaaggataatctacagaggtcagattaaaatcacatccaataaaaaagcttcagacttggcaggataacgatcagacaataacaagtctagcagtaaagtcatttgggaagacgtcaaagcatgtcaagtgggataagttggttctcttgggaagcataattcaaagttagagtgatcgacccttgcagtgaatagcagaagtatctagcacccagagaccagaaaagctaatatgagacagttagtggcaagttgtcaatcatggtatccttggtaagcgggatatgatagtctaaagcatttggtggtaagctggaaggaaacgccaagcatggtattctcatgatgacaagcatggtatcctagtaatgacaagttggtatcgacgcacaacgtgaaattggtaacttgtatgagattgacaccaagggtatgaattatgagaagtcctcgaactgaaaccccgtcttcaagtaccgcaccccagtcgaagtcagctcaaggtgcaaccaaggataagtcaggtgaaaagaagattccatctgcaacaggagatcaagccaagcagttcagagtggggaagttttgctgggcaagtttgttaaagaagacgcaacggaagaagtcagaccagaagagaagaccgcccaacctatcttcttgctagtcttctcgaatctcgggggcgagattcctgtaaggggggtggatttgtcacgcccgtgataaattcatcctgaaataaaattcattttctaaaaggaataatagaattaattaaaattcaaatagaatttggcaaacgttaaaatgcgtacaagaaaaattcgaatgtggcctagagaattttttttaaattctccttggtctaaaaggagccctcaaatttaacttgaattttcagaacaccgggaataattattaagcaacaaaaacaattatcaaaatttattaaaaagaaaaactaaaaattaatcctccttttccctttgggccaagtctggcccaaagttttcctctctccctcggcccgcggctgaagtctctcttccgtccctctctttttcctttcttctctgtcgaaacataaattcggcaataataaaagagggtagcgcacgagacctaaaagtggatggatgcggagacaaggatttagacaggttcaggccctcccaatgagaggtaataccctactcctgtttggggatttgaatccgccgagtgtagtatagatctgacgatctagttgtctcatatgccccctagagggcctcctgcccaccttatataggatgaggggcaggattacaagatagaaaccttaatcaatacggtatcggtttcctaaatctactttacaatattatcaaaccaggactttgggccattccgtaagatacaaggaaacgtaacacccaagtcatgatctgttacatgttccatatatataagttatcccctataactagtaggataaccatgccgtgtgggtatggggtacccataatctccacagtagcccctgagaccttcacagtcgaaaagataatcttctctcgaactagattactccaaagccgagtgcttcaatcatctttgccatgatctcccgagtacttttaccaaatctgaagactgtggagggctgaaaaataaagtcaggtgcatcgactagatgcacctaataggtgtagcccccgattatgtggttaactgaacaaaccaagtatatagtcaaggaataaataatccaaccaaccaagtggttcaataattatggtcaaccaagcgacttgatattaatatgtagcatatgcggtgtgaatccctgaataacatgatccgagtgatataccgactactttgtaaaatatgatgagtgtaatctaaggttggccacatcattgaaaattcacatagcaaaacagctataaagaagcttgtatgttgtgaataaagaaatttccaaagtattgggcatacgccatgcgcacactgctttaacagatgtgcttaagtccctaaaagacacatggtttcaccacacctggaaatatatggcatatgtggtgtaaaatccgagtaaataaactcataaaggatttaccaaccgcctggaaaatgaccaaaatatataatgagcctaagccataatattggtcaataaaagtgcacacttacgtggcaaaaagcaatgatattgtatccaatcaattgctttatgaatccaaacagcgccttgacttatataaaaaagtcagcgggcagctatataaagcattactgtttggcaccttttaaaatgcattgtaccaactcctaaaaagttgagtaactgcggtataaaaggattttaaggtattgagcacttgatcacgcgcactttggcctaagcaaaaagaacgtgacaggccacacctgaaaatatggactgcagacatattaggcctaggccaaaaaatatgccttcgacaccctttaaaggatgacgcatgtaacatgctcccgagtaataaatcttccgggtaatatataccaagtgtagctcatatgaatagcttctgatctgagtgattatcccttatgggatactccaaaatagatataaagattgaatcccgactggcgcaagtatttggttgataacccttacggggaataataaatagtccagtctttgagcatagaaaataaatccatgatcatgaattcatgttgcatgtatccggaacaagtccaaattgaaggtatgatacttgtgtttgaactagtaagcccctgatcatatagcctgtccttctgtagtcacaatggtccattgatggtagcaatcaaaagtgatgaagttgcatagccatggagacgaagaaaccagtcgacagtagtcaggtcagccatcaatgaagatgaaagcgcccagtgataaagttgtgtagtcatggcagcgaaataatcaatcggtgacagacgaggcaaatcaaaggctatgacgaaatccaccaatcctaaagatgaagaaaaaagtcggcgacgacaaacgcaactgacatgatgaagatgacgatatcggcgatccagtcaatagcagtgtcgcaaccaatgataatgacgaagacgctcatcagcatttgcatagtaggtcaaccgtgaaggtgaaataataagttggtaaagacataatcatccattagcaacaacggagatgtcagggtcgatgaagcagaggtgctagtgatgatgtcagtgactccaaactcccagacatggaaatttaatcttgacctactgctttgaagcgaagacaaaattgatgactcccagagttgacttgttgactgattaattgattgcttcatcttgacataaagcttgtcgaattttgagccatgtatttgtgtagcccccgactcttcggttagttgggaaacaactgaacatagagtcgagaattatagcttcttgtcgtcgagtagtcattgcttgattgaagataatggctctcctgaatattggagagccacttgttgtagtaaaataacacggcatcgcatgccgagatgttgaggttcacaaagacgtcgtggttggtgaagtagcaaagcttgcgaagtagaggcaatagagtttgccggtgccgaagataataaagatgaagccgctctaccatggtgacaaagttgcatagccatgatgaagtgaacacgagtcagcagcaacagaagcaaaccggtagcgaagacgcgcaattgtgaagataaaagcaccagtcggcggcggaagacgatgatgtccatcaatagtggtagcggtataaaccagacgtagaggcaaggacaccagtcaatagcagacgagacgaccggcggtgaagacgataaggccaatcaaaagtggcagaataatgcagccatggaagtgaagaaaccagtcggcagcagatgtagacagcttgtgttgaagatgatgacgcctattagtcgtggtggcaacgtggccagccgtgaagacgatagcaccagttggcgtcatatgaggcggccggtcggtgaagatgtacgcgttcaacaacggcggcataataagccagccgtgtagacggaaacaccagttggaggcggacaaggcggctgatcggtgaagacgtagacgcccaacaacggcagcataataggccagctgtgcaggcggaaacaccagtcggcggcgaacgaggcggccggtcggtgaagacgtagacgcccaacaacagcggcataatatgctagccgtgtaggcggaaacaccaatcggcggcggacgaggcggccggtcggtgaagacgtagatgcccaacaacagcggcataatatgccagctgtgtacgcggagacaccagtcggcggcggacgaggcagctggtcggtgaagatgtagacacccaacaacggcggcataataggccagctgtgcaggcggaaacaccagtcggcggcggacgaggcggccggttggtgaagacgtaaacgcccaacaacggcggcataatatgccagccgtataggcggagacaccagtcggcggcggacgaggagaccaatcggtgaagacgtagacgcccaacaacagcggcataataagccaaccgtgtagacggaaacaccagtcggcggcggacgaggcggccagtcagtgaagacgtagacgcccaacaacggcggcataatatgccagccgtttagacggagacaccagtcggcggcggacgaggcggccggtcggtgaagacgtagacgcccaacaacggcggcataataagccagccgttgaggcggtgacaccagtcggcggtggacgagacgaccggtcggtgaagacgttgacaccgaacaacagcggcataataggccagccgtgcaggcggtgacaccagtcggcggcggcgaaagcaagcctgtggtgatgttctgactgatccattcctggatcgtaagagataagcttaaagccatgaatcccttttatgcatatctatatctggatcctgtagaacaaacatataggatgagtagtatctgatataaatataatactcaagaaaaattcaagtattttaaaatatttataaatatgtatttcttctcttgtcaattttgatttccccgagcagatgactcattacgtttaaacactctgcccgactagtcatagccaccaagcaccgggagtcggcctaagcacttcccaaacatgcatatgagtgacatgagttcgtcattaatggaacaaagtttcacggatcggagtttactactcgggtacttttgcaattattaagagcagaaaataaattatcttatctctatgcttttgatttattccgaataatacttagcaccttgcgttattcggtccatccaccaagcccccgggtgctaggaatcggcccaaaggcaactatctattggcaaaccaaacgaaaagcataggaagatggaactccataactcgataggcacttttgtactcagaatatgtcgcaagcaatcaagataaatattatgaaaattgtttaaaaaatatgatataacatctgtagcccccgactcactagtcaacggcgaaccagttgacgtagtgaggcagaggaaaagaaaaatatcatataaagaaaattaatgatgacatagcttcgtaatattccgcttgatgatggcagaggtgaccagcgtgggaacaaagtcgtccatcaataacaatgaagacaccagtaggcggcaacgaaggcggttgacggtgaaagcgaagatccccaccaacagcggcataataggccagccgtgttggcagagacaccagtcggcggcggcaaaggcaagccggtcggtgaagacgtggacgcctatgaacggtggtgtgaccaaccaaccgtataggcgaggacaccagtcggcggcgaaggaggcaggccagcggtgaagtcgtagacgcccaacaacggcggcataataggccagccgtgtaggcggagacaccagtcgacggcggtgaaggcaagccggtcggtgaagacgtggacgcccatgaacagtggtgtgaccaaccaaccgtgtaggtgagaacaccagtcggcggtgacaaatgccagccggtcggtgaagatgtggacgcccatggacgatggcataataggccaaccgtgcaggcggaaacatcagttggcagcggatgaggcggcggcgcacaaaggcgaaactcccgagcccgcggcggaagcagcgtagtcgggctgtgttggccgggtgaagaccgaagcgcccgacgtgcggcgtcacatccaggtcgtgcttgccctaggagcagtcgggccgcgttaggcacgcaaaggcggcactggtccgcagccccccggcgtgtggaatctccaaacatgcgaacaaaatagccaacacaagcttcagttaagttgcgattataaataaatctaattagaaattagagattaatgctctgtaggtataatgcacgtgtcggtgcatatatgcagtatgcatgttggttcgtttgccaatagcatgattgactggagatttggccggcattaatccagcaacacatgcatggattaatacgtggcagagatgacctcagatggatgccgcccgtctcgtcgtcagtacatgcaaaaacagagaaagcacaacagagcaaattaatctgattagaaattaatctaatgataatagattggagtatccgaggacgccatcagggagagatcggtcttgctgcctcgcaacaccagcgcgaggtcaccatgagcactatcgcgagcgcgatgtgaggccaccgctgacaccgctgcaggcacatgcagcacacgatctccctcttcgcgtgtcggcggcggcggtgttctccggtcgagcggaactgatgaggcctcgtcggggagataactcctaaaagtggcatctccttcttagttagattgaatctctcctgactggtttgaatccaagtcagagaatgagagcttgtcgaagttgtcggcgacgaggaagtgacaatcccgtagcgaagacgaagccggcgactcatggagttgattccatcgcatttctcgataggaaactcgacgcacccctacctggcgcgccaactgtcgaaacatgaattcggcaataataaaagggggtagcgcacgagacctaaaagtggatggatgcagagacaaggatttagataggttcaggccctcccaatgagaggtaataccctactcctgtttggggatttgaatctgccgagtgtagtatcgatctgatgatctagttgtctcatatgccccctagagggcctcctgcccaccttatataggataaggggcaggattacaagatagaaaccttaaccaatacggtatcggtttcctaaatctactttacaatattatcaaaccaggactttgggccgttccgtaatatacaaggaaacgtaacacccaagtcatgatctgttacatgttccatatatataagttatcccctataactagtcggataaccatgccgtgtgggtatggggtacccataatctccacactatctatcccaggcctcccctcctcctcccggcccacctcttccctcctcttccgcttgggccgcccctaccctatcccggcccagccgacctgccgccccaggccacctccctcctctccctcgcgcccctctgcacgtgcggcgcacgtgcgcgcctcgcgccggaccaatgggtccacccacccggtcgtcttctacctcccagccggctcctctctctcctctctcccattaacccttgcaccaattcctcccccgaatccgctccattcatgccggattaattcaaattggttagagaaatggaatccacatcccttcctctctagttcccctaactttccccatttaatcccatccccaatcgccgggatttaatcccccttctttgacctctcccgtgactggcactccctccttgccctataaaacgaagtcctcatcctcccctcgttacattttggtcccttccgagtctttagccacctccacgccgcctccttctcactccctagcaccggccgactccaaccgcccctgccgccgcgtcagctagccggccggccgtgccatcgcctcccccggcgtcgcagtcgcctccccttccccggcatgctctccgtttcccgcggagacctccggaagtgcatcctcgccggcaacagtggcgttgctgccactgttccgcctctgccgcgtctcctgtgcgtcggccgttgtcgccaccacctctcccggcaccggaactccgtcctcttcctcggctaggccacgacgtcgcccgaatttcgccggaacaccgccgtgccacgccggcctctccatccgcctcgccggaatttccccggtcggcccttcctccacacgtgcaccgtcggccgcgccaccaccacctccggaatcacagcggcgagccggcgacatcttccttggcatcgcctcccctccatccaaacccctccgcggtccatcgtcgtcgtctccgttcatcctcgtcgtcgacgtcccgtcggtcacccagctcatcgtcttgctgcgccgccaccatcatcgtcatcacagcggcgtgttccgcgccgtcctcgcatccgtgtagctgctgccggctgccctcatcgcctcctcgccggttccggtcgtcgtcctcccgtcgttcccggtcgtcgtggcattcgtccctccgtcaagccaattgcgtttgccgccagtggttcgtcaagcgagctgctgcagccccgtcgtcgtcttcgtcctcggctccacgtcgtcaagcctcgtgctggccgcgtctcgccttcgtccaaggatcgccgccgaagtcgttcgcctccatcgtccccgagccgtctccgccgtgcccattcgtcgtcgtcgtgccgcgccttttcgcgtggtggtaagggtgcctcctctcgctgccccatcctcgtcctttcggtgtcgccccgtgcccgttgtgcggttgtcgaccccggtacccgtgtaccggtgtctgtagtcattcgtgggtgcgtgtggtgaccgtgtttgtgtgcctgctcggtagccgcgtggtttccacgtgtgcagccgcgtggtgtctggtagagtccgtttgccggccactcgcctcggttgacacacggggtccgcttccgtcgacccgtggaccgtctctgtgtacccggtccaccgtggtcccttaggttgacatgtggggtccgcatgtcaacggcgcagccttcctgtcttttccaggctagtgcttacacatgttttatagttgcaaagcctaattacaataatccgtaaatctccacgtgacaacattaaacttgatgaccaaatattggtcatacgagctctgaatcgacctgttcaagtctcgtaatgtttgttataacctaaagaaccacgtgctttctttttatgtattgttattgcttcttcataggcttgtagttttgcttgtgtgcttcacgtagcttctgtcgttccggaggttcccgaagcgtggttcacggtcgtcgtcgaaggttcggaaggccgttctctgtaagcaaggcaagtcgcatcacccttgagcatattgaatcccagtttataaaattattttgatttaaattattgcattaccgctttacttaaattcccgcgttatcactgttttatttagccatgcctatttacctttgttatgacattattattgctattgttattattaccttgttcaccctaggataaacaaaaccccaactagtgggtactctattaacggttccactagtatgaatttaggtagatgcttcgctgattaattaggcaacactaggtggttttataactttagactttgggagttctcatatcatttggacactgtggaatggttggcttgtgatggaattgaacacacacctcccccctctattcaaaactcccaaaatggttttaggctgggctcgaggtacatggtttttctagtagcacctcggccactataaggaccggtcttcgggcctatgttgcaaagcactaccgtactaaccacatgtctaatgggtaaggcttaactcggtgctcagtctagtcctggaaagagtacatggatggagatggacgaagtcggggctcgatggacatctctagggcaaatgaaggctacacgggctgcggctcggtagtcgagatgttatgacacagggccggtgtcctgctgctaggggctcaatcgtacctacctgtctcgggattctggctgtaggcgaggttgggtcggtgcttttgtcatggctaggatgggtaaaggggttatgtcacatcctttatgacgggttccacggccgtcgaatgcagagtaaagatgtgtcttgtgggtaaagatgtacacctctaatcagagcataatctattcgaatagccgcgccctcggttatgggcaagcctagtaatgtacccaagttagtggtttaattcttaaaacttgcttaacaactaaaatgtggaatggttggcctgggttggcttgggatgagctaggacccaagtcgggttgccagttcggtctgaattatcgttggccttgggttaaggcaggttcgtgtgggctcacggccttgattaataatactgtgtagctctaggatcatctttataaaatagctttgggcaactaagtgactcttaaatgctgtttattgtaaaacttaacccctatattatcaccctttgtactcccttgcattaatcatgcatctcccggtgtgacttgctgagtactgtggttgtactcattcttgctctatctttcacccccttcagtaaagctttggagaagaagtttaggtggagccatggcttataccccagttgagcgcctgtgaagatggagccataggcctgaagtgcctttgtaataatgtaaatattatcgatataataaagatgtgtcttttatatcatgtttgtgtggtgtaccccagcttttcctgggacggggattaatacactagcgttctggaaaaggtatttttccgggcgcgacaatcaagtggatcattggagcgagtgaacaccggaggttgagtatgatgaaattcagcgagtcccccggcggcatggtgtccaccaccgcctgcaccttgggcaatgtgggcagcggtagcggctgcacttgctgtgatttgctgaaggacggtgtttcgagccacacggttgcactccacgaccataagaacctcagccatggtaggacaaggtggcggttcatcaccacggcttcgggaaccctccggagcatcatgggattgagagcgagtgctgggatgagtcatcctatggatatgagattaaacataattagtgatgggagcaactaaggattgataatggcctgaaagttagcacgcatcatacatgataaactaagtttaggttaccgacttaatatgaatgcacaatacaaatgcatgcgaagctaagtctatctttgcataattagtttcaatgcacaataaaaatgaacaattcatttatatacaaatgcgataagttatgttagcatgatatgatgcaaccaaataagaagcattaagaatcaatcgagctcatcctatactaaagctcgaacaagaagcaataaaccaaaatagttttccaattgcgatcaacatagcgggccaaaagcgtatcaatcgtcggaacatgaaaattcaaatagaccaacactgcaacttggccactactgctatatgacacatttctatctagcgtctctcagctgggagtacacttttgcaatatatttggtcgaatttttaagttggtatattttacttcttccgaaacaaggttctgaaatttctcaggttgccgaacagcagccactttacgaatttttagagagggctaaagaagtgataaaattctgaacatttttgtggttgttcctggagtagttgcctagctccagaaaaattttgacagcaaaatagtgattatttgattacagactgttccagaaattccagatttggctatttgacattttggaggtttaaaacatgttcataatttgtcaaaaattttggggagactaagagcaacatgaggaacagcaaggcaccattttagagtgactattgcacattttaattgtacttacaaactgagaataaagtttaattccctcaacttaccgggtgcattatcggtctaatatttgaatgggagaagtaataaatttattttgtcaaccaaattagaccaagatgagtggaaaatctgagaataaggtgagaaagaacactagaatgagatgaggagtaaaaatgattcacacatactaagattttcacaatcgactcaagttaaatattttgcaaatcattttcaaattgccaacttagctctagcctacagtcggcattgctatgataccaaccgttgtggacaccccgagtattataccatccagtgtccaacgcgaccaccacatactattggagaagtgggttccatacactcataaatagccactcgtcctcaatgtgtccatgatcgcggttgacaaccttctgttataataaccggaatgtcgagtagtgagcgcaagacataaccgtaagatagcttgccagtccactccgtcatatgcccgtcaaccactcgaaggtggcgaccaaaagcataccccagtgactcgatccaaagcactatccccgattatctcaagcgatcaaaacccattactcatgcttagctagtccccaggtatgcgactagcctcacactttcatctcaagcaattaataaacatagcaagtaccataatagggttaaagtgcaacgaggtacatgacacataatagggtccgaggtcccaacatacaacacataaatatagcagcggaagtctcaaatagagttcataagcaaaagataaaaccggtggtgccacaaccccagtagggcaaaccaaccgggcaagagccaagctgcaagagatcactcattgccctcgccgccctcggcagagcaatgaccacataagaagcataactcataatcggaatcctctcctgaaattgcagacaccgggttaagtacaagattgtactcgcaagtcttacccaaaattatatatacataaggaagagagaagtatgcaagcttttttagcctatagtgggtctctaggttgaacatttgtataaagctaattttattgagcaattaatgagtaaaataagcaaggacaagtaaatctagcatcatattaatttatggacagcaagtatataattctgaaatgtataagcaaatgagcccaaacggcgctctcatcatcaaccatggactaccaaagtccataccaacatggcacaacatgccaacaccaccatcaaacataatcccatctataataatccacatttgatgctaatcataactgactaacacatcaagcattgtccataaccgaggacgcgtctattcgaatagattatactctgatcagaggtgtacaactggacccacacgaaatgaacaaagatcaaatgctacacaccccgtcgagtgcggtacacaattgattcaagctcattacatgccctttcttagccccacccaaccacctataccatgctggggttcccgacgactcagtcacgtgcgtgcgtgatgtcaccaaggcgggcgcgccacgcgggagacacccccggccaaacctaggcacctgaggccctccaaaggctacctgcctcacgactctccaacgtggtataaattatcacagtagaactagtaagaacaagccgatcccaaataaggcatgtggaaaatacgtaggatgcttgattagatgtcaaaatgttcgatccttaacgacctagacggggcaacttgcatcaggggaaaccaacctcccatcatcgccctatcacccgtccaagtccaacatatttcatcaaccattatttagtgtaagtgctcaagttttatgcctaaaaatgcaagttgtctatataccacaattaatagcattgtccatccctatagttctattagcactaagcatggctaagcattaatgaataagacatcccaagtaattccaaccagtggtaatagggtataaggacagcaatatcacaagaactaaatgcataaataggttctacccatacaccataaaccgacaatattaatatctaggcaatgcatgcatatatatacgtatagattgcaaccaaatcatttttagagaaagcatagattctatatgcttaggtgcttgccttgctgctgagggtagtcactatcctcctcgggatatggctcgttactccccggaatctccgaatctatcgaaaagaagcaatatgcgaataagagccaaataaacatgcacatgcaaaatgatcaataaattatgaaataaatacagtgggtagatcatattttaacttgaatttagttgaaataatcaccagattatcacttatagtttgggagatatgaaaatgacaagctctcaggtgctgaaaatggcagttctgcaaatattaacatttccttttgtacattacaagtaaaatgcatttcaaaccaagatttcataataatgattatttttagagtaatgtacatcactcacagctcctaagaaaaattatttcacagctataagtgttgtcattatttatttatggattttaaaagttagaaacataggaatgctaaataaactcctaaacatgatttaagaggtagtttctccaaaaacaacaccacaacagcaaagagtactaaaatataagctcaacaaaattggtttcacaattttaacttttaccaataatttcttacgaatttcttaagagctagaccacacaagggatacatatagctatttatatttttactgggaaaaccagtacaaaagttggtcattcttatttttcaacactgaagatcatgtttttcttaatcgacaaaaatttggttcactgaatttgcagttcatatgaattagttatgaatttttaaagcgcaaacctctttcagctcaaaagctatctcaaaaatcgatttctattttcactcccccttttctccaacttccaccggacttcgctcacatggcagcaacctggtcgtagggtcgtgcgaggctaaggcctcgggctgatggcaagagatggagcaaggcctcgggctgacggtaagagacgttgcctagggctgtttcaaccgaaatcaaaagagattaacaccggatgagctacagccacctcctagctgcaataatgtagatggatgacctgttgaatgttgctgtagatgttcaacatgaagggaactaaaaaaaggcaccatggatggcatggaagctcaccaaatggtgggaaacaaagtcatgttgctgctgcaaccatgcaggctgaaaccaccactctcttctcctatttcgatctctctcaactctccatgcatgtgcaagatgttgggatggatggaaagcttggatgatggggattgttgtggtctaacttgcagggattgatcttgggctattggatgggatttggggaggagaagtgagatgagagctcagcttgaggaagaaaagaaagaacaagcagtgaagatgaaaggggaggaagaagaaggggttttctctgccccccttaagtcctgaggtgggagcacgcccatgggtgtgttgtggggctaaagaggcacccaaggttagtgacaagtgggcccaagtcatggctgtctatgagggtgagagaggtgggtgaaaaactgagtacagattcgtttatgcaatttccaggatttattttctttccctctcttggtaaattcaatttgactaggtaaaactagttcaaaaattaagggatttggtgtggtgataggtgttgttttcttggttccatttttcaaagtttcactcaaaaattcgaaatattttaattctggtgaaaagatgaaattggttaggctgaaagttggtttgaatttttaggaggcctaaacagagagtaaaaaatccacaaaatttatatttgttggtgataaataaactagtatttgaataaattattacacatgtacacttatgttcaagttattattcaaatagaagtggtttcaattttaccgattagagttaattttgttatcgcctatgatcaaattgcaatatagtaaatatgaaatctaaaggacaacaaatgcacttctaaatacctggttatgaatgtagggctgttacaccagatcggcccaagccgatcgggcggccacggtgcggcgcgctggggcacgggcgcggcttaggccggccggccgagcgatggcatgcggcagcgcggccaccggcgcgggaagcggcggcgcacgcgggctgcggtggcgagcggtgccgaggcacggtggcgacgcacaagcggcggccggtgcggcaaagagaggaaaagaaaggaaggggaggaggagggagatgctcaccgagatgacgatgaccggcacagggaaggacgacgacgaccacggcgatggcggcgccggcccggcaagtgagggggcggccggggagcgtcgtggcccgaggaaggagagagagaggggttaggccgcgcgcggcgaccgaagacagcaaggaaaggccgccagaggcgatagaggtggtggtggctcgggttggcagcggaaccggggctccggtgatggtttggggatctggagtggcggctagtgtgcggggcagcgcggcgaagccgagggtggcggcggatttgcgtggcgatggctgacgcggcgaggagcggtggctcgaggcgacacaggcggtggtggagctcgggtcgacggtggaaacagtcctcaggcgatggaatggacgggtggagtggcggccggggcgtggcacgacgtggcgaacccgaaggtggcatcggcgcggtgcggcagtggctagagtggcggtggcgggcagctggaggcggttgaaggggcagtggctcggttttatggtggagatggagttccgacgatggaatggggaaatggagtggaggccgagtttgcctgcgcggtggcgaagccagcagtggaggcgacgcagcacggcggcggcaggagcggcggtggcgcgcggctggagaccgccgacgagcgacggagctggggcgcacatggggagagcggggaaaggcgcggggagctcggggaggaggtgaaatgggagagtatggccgggggatgatttatataggcccgggagggagtggctcgggccgggatgggcggcaaccggcgtcggagtggaggcggcatcgtggggtggggtggaggtggctcgtcgccgattttcgcggggcgtgagggggaagtggtggaggacgtggagggggtcgtgcccgcgccgacagttgcgagcgcgggaggcgggagtggcggattttgcggcgacgtgggcggggtggttcggccggccatggtgatttggatggggaggccagaggtaggaggtgacaggtggggtccacgggtcccacctgtcggggagagagggagggagagttggaacggggaggaaagatggacttttgcaagggcggccgagggagagagaagctggccggagagagggaaagagagggcgcgggccgtgggaggggaaggggaattgggccggggcggcccaattacaaagaaagggaaagttaatttgtttttctttttatttaattggttaaatgatctttgtgactttaaaattagatattgagctccgaaaattcgcggaaaatttcagagtgttcattagggcacagagaatattacaaaatatttccggccaatgatttttaaaggaaaattttaattccctctataatttacttgattaaattgatttaacttttatttaatttctagaaaatgaattattgaatgatttttaatcccgaacaaaaatcggggcgttacattaatacaatgagcgtttgggaaaatggtagcatttttcccgacgtgacaatgtgtctgccacctatttagtttttgtgggtggatcttacaatgttttactccggtgaaaagttgcacgttatgtaaacatgttatgttttacttgatcaccagaaaggataaactaagagaataagaacaagcaaaaattacctatctttaatgtttgtaaaacaatccaataatctactcatctcagcgtttgtcttcttcaaattaatggttgatgtagcaatttgagtttaaatcgattaagtttcttaacactcatatggttgatccataagatgacaacatcaaaaagcatcaataccgcacccacaatgtgcaaaaatttatattaaggcagagaagctcagatcgatcaattgtagcaacacaggaaaaataataaatgaacattatatgttacacatggaatcgtcttttgccaacgatgaaaacatcacctcttgatcaaacccatggtatttgttcttcgcatattaccaacgaaacaagcgctgcaagtgaaatttcaaatggcaaagttaaatttatgaaatcaatgattaggaaggaaaaacatttttttagcataagtatatagtagatgagttcataaagagaacaagcaacactaattatttggtgagaatctcatatattttggtacaccggtcagcgacaagtgcaaaactttacttcttgtagttgagggtcacaacacagcagcaaaaggatgccttttaatttcccttttttaccttgcttttcttcttctttttcttctcaatgtatgccatgatctcctcttgccgctcaagagtctcctgcaaggcctgaaaaaaacatataatatgcgtgttttagaaatggtttagtaagagtagtagaacaacatgtaatttgttagtctcaatacatttaataatacagatctatgggattaatgtaataagaatgtgcttatcatcattaaggtgaaaacagacaaaccttcttggtcgctgcaagttcctcctccaatgcactaacacggctgacggcagtctttagcatctcctctttatcagctggcatttctgcaggcttggtgagaatcgcaatgaccttctcctcaatatcggacaaacgctttgtagaagaaacatattcagctactgacacagcctccactgatatctcggatagttgttgtgcttggattttggatgtactttgtgccccaagggtagcaccaagtaccttctttggcatgttgcggctaacacggagcattgttgcaatgctcatgacaagagccatgatacccccatagagtggaggattggatccattagaggcatttacaatcgctgcaagaaaaagattatccaatctgttagttaaaaactaactagagagtaacaatattaagtcacaagattattaggccgcaaagatgtttaacctttggttactgtgacattctcatctggcaatcccttgctctggcaaatggcatctatggccttctctaccattggaacatcacaagaataagctgatcctagggtctgcattaaaaaaactccttttatatgaggactaagcttagaaagtatttagaaaagaaatatatgaaccactacaccacaagaatgaaaatttatatgatgactaagcttgggaagtatttgaggttttacacttttcctagaactgaaagatcatcacaaagttacttgtctgtgcatatctatcgcattatcaactgacgagcccacttaagcttgtaagttaagactcaaattttttttattctagtttgtctagggagattgaacctctagtttcatccataagacgtgagaaatattcttttagttgtatggttcaacactaactgcaagtttgtttgcgcaaaaaaaacacactttaaatttgttaaagtacaaacatgtcattgttagaaggacaatagtggaatttcattttctggaagaatagtggaaattcaccagtgataaagcataactcacaggaagtatcgtaggaggaagttcctcgcaaacaggcgataatgaaggatgttcaattcgggcacaggatatttttcgtgacaaagtgcacccttcatatttgaaagactcctgcctctttattttacgtaaataaaataacagatgtctaagtactatgatccaatacatttagaaatacttaaatatgaatgtgctagtgcaaagagcgtgtaacatctttgctaccttggtgtgcatggtgtcatcttcacaaatcatcattttctcctcagcatccagatgattcaaactaagatttccacaccacccagccccgctttgaaccatctaaacataatatagcatagaaattttgagttccttgtcccttatgaattgtaatttaagaatttgttcaaggataataaaggttcagattggaacagtcaccttcaatatttcagcatccttccaggggcccttgtcagccttcatgcaaccaccttcacattggcaagttccaccaaaaaactccggcagctcactagacaacataaattaatagaattaaaatggtgaacattgtcttcgaatatgatggttaacttagagcatcaggtgttctacctagcatcgatcacctcaagaagcttgctctggtacttgttgcccaacacctaaagaaatgcacagattattgataatcaatcttcaagttgagcactcatagacaaagtattggaagaacactaacatgaatctttgctgtggtctttgggtcaaggaaactcttcactgtgctccaaagaagtcggaatcctggcccagcattaatgatgaacattcgacacaatgtctgcaaaaacaattacatgcggcgagaactttaataaatccagcacaaaattttctgcagaattacaaccaatatattgtgcatccaaggcattacctcagggtagttatcaccatcaatcttttgaagctgaccaatgaggtctcttgcagctttgctgaattgtttcatcccctaaaaatgtattttttttcttagattataaatagtaaaagtgcaatcatttaatgaattatccaaatatttgcacatacataccaccccttgcacatcaagaattgttgtgctttgatcaatgtggcacttggcagcaattgagcaagctgggaacttaacagcaaagttcttctcaaactccctgacatggttcttgataaaacgatccattgtggtaacctgcattagcctattgacattgatctgcccaagacgttcaatgtagacaggccttccttccttatcaaccccatggtaaccttgaggatagcattctgccaccttgtcagcttcttcaaattcaaaatcctgagataggatttgaagaaaaatgtgtcaactgcttataaacaagggtatgtgtcaaccatagaaggattagtccaaatatattttaatcttaagcaattacctcaagaatggtatctgcagcgaattcctttctccactgcagcatatcaacccacatttgctttgccttctccacatcaaactttcttgccttcaaaaacctatgtaatctcaaattttagtaatacttttttcacataagaaactataaataacaacatgatgtgctattttcagattatacaccttagcatcatgtggtagtcatcatggtgagatggtagcaactcttcaagtacaaggagctgacggaaggcatctacagcctgcacctcctcaggatcacgttcatccgcaattgagatggatatgaccttgctactcctcctccccttcttcattgaatgccttaacttttgtgaagcactcattgccttcttcttcagcgatatgattttggctttcttctcatcctctgagtattcaacattggatttcctcttctcttcatagtgaccatctaaggttgctgacacatcgtgtatgtcagttggtcatgtatattccaatataccagattctaaatattttctaaatagttaagttagaaattaattctttgatagtgaagcgggagaataccattgggaaaagggcatacgctttatctgaaaataatgtttatactttgagatagaagataatataatgattttttaataaaaaaatacacattattagggtgtaataatccactttaaacaataagaaaatggttgtgacaattatttgctttacttacgagagcttagacggtgttcaagaggtcttgataggacttctgtcatgactgttcggctctatctggacctgaacagttatacacattattatttgattatatcacatgctatgtctcaatgtataataaaggagaaaacgaataattttctaaatatcttgatgacctaaagtattgcttggcagtacgatgcagtgtaaaataagacaaaaggtctcagtttgctgggaattttttaatgcttgagcagtgggcctgtgagacactaattagcctcatctcatggtatatatcatagtccatcagtataattataagtttagtaacatgtgttccttttctggattaacaaaaaatttataaaatacacatataaattaatgataacgttgaaacaccagatgataaaaacctacaggtgcctgagattgtgcttgaagacacaaattcaacacattaatttacagccaagcccaaaattcacaagaacgcttgaataacacaaaacagaataaatttcgctaaaaaaatagcagaaaagtaatctaagtggaagataggtgttatgatctggaataatttgaataattcttgcacccattataagtcatgacatgcaacacaatcagaaccatcaaaaatcaaatgaagaaattataaaggcccaaaaaaccacaatgaaccaagaatgtaccaaatcctagatccccttgacaatccctggccgaccacccaaagaatccaaaatacaaataagcaactgcctccgatgtagattttcccaatcttatgaaattggagcacaacaagtattgaaccaggtagaaaacaaagtagagcctctttatcctcagtccacatgggaaaagatgtataactgatgcttacattttatcattaaataaagaacatacaatgccggagcaacacaattattactaatgtccataggaagaaccaggatcaaacaaggaattggaaagaaaatcatgtagtggtggaagagaagagcatgcacgtaccaccaagaggaggagcctggatgtgggaaggggaggaggtggtcaggtgggtgtgggggtgggggcagaaatggaggggcagacagaaaaatagactcatcaatggcgcgcattccccgctgccaaacaaggagagtaccataggcaggacatctggagctggcgatcgatgtttctgttctacaattatgacatgtacggttttcttccaatattagataattagaccaccaaacccttattagatgtgtccttcctgtatagaacggtttgattttcctattaatagaaaagacataatttttttgacacagcataatgttttctgtaactacatttttattgtaacgtgaaaattttgtcatgactcatgcagccatacacctacatgaacgagtatttatttatacatgtatatctaaatagatgtttttttaaaaaaaaatcaaccatgttattgtatatatcgtatatatgctcatgctttatctctcactttttttatttaatctttattagtagctttctgcaatatatattatttttatattgatatgggtgaattgtgtgtagtgcgtgaagatgtactttttgatgtattgtgttccgcaactcatacacaacgacactaattaaatgctaatatttctaaaaatccaaatggagtgcaacccaatttttttccagaaataaataatccaacaaaataaataccaatcgtccagatctaaaacaatttttattgggtttttttctcaaaaatattttcagtgtcatcgcaatgaaatacttcactgggtcgtatatcaatcatccatgccctggtgattgccccaacaaatgcttactttcaaaaaatgacgggcaattaattggccatatgcaaatatccatggctaatctatgccataattgaccactagctaggcacttatccacttctaagtttcaaatgatagagtggaatggaaactgggataaccccgcaggggatggcagcgtttatggagtgctggtattccgtataaaattaaagtgaatggccagcgattaatttaaaatgggctagcacttggcttagagttgcagagaaggaaaatcaagacaggggtaagatgtttgttctgtcaaagggaagaaaatgttgtccataggttttgggaatgcccctactccaggtgggtttggagtaagggggaaggaaagctaggcgtcaacttcttggtgccaaatgaggaatacaacaactataaaatgtttgccttgtgggtgtttgacagacttatggatcaagcagaccatgtaatacatgcagtctttgtgactctacataacttatgggctgttcaaaaagatggacgccatgctcagatgccagagaatccaacaggagtagctatgagaattgtggcacaactagaggaatggtcaaacgtccatgaaaataagatgggcactgtagcgcatccgacacagcattgggaaaaaccagaagagggacgggtgaaactgaatgcggaaggagctttttagaaaatgaaaatagaggggcagcaggtgtggcgatgagaaatgagaagggagactttatggcggctgctgctcatgtttacagtggaattggggatgcgacgtgcatagaaatccatgcgtgtaagcaagcagcaggattggggcagcggagttaggatttacaaagttggtaattgagactgctcattggaggttatcaaaggagcttaacaggtcggtccatggagtgatgatccaagactcaaagtcattttgaaggacttccaggattagaagctgaggtgggtacatcgtttggcaccaggtggatagtgttgtcctcgggtggctctatggttccatctctgccgatcttctccaagagggcgatgacccacgtcaccactactcggtccgtctagcatgctctcgaactccagttcttgggcaacagcgagcagcgcgccctcatgcttgaagctgaattccgcaccttccatcaaggcgatctttcaatcaccgactatttgccacaagatgaaggccatggtggacactctctgtcgacgggggtgttagcgaccaaatttggtaattcaagtattggagatggagataaaactgaagcagaatccaagatagagatcgttccggaaacagagtaagaattggctaaagtccgaatcagctgcgaccagaatcggcagagttcgagtcggacaaggttagccgattgagccgattccgacaatgtgactcggtacacgttgtcgggttgagttaatgtgcttcatatggattgccacgcacggattaagtcctgaaaaaggcaattgtatctattagttaggatattttatgtaatttccttagaaataagtttgggcaaaagtctgccgcaaagacttatggtattttagagtttttttagagataagagtcatgtccgataaggacatattttgtatctcgggtataaatatgacccgaacccatgtaatcaaacaacacacgttcaatacaatctcggcgcatcgccacccttttactttcgtttactttcgacgagttcttactttcgggttgagttgcatcggtttcgatcttcaactagaggtaaaacttgttatggcggcttgcgttctcgggattagtgctttcatctttatgatactctaatcttgtttatgtaattcatcgagttatcatatatcttataatactttgacaatattgttatttaactttcaatcggccaacatccatcattggaaggcagccgattaggtttaatatcaatgttgacttagattatataggatatccaccaccctatgaaacattcaaagccttgattgtctagatattgtccttcttttcctacttatagctgcatcagttgagtttgaccttataagtcgtgattagaatcttaatctctggcctgcttttgagttgccgattagggtagcattagagttccagccgatcttacctgatttaactattttatatcttatatgcctgattgacatgttaagtccgccctttatgctaagatcttgtcgcatataggtatattaagcttcatgtttgatatattttgcctgctttaatatcttaatatagagtagtatcggagtattagccgatacatgctggatctatttgatcggctatgctatgaatgcttataatttcctcgttaatatatatttcgatttaagtgatttatactgtctcggcatggcgaccgatctatcccaatcacttgatttaagtatatatcgacggaagtattatatatcattaataacttcagccgatcgaatagatttagttctttttttacctatttatgactgtcgatcgacttaaatatgacatcggctcaaagataaatgatacgtcatcggcgactgaccgatcggctatcgtttatagatttaaccgctatttttcctgtctttgttccttgctgattgcaggataaaatcaactggcacgctcacgaacctaaaggtaagatttttggaactgcactaaagttaagcagatcttccaggcctcgtgtttttcgcatcaacacgcttttggcacacctggtgggacacgacaaacatgtcagcagaaaagccacctctgccatcgacaggcaagtcgtcagaccctcaaaccaagattccaaaaccgactgggtccgacgttaatgaagggaacattgttccagtcactatagacaagttgtcaccagaacaaaagaaggattttgaattaatgatgaagagcgctcaggagcaattcatgaagtcgttcgtagaaactcgcgggaaagtctaccaaaagtacaaagtgaaagtagttgttgccgacaaagttggctcaagctcatcccaaggtgataaaggcattgcagatggctcaggcaataaaggtgacggccttcaggatgaagtggttgaggatcttgatgaagataacaatgaagtgcaaccacagtttaacaacttccaagatcggattgactacgcagtgcaacatgctttgatcaaccaatcaggagtcctagtcaataccttaacaaacatggtaaagtctgtggttaatggtacaatagctgagcatcaagctacagggccagtttatcttccaggaggcgttttcccaaattacagaaacttggtaactggtaaccagcagtctgctaccaatgcaccatcaatccagccgatggcatcagcttcgactccagcacaagctgcaccatcatcggcaccaaggcaaataattaataatcctcgcctcttgtctaaagaacaaccgcaacatcctggtcagaatatcaatcggctgtcccaagagcaaattgcttcaatgtttttgccaactcagccgattggtggatccattcagcagacgccgccaaggtagcagataggtcaaccgattcaacagcagacaacttagctgattcagcaacaaacgatccagtagatgctgactgggttgaggacgcctgataatcagccgtcgcatcagaatgtgactcaagttgtccctgagcatctggtacacgttgtacaaccggatcaatcggttgctacccaagttatccctgagcacttagtgtgtaatattcagccgaatgtccagaactaccaagggggtaacttgaattatcaataccagcctccttcgcctcatgttcactatcaacaggggggattgcctcagcctcagtatgctcctcagttcaaccagtttgagccgatacagcaacaagcgcaaggggtgcctcagtagagacaatgggccgatatgattgcagatgtgatgagggagcagtttgggcttaagccaaaggatactggaaacttgtatcggtatccgtaccttgagtggtttgagagggttccattacctaaccgatacaaagttccagatttttcaaaattctcaggataggacaatgtctcaacttatgaacatgtcagccgattcttggctcaatgtggtgaagcatcggctgttgatgctttaagggttagattgtttcctttgtccttatccggatcggcatttacttggttttcttctttgccatacaactctgtcaatagttgggccgatttggagaaacagtttcacagttatttttacagtggaatccatgagatgaaattatctgacttaacagcaatcagacaaaggcatgatgaatctatgcaggattaaattcagagattcagagagatgaggaataggtgctacagtttggctttgaccgattctcagctagctgatttgggttttcagggtctgataacttcgatcaaggagaagttttcatctcaggagtttgaaagcttatctcatcttgcacaaaaggtaaccctacatgaacaaaggtttgcagaggctaagaaaaatttcaaaaagatcaaccacgtatacccttacatgtatggttccgatgaagaggatgattccgaagtagcaacagccgagtaggtcaggagcaagaaggttgtgccatgtccataggtgagaagttctgggaaagaggaaagatttgattttgatatcaccaaggctaataagattttcgatttgttgcttcaggaaaaacaaattcaacttcctgctggtcatgtgattccatcgactgaggaactaggcaagagaaggtattgcaagtggcataattctggttctcacaataccaatgattgcaaagttttcaaacagcagatccaggttgccattgaaggggggaagattaagtttgatgattcaaagaagccgatgaaggttgatggtaatcatttccatgttaatatggtgcatacagctggaagatcagctgatgaaaggaaaactcgagcttctcagttgaattcaaccaggattatcaacaaatatcaaagaaggtatgacaagcagcaggagaggtattgcgaagaagatgatggcgggtttgatcctcattgggactgtgagttctttagattttgctggaatgaggggatgaggttgtcgtccatcgaagattgccctgggtgcagtgataacacagggagttcaagccgaccttacaatagaggcaatcggctgaatcaggagagggtgtccgttccctcaacaaggcactatccgttatattggatatgctcagacgcccatgccatatggtgaacacaaccatacccatagtggtcacatgggtagctcctatgaaccatcgctcagactagtccctactacaacggcctcccaatgcaaggctaaacagtaaacaacttaataagccaaggtcgccccataaccaacacatgtggttgcacggtaatcttagttggtgacacatagttcagtccttaatcgactcgggcgtacactcccccctatcgatgtgcaactaccaccatatgcacaccacttgccgcccaagcctaaaatcatcattttttttttcagatttcaattttcacaaaaataacagaggcaacccctccatacaatattttttttcaattatcccatttataaagagtaaatatcatgtcataagtaaccatcgggaatttctaagcatggctaagcaatagctatattagtagctcgaatatacccacggtggtgcttggatactaccacataaatacccatcctagtgcttcaacagtaaggataaccaatatatcaaggtaggtaatgcagcatataggtcatttctaccgataccccattttttttataaaacatcgcatgcaatttataaaataataaagcatttgcgaagatattggattcaacatgatcgaaggaggaatagaataggacttgccttgattaggagttactcaaatatctcttagtcctgcactcccatcaacggcaacaatcgattcgtcctctatttaaatttaaacatgcattcaaatgaacatccaataaaactccaagataaaatatgatgcatggtgcatgaacatgttcagtgtatagaggatgatttaatataaatttaggagaaagaatcgcctaaatccaatgttgtatgtgcaagttattgcatttctaatatctaatatacgataaaaacgaagtttactattcaaacttaatttagtgaaaattttcacaatagtggtgataattttgagtgtacagtcttcaagagaacaatattatgaatctaacaaattttggttcacctcaatcggagttaaaatgaattctctatgattttccaaagtttcagcattttatagtgcataaataattaaccgaaaccattttcttagatttattaatttgtttataaagaaactacagcgcactgccctgattacgttttcctacagggaaagcgtattcatgttctgtgtattcattttaaaaccgtgggtccacatgtaagtgtctcgtaaataaccctatactttttattatttacatataaatccgaggtcccacttgtcagtgtgtggctttttttgcacaaagagccctataatttaccctaattacaggacaagttccttcttcttcaacctacaggcagctcgattggcagaggcgcggtggctcgggaagtgctcgccggcgacgagcagcgacggggatggctcggcagaaggccggggaagctagagtggtcctttcgcacaccctagaggcggaggcgtggccggggaaggctggaggcggcgagcgccatggccggtgttggcggtaggttcgggacggcgacggctagcgcgctacgatcgacagcaattcgattccttcctaggggagggtctagggactacgagaatccttaccccgtgcgtggttggagtggagacggtccgaggcggcgtggcgacgagctccctaggcggtcggcggcgacattggtggcggcggctctccggtcgaggggtcctaaaatagattgcggaaatggatttagggaggtcctatgatcttggtggcgcgaggaatcgagagggaactcaccgaggcgacggctcgatggtgtgggttcggcggcggcgctctgttcggccggcgcggggcgtgacggtggcgcggccgttcccagcgaatcagagggtttaggtctttggctttgggagtggaggttgagggtggtgtggagagttagctggcgcgagggttcgatttatacgcgaggaaggagcgagaggcaagtgcggggaattgtcgcgaagtgctcggcgtctctcgcgcgcgcaggcggtggtcggcggggaacacggcttgcagcaggcgccggctttgcgcagggattgcagagggggtgcagggatagttacggggagccaggggcggtcggtctcgccttgtcgcttcgtgcgtcggctttggcagggggcggcggctccgggttggcgaggcgcgcggcgaggccggctttgccaggcgcagcatcggcggtgcagacgtgagtcagagggctttgcagacggaggcagcggcatcggctttgcgcagggaggaggcagaggaggaaggctgcgtcggtctggcttggtcggcatcgggcagagggccacggtgttggattggccacggcggctgcggtggtcggagcctgggcgtggcagggaatcggcagggacggcgtcggctttatgcagccttggcacagcgggattcgcgggcagagggtggcgcagtgtcgcgtcgcgtcgttgctcgggcagagagagggagagagggagagcaagagagcggcagctccagcaggggcggatctacagtgttagcatcggtgtcaggcgacaccgatgactttcggcaaaaccaatagttaaactgcttatccatatattataacacactaatataagtataattagcatgctatgacaccgatagacacattatgacaccagtgaatcaattttctagatccgccactgagctccgggttgggcgagccagcgagggacgcggcgaaggcagcggtagggcctcgggcaggggtgcaccagctttgcctcatctttgccagcgagaatcgtgggcagaggttgcttggtcggcttggaaacgatgacctcaatctcgcacgctaggtgctcgatgaattgcctgaaagaaatagaaggagagaagggagaaagacagagagcagggatatggggatggtggctggcaggtgggcccaatgatccttaggcccactgatcagagagataacgggagaagggatgaggtgaggggatttctctctgggtatttccaagaaggctgagagtttgattaatttttggatatgctaatgtgctcaaaagcttgtgctaaaatttctagaggttagtctggtcaagacctccacttggtaaattttggggatttttctcaagagcagtttattttttgaaaattcaaacaagttcactgtttttattttaatttgaatcaaattttggatgctttcatctttttaattgagatgcaaaacttgtgagatttgtgaaaggttatttcaagtctctaccacttattttaattagttttttttgttatgtttattgcatgcaaatgcgttatgaggtgcatggaaaatccaagaacaccaaaattaacttcaaatgacaaggacaagatcaaaatcaaatttttgctaagttttcttcattttctttttttttagcttcaaagaattcttggtatgttacaattccgattatttctcgcattgttaaattaagatttgctccaggttaaacaaaacattttctttgggcgatttattgatgaattgtaaactaagggaaaggggaaaactccgggtgtgacagctaccccgtccaggatcgctccctcatcctcaacaccctcaacggtttgagtttgacaagacattcagtctagtcatcaagccggccacccgtcctgttgacgaaaaatccacgctcggcagatagtgccggaactatattggcgtgaactaagtcaacgaacacaacagccgaggagatctccttaactccaatgcaggtccaaagatagatgagatgagggcgtactagttagtttgatccaacaaccgtcaacatgtgcaaacaacagatgaaatagccgatcggctgacaagccaatggagtaattctagccgatgctgatactagccgatgccgataccaactaatgtcgatagggttttgagcaatcggctatatgtccaatgtatattctgatacttaagtaaataatgatatatagacaatcggttgataataatgtaattaagcaacaatataatccaatagaaaccaaccgactaataatgatatgatagaacaaatattgatccgatggttaaagcatacatcggctagaggtccggtgtcataaaatccaaatgattagataatcagttaaacctttgttgcaatcggcgaaaccaacttgtatgtaatcattataagccgatgcaacatccagataactcatcggttgaaaccccgatgaaaccctttattataatcaaagacaggttagcctttataattctaagtatgactagggatgatgcatcgcaaagtatgctaagaaacataaagtctaaacaatcaacctttggcaaattttcagggtggtggataccttagttaatctaatctagcatgataatttagccgatactagcataaaccctaagacgactctcaaccgatatgatcaaattaagatgctaaactagattaactaagatatatgataaataggtaggcaaaaatatcaaccgaaccagagcgatccaagaggttgaagcgatgcaaccttgagcaacactaatgtagctaatacaattgccagggccgacggaacataggacttaccccttcaccagatattgaaagctgatgcatccccgcattaggagccatgttccgccgtgataagtaaaaatctcggaaaagagagtgacgatgcaacgagagtacttgtattgatctgtaagatagtttacaatgaccctgggtgtacatatttatacacataggtagatactagtccttcttgacaagaaagaaactttcctaaagataaaaggaaaacataaagtccttagtggacaagaaacatactttcctaaagaaaaaaggaaactaacagattctccctaattaatagataaactctcatgccgcatcctccttgaattcattttcttctagataaacttcctttaattgattaatttccttaaccaaatatagcaagaatacaactattggcgacttgataattcccatcggccgattcaaggactctgaagccgatactgaatctaggccgaagatgacttcggggcttaccaaatttcactgttaacacatccgcactgtcctcagcctggcagtctcctgcagttggcccatcgactagcttgatgtcaagaacatgtcccttcattgcactctctaggagatagtctactgcatccagcctcccagcttcatcgactccactcggctagacatggtttgccgcctgaacaagttcctctattggtacaacaggtttgcggcattccttctgcccattggtttctctgagaccaagttcaacacttcactgtttgtccaccattgtgcctctggcatagtgtacctcctggtctacgtcgacgacatcgcactcactgcctcctctgcatagctcctccagtggaccatctcctctatgtagtttgagttctccatgaaggaccttggtgctctccatcacttcgtcggcatcatcgtcacacaacagacttctagccttctcttgcaccagcggtagtatagtctcaacatcctacagcgtgctggcattgcagattgtaaaccctgttccactccagttgacacctaggccaagctatcatccactgatggcgcgccggtggcagatcctacagatttttgtagctttgctggagcactacagtacctcacattcaaccgaccgggcatctcttattcagctcaacatgtgtgcctctacatgcctgatcctcgcgaatctcacttagcagctctcaagaggattttgcggtacatccgtggcaccctggatgatggacttcaaatctagcgctcccaggccgctgatcttgtcaactcgcaagtccacctccggctatgtggattcctggtcttccaagcgcaagaacattgtctcccactcgagtgctgaggccgagtatcatgctgttgccaatgttgttaccgaggctagttggttgcgacaactcttatgtgagctgcactcccctctatccaaagccacactggtgtactatgacaatgtcagtgcggtttacctctcatccaatcatgttcagcatcaacgcacgaagcacgttgaaatcgacttacactttgtccgcgagaggtcgccctttgtgatgttcgagtgttacatgttcctacctcgtctcagtctagtgatggtgaagccaatatagacacgtgatcaattaacagtggatcagaaaatcggacgctgcagaacgatcccatcatactccttctccacacgcaatctccttcgcaccaccatcacgtaactcctccggatcacgggtcatttaactatttgccacttttaaaatatggcaattaaggatttgccactcatgtgtctatgacatgtgggctctcatgtgtctataacgtgtgggccctcatatatctattgtcacgcccgaaaattcactagtaatttccgaacttatttgtgcataaaatcctcgtccaggaatcagccgaggtacacaaactgaaaatttaatatacaaatcaatcagttacatacttacaaaagaaaagaaaaacagcagcggaataacggactagcgatggtttcagctccactcacacatgcagctcaactagggtttaaaccaaacttcttttccttctagatcctttttcttcaactgaggtttgattgattattgcaaagtgagtacatggaatactccgcaagccacacaacaaatatgcaaacacacaagggtaccaaaggatggcataatataggctcatttgcaaaagcagcatttagcaaatatttgagaatgtaaaatagtagagtaattaatcaatgttaatcaacactgaacagcacacccatgctgctcaggcccaaccatcctgaacaaccatacccggctgtacagatctaactccaaaccagaagctaagcaaattattaccagttatagcatcaataattattgtgagaggtgtgagactaatcacgaaaaacattgctcaacccgcccatgaccgcgggcacggctattcaaatagttttactctggccagaggtgtaccactatacccacaagacacagagcctcaaaacatgttaccatgcccttagtaccaccacgatacctcgaaacgggattgtgacagtacccctcgcacaacacaatccaccacagaggcatggactccccagcgacccccacggacttctcaccacttcacagtctggtgccccgcaatgagccatactatacaaaaggtaaagctgttgcccacgctggcttgtggttggcacgattaatgtctcacaacagtagctcgtgaaccgatccttaattgtcatgatcacgaccttcaaaaccatgtgctcacaacccaccattatcaagttttaattatcaattaattatcataacatgattaaccatcatgagctaccatttaatataatcataaataataatgtagtatgattcatcccattaatgagctaatgtagctaagcatggctaagcaattatatatatagcatttagctgaaccaaaccaatatataaggttcgagctaatcaatttattatccatagaaaaataaagtcatcttcggtcataattatttgggaaaggctcaccacccgatgacattcgaaaataatgcataagttgaaatgaaacaatagctttaaatgggttcaacatgctcaaagggttatttgggatctttgtgacttgccttgcaataatcggtcttcaattagtcttcttgaatttttctgatgcactcatgactcttcgaaacgatggataacgacaagctaacacgcaaaacaaaaaaaactaataaaaaccaaataaataatacataaaaagtaaacaaacatgtagatcatgattttagatgaatttagcaacttgaaccacttaattccaacttcatatgaattaattatgaattttcgaagtttaatcagtttttcacctaatatagaaaaccattacgatttaaatttaagaatttatgatgtcatgatgacatcactaacaggcatggctctggaccacacaaccgccggcgatggaggactcggccgggccaactgagggcatctacgtcatgaggacgacgagaggaactcaccggtggtgacggcgacgacaatcgatgacggaaaacggccggcgacgagcttcaaaaggcggcgacctcgggtcatcgatggcggcggtgctccggcgggaaacggcagcaatagagggggggcgggcttcttctcgcttctgcgatcccatgggtggcgacggcgaacgaaggcggcgatggacggcgacgagcggcacggctgaagacgcggcgacggatgattgcctcgggttgacggcgacgatgaagctccgatggtttgcagcggcggagaaggggtggacggtcttcggcttggcgctgcgatgccgaagacggcctcggggtgaaccagcaacgaccgcaacagtgaggaggatcggctggagatcaaaccgaggcggcgaactcggccttcacggtgatagcggcttccggcgggatttggcggagggaaaccggtggccggggtagagatcaaccttgcggagcggagggaagcggcggcactgatcgggaacggccgacgtgacgggaaaaggcggctggagatggtggccggagttggagagagaaggcgagcgtgcggaggcggctagggttagggaaaacttcgggtaacagggggaaaccgaagaagaggccgaggggctgctatttatagccggaagagggagagatcggctcgggaacggatggattcgatgaaggaagttaggatttatcccgagttcacccggataaaaaacgggccgaaattcatgggatagataacgaatttgatggggttttcttgggattagatagaggagatcgagaggaatccatttttgcaatcaatttcggaagggtagcaatggatgcaccggatttgatggaggaggcggcgcggcaacgcatggcacgggatgagatcggccggctagaggaggaggaagacggcactgtgcagagtgggccccaggtgccggagagaaagaaggaggagggacacaaatcagacttcggccaagggagagattgggccaagagcgagtgaggacttttcccaattcagcccgaaaaggaaaaagggacttttaattatttttccaattaaactaatcattgaaatgatctttgttaaaatacttccaatgctcaaataatttcaagaaaaatcctgaaaataattggacactcaaagtacttaacaattataatcagaccattcaatgactaatttaatatttaaataattgctaaaatgctatttgtattattaaaattaggagttgagctccgaaaaatccgagaaaattccagagagtataattaatcatggagaatttaataaaaattaaatccagccatgctttatatttaaaaaattttatttcccacatttaacttcacttgtaaattaattaatatttaatataaattctaagaataatttattaaataatttataaatcctgaaacgaaattcaggatgtgacacactggtgacagtgtcagtgcagtttagctctcggccaatcgtgttcagcatcaacgcacgaagcacgtcgaaatcgacttacactttgttcgcgagaggtcgccctttgtgatgttcgagtgttacatgttcccaccacttaccgctcccgcctgcgatttgacgccgccctcaggacccactgccaggtcgccgtcccctgtctcctcgccgtcgctccgtcctcaagatcggtgggagagcagcagacatgggggatctcgctcggtctcatcggcgcggggaagctcaccagcacgcagagcagagaagcttgccaatggggggagttgcaggtgtggaggtcctcgtcggtgggggtgtagtacgtgattcctgtgagaggtgagtagttgaacacaaaactcatcatgcagtccttgtcgctcttccacagagtacaacgtacgtggggtgctcgcgaacttccatgtccatctccacacctgtaatgccgagatcatgtgttctggagagtgcatatgaattctggattttagatccacacaacgacttgtacgtgtgccaagtcatggcgatcgttagtaatatgaaggtgtgtattcatcgaactattatgcatatgatctttaggtgataaaatattgattgaattgtctaccgttatctttcagaatccatactccagaaatcttacatatacacatatttgttgcatcaaacctaagctttcttttcatacatccctgaacaattcaacttcacaactgctctcgacataatctcattcagaatggtttttttttctcaaattagttggacatagcaaaatattgcttttcaagactgtaacacaaccaactagcagggatattcataaattttccccttctgttgggtgtttttttatagacatatataatgaaggcgtatataacaaagggagaagctgtttgagggtcttaaggacaatagctcaattgactaggaaattgatgtacaaatctctaccttgttttttgatttatagtttctttggtttcaaaaagtaaagtagctcatgacatgagaactttactagcagagaaatgggcttatatattattggaaagataaatttctccatcgatacttgctgccttgattgtgttgcgtgtgccagccctgtaggtggcaaatcattggagaatcagatgcagcttttagatgggcaaagtaaggccatggtcggtctgattaatctgtacagctttcaggcataggctcttgagataaaaaggtatcaaatttcaacttcttgatactcagtactcaagacatctgttaggagtagagctcagagaaaccctatttttagatcctgtaatcagtggcagagcttcgtggaggataaactgggttatggctcctccagcttcatgcaaatacactatattgagtatgttcatcttcatagacattgattaccatctttaacaggttagtttatgtagaaatcctacattatatttcatgttaatggccacttcttgttagtctatgaagctccgccattgtctgtaatgttgtttctgttaatggaaataggggtaatcttcaaaaaaagtctcatcttcgcactttcacattttttttgaaaaaaaaatatttctaaaataaattttttttaaaaaaaagaaatcctacattatatttcattgtataatatgctgatttagtgattttgagtagaatttcagggagtcaatgcaaaaacttgcatagtttggtcaacgccaccatcatgaagagttgcccaggcaagaagaactctggcaagctcatcatcacatgattcataattcgcactcaaaacatagaagttcaagacttcaggttattgtctcatctctacatctgattatcaaattagtttttttttcccatttttctatattttataaattccactacaaatgatcaatgaataacctcaggatttgacttctttttcaactgatctcttttttttttagcaaaacactgtagaggaagccccacagtaaacaatatattaaaaattaaaaaaaatatttacaacaagttcaaccaatgaatgaggactggtctctcaattacatttaactaggtgataccctgcgtgttgctgtgggatttgtaagaagtgatcatgatattttaagtgctgacaaatgctcaagcattacacaacaaagtaatcaattaggggtaggaacggtgcaaacaactctgaagaagggcaatataaatgttttgtacaaatatatacctgtagtctggtacgaataacgggagttcttcattgaaaaaagcagatctcagctcagcggtagtgcatttgtatatctagaagtagctatcaacttgtcaagtgtgaatgtgtgatttcctgaacatcttaatttcccacaattaatgaatctctaacaaaaaaaactgttgtatatttacctgttgtgcatttacctggttaagtggtgtgctgcttctgaactccttttaagtaccgttcaaaccctaatctagctaccaactggagtgattacttgattagtgaaggagcattgcggggttcataaaagtgtgagcagatagttacaaaccatggaggcaatggatattgtgtaattagcagatcatattcaagcctgaaattaaaaacatgtacaattgagtgtccaacataagaatgtgacttagcctatgattgtacactgaaatgtcacttagcctatgattggacactttctcattagctgaacatgtagctgaatattaggcatcagagtttgtatgtgggtaaacaacaactaaagaatacatcataattgatgacatgatccagaaaagtcaccttgtagggtggtaataacagtacttgataaaaataggcaaaacattatcaaaatggcacttagcctatgattggacactttatcattagctgaacatgtagctgaatattgggcatcagagcttgtatgtgggtaaacaacaactaaagaatacatcataattgatgacatgatccaagaaagtcaccctgtagggtggtaataacagtacttaatgaaaataggcaaaacattatcaaaatgtagaagtgtgatgaaatagtaaagttcatttgcaaaacgtagaagtgttttgtatggttagtaaaagtcccatgtaaattggtagcaagatattcacttagaaaaattgatattgcaagatagacaatattaaatgcaggttagtgggacacatttatagaatagcagaatatgcctgatgctgtacgctgctgagaattgcgttcatttattctttgattaaaagtgcttggtatgattgccactggcataatattagaagtgcttgatatgattgccactggcataatatggtatagtccgataataagaattaaacagagaataacgtattgcagttctgaaaatttgataaatcacctttgcattagaaaaaaaatatctcatcaaagaaaataaaactgaaaactgaaggtgaaatttagaggcaagtactataaaatccacaggaaagtaggaatgcatgcaagatgtagcatgaaggacctaactgtacatcggacaaaggatgaacagtgcaaagcctatacagcggaagaactaattgggaaatagtggagcttgaacgaaaccaatgaaccaaatctgctgacgctctgcacgtataaacatgatttagctcaaacaataccaaaccgatgcaataagctgatcaatggggcttagataaaagtagaagaaaagaacttgagaaaaaggaaacatgaagataaacatctcaagtcatacccaaacactgtgagaagacatctacggccaggaaccggatgcaggtcgaagaaatcgatatatgagaaaactcaagtgtgttgatggaattgataattgatttaattgccacagttgatgccttgcagttacctgaatttggggagataaccaaaggttttagagaagaggaaggggaggagaatcgtacaggacttggtggcgctgcaccatgcgtagtgaaggggatgcgcttcggctgctcggaggaaggaggcaattattcggctagacatgcaaaaatactgtaatatcgaaaggtcctgatttttagtgatctctaatccaagggctctatttggctgatgacatggaggcatgcggagcaagctttatagccagtgggtatcaactatataggaagaaaggatctatgaactaacaaagagagatcactttgcctacaggaagagattagagcaaagaataaggtggattacaggattagtatatacatggttctcattgtaaatcgtaagttcattcacatacttatacatgagaaatgagttttctaacttgattagcatatacaattttgtaacttcctttccatataccatcttaatgattttcatccaaaatctatttactgtacagtggaagcatgcagcaatattttttttggctattaactcatgtgatgaaaattccaattgtttaaatttgtcgatagtttgtaagcttcaggttgtaataatagaaagcccgtgtgctatggcaaggaaagaagtttcagttttatggactgttttgtatgcgctttgtgaaacttctttttttgttttatggatattttaaatatccatatttgatcgatttcctttggcatcaagtgaagccgagaagcaagcccgcagagatgttagtaattctttctagcctccaataaatttatagcaatataaaattaatttttaggataatttattacaataatgtatgtccttgcttggttatttggacttaagatattttaagatttgttttgtcaaggtatatatatcttttaattacgaggcaattgtgttcttgccccgtttcaagatgtaattgcgattttaccccttttttttaaggtttgtgattttacccatgttttttcaaattgaagcttcagtttgcccctactcggttaagtcctcttcacacggtgttaatttagtagtagaaagataggtgcgccctttgctttctttgtgaggatgcagtgtttttgccccgttgtgtcaatgcatccagcgatggatctgacatacatactggaactttaactttgagattatatggcacctccacacaaatcaattttttgccaattttttcaggaacatataagttgcatatatacaagaaggcgaccaattgtccaaacaaatcaatttattacccatcttttcatgagcaaagacattacacacaaaaaaaggaaaaagaaaggagaacccaagcaaaaaaaaaaaaatcccaaatccacgcgcaagcctgcccgccgcctctgcacttgcttgcctccagcagcactgatccacagccccggcgacggtcggccacccgtggaattcacacaactacttgaggtctcctaatcaaatgccgcccacgcagtcgtcgacggagtcgccgcacgcctccctgcgcattggcctcacggctgcctattgatgtaaaaacacgaggcatgtgagatctgcttaacttcagtgcatgtccaaaagcttgcctttaggttcgtgagtgtgccagttgatttgatcctgcaattaacaagagataaagacaaagaaaccgcagttaaatccataaacaatagccgatcggctagttgccgatgacatatcatttatctttgagccgatgtcatatgtagatcgatcggcaatcatgaataagtaagaaaggactaaatctactcgatcggctatagatattaacaatatataatcgttatgtcgatatatatttaaatcaagtgattgggatagatcggtcgccatgcctagacaatatgaatcacttggattgaaatatatactaacaacaagactatatatgttcatagcatagctgatcagatagatctagtatgtatcagctaatactccgataccactctatattaagatatcacagcaagcaaaatataccaaacaaaagcctaatatacttaaatgcagcaagatcttaacataaagggcagatttaacatgtcaatcgagcatataagataaaagtggttaaatcagataagattggctgaaaccccgatgctaccctaatcagcaaccaaaagcaggctagaaattgagattctaatcacgactcataagatcaaactcaactgatgcagctataagtatgaaaagaaggataatatctagacaatcaagctgttggatgttttatagagtgatagatatcctatataatctaagtcaacgttagtatttaacctgatcggctgccttctggcaacagacgttagccaattgaaggttagatagcgatattgccaaagattacataagatatatgataactcaatgaattatataaacaagattagagtatcataaagatggaagcactaatcccgagaacgtaagtcgtcataacaagttttacctatagttgaagatcgaaaccgatgcagctcaactcgaaaacaagaactcgtcgaaagggtggcgatgcgccgagattgtattgaacgtgtgttagattgattccatggggctcggggtctatttatacccgagattacaaaatatgtccatgttggacacgactcttatctctaacaaactctaagataccataagtccttgcggcagacttttgcctaaacatatctctaagaaaattacatgaaatatcctaattaatagatacaattgtcttttcaggactctacccatgcatggcaatcttcatgaagcacattaactcaacccgacaacgtatgccgtgtcatattgttggatttggctcaatcggctaaccttgtccaactcggactctgccaatcctggtcgtagccgattcgtactttagccgatccttgctctgtttccggaacgatttccatcttgcatcctactccgctcctatcttcatctccgatactcagattaccaaatttggttgttaacaccgccgcacctccgtgcaagctggaccgcgaggacatcgtgccgccctgcacgccgggcccgcgaggccgccacgccgctacgcctcctgcgtgctagccagcgaggccgccgcctcgcctcctgcgctctggctggcgaggccgccgcgtcactgccgccgcttgctcgccggccaccgcgcctccctgtgcatcgctgccgctgcttccttgcacgcactgccctcgatctagggtttttcgatcggggaaatgttgattctcacatgtgattgacttatttactgaaattaggggtacgttggtaattcacaaattaaaatataatttttccctttatttaattcgaaaattttgggcccacctaactaccgtcaaaaccaggggcagatggttgcttcatttcaaaatagtaggggcaaaatcacaaaccctaaaaagtaagggtaaaatcacaattgaactgaaaagtaagggcaagaatacaatttctaaattatttgatttgcattactaaatattaccgtagcgttagcacgggcacattacagatcttttatgtgttttagacggatatcgatttgccacggtgagaaagcaaattcccttggcctatttcaatggacaatacacattgtctcttaattttgagaaaactaactgttttattgactatatctctgaatctgaaaaaaatctcatcggttactgtttcctttataatgctacaatggaatggcaatcttacttattggatattggattccttgcctcactgaaattcaaagaaccgttgttgctgctcgtcagtgtagtcagacttttttttttgagaatattgataaaggatttgaaggtatgttttcagaacattatttacttgcatgatttttcatgtagagatcaactgtggtccactgctgtagaaacaacatgtgttgattaccagtctgttaactctggatatatttggtgttattatcctggacatggacaatttggttagtacaatcaaacaataatttcgtatatttctatggtaagaaggctgaaatgatattatattcgctctttgttcatgtctatctgttatatattgctgcttgtactctattatatttgctcttgctgttttatacagcgtcacctaccaaacaacaacgtttctattagctattatttctaatccaataactgtactatatagaactctattagctactatataaaactctctggacttcgtgccatggttgcttcctatttcaaattcatatgttatctacgcaaatgaccaatatacttgttgagaataaataggccattttataacatgagatgtgttgtttcagggataacttatgtgctagcagaaccagttgttcagcactgttagatttagccaatgaaaaaacctggcaagcaattacaaagctgtttcattggcaagcaattacaaagcttctttagtgtgagagaatacctgttgtttcaggtcttgagtgtaccctggcatatcttgagggggagagagctgtaaaaaggaactgctttggaagctggagtgtcatcatagaagtgttgttgaatcgaaggcaaaagaggaagctgcaagggtcttgatttggatgaaggacatctgagatgcactttaaatccaacttgatggaaaatatacagttcctcaacaggagagattctggcttgacgccaaaggggtggacaggacataaaaagccattgcaaaatctccttgttcagctgtatgtgaaatgttgacactgcctatttgaaatataaaggaatggttttgttgacgaaatgagtctgcctagacttatgtttttctttaaaatgccttggcagttagtttctgaagttagaaagaagattaggatcaggatcattgttgatttgtatgttcaacaatctcaatgaacaattccacattgcaattaacttattcttgttgtattaaccactggataccattggacaatatgcagtaagatgtagcaatcaaagtgtttaaaccttgagtgggttagtatcgatttgctgcgtgagtttgtaaactttgagctttgttttctcataaaatatgtcattagtagcaataatataacagtgccaaagtactttcaaacatgaatcagtatagtgagcagttctgaataagaactacatgtcaaatatccagtaggaagtcaacatgaatatccatataactggcaatatatttgggttgaggccaataaatcgagtttcatgctaggatcacttcgttgcaccaatatgtaagatcttgtttccacctaaagaatttatgaatggagacaaatgtatttgcttgattggatggtcaaattcaaaatcgtaagtattttcactagaatgtagtttagcaaaccggtgaactttgttagctttaaaacatttttatccccgttgcaatacacgagcacttaactagtattgtaaacactccgtgattaatccaatctagttgagtttctccatctcacattcaacaccctactcacgggctttctcgatgccaacaaacactaaaaccattcccgacgtcgttgacgccccgagctcacaaacactaaaccatcctctcctcgctgttctgctagctcaagaatagtaaaagaaattgattttaatctgcatcttgggttcttagttctcacaggttcttgcactgacggagcagcttggaatcaagccggacattgtgtacaacgaacagaaacaaccatcggtgtgcggcggagatttgtgaagaggggacgacagataaaggttcaatgccaaggccaacaagttatggcggttcatatgtactgacatacaacccattcttgaacgccgctggcggtagcgccgcgcgcgacgcccagtccgggagggcgccgccgccgccgcttgctcgtcgtcgcaccacaggattgggagggggccgctcacgcccatcgacctcctcatccatcgctgctaccgctggcctccatcccctcgcactgctaccgtcagcctcttccctcgccaccgaccctgccgcgctgctgccgctggcctccgcccctaccgcactctccgcccaacttgtcaagctcttaccactaatacatacatgatagatttcctcctttttttaatatgcagtatataactggaaccgcacgaaaaaatggggggaccggcgcgaaactgtcgaccacacgggaaaatgcatttttccgtgcgaacgtcttaacccaaccacacgggataattctcattatcccgtgcggtcaacttaagaagatcacacggaaaaatcatttttcgcgtgcgggctttttaagtggaccgcacggaaaaatactctctcttttctctctcacccatttcaaatttttcacactctctcttcttttttcctttttattttctctccttctttactctcctcgatctcctcccctcccctctctctgcctccttttctcctccccacccctctctctcctctctctcctctctctctgtctctctgcgcgcgccgccggctccgtgttggcggcaattaaatgccgattctataccgccaaattctgcataaagtacggataataaaacatccaacatagtgataggtgcttaatctcacatattccacaagtgttggtatatatttgtatttagatgataaactcagatgctgggaggaaaatcagactaaagtgaggataaatgtgtatccctgcaaggatgggttgtgaacttcatcaaaacatcagtaaatcgacccaaaataccgaagaatgaatagagaaggatcaggggagaacatgggctgaaggccaggccaggagggcccagcccaggttcggccaaaccccctggttcggccgaaccaccaccaccaccgttggatgtggggtttggcgtggacgtcccagatgcatccctaatgacggttggagggcacttcggacatttccccttcgccaaccgtcatacctacccctatataaggacatcatctcactcacttcaacacacacttccaagcttgagcttaattataagaggctctattgtactatattgtatactagaataggaagagagtagagtagaagaagtcagaagaattccggagttgtcggtaatcttctcctattttcttttattccgtttattactctaaatttaatataatattcttcttaagtaatttagatttatcttgtgagaattatctcatggttagtttctaaatagcatacgggattattgtctactataatcaactaaaatatagtgattgctttggtgagttataaacactaaagtagatagtaattgcttagatatagtgttcagacagttgttatccagtaattgctgcgtatcccacagtatgtttgaggtgggtgtagaggtggtgacagccctcgagatcacttaagtcctctctgtccgggtacgtagtagagcgccatctaggaacatcgggttgccagtgcctgaagtattgcatctatgaacagcgggttgctagtgcctgaagtattgcgttaggattaaaattaagttttccctggttggtgtccttgtatgaactggaggaagatctgaccacacacgttcccttggattctatacccttagaatactccgtatggagaagtgctacatcggtatatccgtgcgcttgcggaaacacttcgcgtgcacgcgcggcgggcgc

SEQ ID NO: 7536 - DNA, 50740 bp, Oryza sativa
cccgcgaccaccgatccggcggaggctttctctcgcctcgcaccaacgcctccacgctccacttccgcctcacccaccgcgagcacttcgcgctcaacgccaccgcttccgatgtgctcgcgcaccttctcgcccgggacaccgcgcgcgccgccctgcttgctgcacccaacaatgccacgcgcccgcgctgccgcggcggcttcgtggcgcccctgctgtccgacctgctgcaggggagcagggagctccagctccacgagcaccacaggcaccacgggcacgtccaccgcccgcccccatgcgtcgcgcccgtagccgccaccgtagtcgccttcgctcggccgtcgccgcgacgccgccgtccgccgcccgccctcgtgcacacctgtagacaaagagagattgaggggaagaggggaagagagagagagattgagaggaaagtaggaaagagagaggtgggagagtatgacagacgggtcccaccattttttattaaaaaaacgctggctgggatgccacgtgtacgccacgtagaccaaaaccactgcggattaggttgaggggggtaattcgtccagtttgtatagttgggggcgaagaatgtccggttttgtggttaggggtggtaattcggacgaccgcgatagttcagggggtaattcgtactttttctatttccaaatcatatttttcccacagtacaggaatgtaaaaactgatctaggtaggctgggaggagaagaggagggagtgggctggcccggaaggagggcaaaaagggaggaaggaagaagagggagaggaagaggacttcggccgggggtcgagggacagaggggaagactctgtgccagacttggcctaaatgaaggagatggattatttttaggtttttcttttttaatatgaactctgaaaattgtttttgttgcttaataaatatttctgacgctctgaaaattcaaataaaatttgagggctccttttagaccatggataatttaacaaaaatactccgggacacattcagatttttcatgtacgagttttgatgtttgtcaatttctttttgagttttaattaattctattattccttttggagaatgatttttaattgggatgaatttatcaagacgtgatagattctttgcatatttttagaataaaaatgtaaattttagacttgggtggcaagtgatatgcatatggtggtagttgcataccgataggggggagtgtttgtctgagtcaatttaggaccgaactacatgtcacccacttatgtatactgtactattcctccctccaaaaccgcgtagctagcccatccaacgagcggacccacttacacataccacttcacttatacttttgtgctcgcttggtgtaaaagggttaacccgggagtgatatggttggagggacaagcccttataagttggttcaactcttgctaaactagcaaggactaaacgtgctgtgtgtggcctagatctggcgcacgcggagtgacgtgaagtcgccatgctggtgtgttgaacacgttgtcccttgttggcatgtaagggaagtgtcccgacctagatgcttcctgggtggggtgaacatgaggcggaatttggaatacctagggacgtggttgtgccgtggggacgtggttgtgccgtgctcatcgggggtacccctgatctagctgaccccctggtgtactccggtgctggggtgtgttgaaaggaaggacgactgtgagatggttgtgctgcttcgtacccgcggcatgacgaggagggaccactgtgatccacgctggaatgtcggggtagtggtggtgatgccctacgggccgacggctgcaccacatctgccgcgctccgacaggagacacgacgaagtagtgcggcagcacgggcacggaagttgcgaaggatgctcgccacgtcgtcaggcctgacggctggaggtcttgacggttggaggtctcgtctctagtctttgcagcaaggtgtccgactcgacttgcacgtgctcaacaaattttgcatgttccacaaataagcaagacaattaaaattatgatatagttgcacatttattcaaagtattgaataagttgcacatttattacgaatattgaccaagttgcacatttataaaaaatacttaactagcacatttattaaaaatattgaactagttccacatttattagaaatactgaactagttgctcatattccgcatgttccacaagtaaacacataccattgagttgtaagctgatcgaggctgaggggcaaacgtgtcagtaatcgctgcctggtgggggacggtgctatctccttgtggcggaaaacacctccatcgtgtgacactgcggtatcaacgaaggtaggccccatagtaactcccatcgtctggaggtttctgaagcgccaaattatcaactgcgtgctcccactcttgtacagtcggctgaaccatggtcacaataacaagctcgtaggaaagcccgagcccctttcgggaatacctgcacagcaagaaatggacacatttattcaaaatcgtacgtacacatatttttgttaaaaattggattaaacaactgttatgtgtaccaacctctgaagactatcagccaaagcatgaccaactctgggagaaaagtcctgatacatgcccaactgtttaagaaccctttggacattgtgtggctcgacgtgcacgtccagcacgaggtgacaagtcgtcctccatagtgcttgatcccgcgtgcaaaggtccgcgagaccgtgcggtgcacgatcattgacatcgtgttgagtgtacggagtctaccgcacacggtcaggcgtaagctgatcaaagttagctacgaactgtgtgtacacacgacgcgtcgtcccgctaacccacttcggctgtaacaagaagatagtacttatgattagttatatcaggaaattattcaacttgtggtgaaccgtatataatgagaagacaaacgaattaaacaaaaattacctcacagtgtgtccacaaggatcccatagtgggacgattgtcgaggtcaccaaccccggacttgtacatctctcgcaattcgtagtttgcgtacgagtccagctgaggcctcccaatgtcgaagcgctcgtgcgcccacaacatgagtagcaacgggcatccagggagtgaatttgcttgctgttcctcaagcaagcatcacatagtccagcatatgtggccgcaagtaccgccgacccccaactgtactgtggaaactctgcgataggtaactctgcaatctgctccgcgtagtggatgaagtgcttgtccaccgagtcagtgtgagttcctgtgaacatcacccatccaaacaaccacaacaggtaagcgactaagtgccgtcgcacgatccagtcctcctgatcatcaggaaagacatcatgtcgaaactgattcaaccaactttttgtcggcccgtgcccatccatgagatcctccagtgcaacaggcagcacaccaccaaaattggccagaaggtcgtctgcccatccagcttgtaccattgttgggccaactgctggcccagctatcggcagacccaacagataagacacatcctgcaaagtgggcaccatctctccaactgtgaggtggaaagtgtgggtctcaagcctccatctatccacgagagcactcagaagcgccgcgtgaaggctcgaccaatcgtgcaaaggtcaacaagccagctgctctcaacctacaagaagagagagtgcaagttattaatacagggaaatgtcaaaatcttataaggttaaaacaatatattattacgcaccttggaacccaacgaggatcaatacgccaatattgatccggtcctcgcattttcagcacattgcagaaagttcctctactaagtcgtcgcgaccgatggttcctatcaatctccttgtcgatcagctgcacgtcatattgttcagccatacctgcatattgaaaaccatattagtacaatgttcatatggtaacagtaaattaaatgcatgacacataattcagatacataatttagataattaaattgcaacacatttattcaatttaaaattacaataccttcagataataaaagtgcagtatattgcaaattaaaactacaagccaacaacacgtagatttggatattaaaagtgcagtgcacagttcgaaaattaaattacaagcccattacaaatagattcggatattacaaaaaacaagcccacaacacattgattcggaagttaaaagtggaggattgttcaaattaaaaatacagacgcgctaaacataaatttgaagacaccaacttaaaagtacaagcccaccaaggctattagcgatctaaggattatttttcttcttcgactttccctttggaacgcgacgaacatcagctcctgcggcgtctttccctacattgtacatggcacaatctttacgggcatggttctccccacaaagaatgcaagctttcttacgacgagaacgatctttcgctttagcttcatccataaggttcttgatcctacgcgactggcgacaacctttagtatcaactaataaatgaatccagaacccaattggcttgccctggaggaggacgagtgaaatcgcacacggctcgccaaccacgcaattcacctcgccaagttgcctcccacgcttccttcataaagtacggagaaacaaaatggtttgcatcaacacctccttttgtggaagcgacaagaacatgagaacatggctggtgtaacagataaggcttgtgcaattgcatttgcaagcatgatactctggccacaacgtgcattccaatgtgatgtcagtagtcccaatgccgacaccactcttgtcacgaagtcgtatctcaaatagcaactctctattcccagcaggccacactctatgcattcctcccttcttgcttttctcatccatgtactgtgtaattgctgggctatacttaacactgggtttgctgaggttaagactagccatagaataccttttacagagatacttctgtgtacccctagtgatgccctcaaggatagcaacaagtggtagcggtcgtgtatttttttcataacccagttatacacttcagcaagattagttgttatcacactatacctcgatccatttgtatcgtacaataacgaccatttctcccttggctcaaattcaacccactccgtgaagcacttcgtggcccttccgcgcttcctgcaccgagtaatacttggtgcttcattaggaatgggttcaagtccctccggctcctcctgtctggcaactacgggctttttcctaacctcttccatgtgtgtagtggtcaaatgatcaagttgttcccatatagcatcaaactttctttgttgattctgcttgcataacttcttgaacaggtccatcaatctcttactcctaaattgcctgtaaaaattagccccaagatgtcgcatggaccatctgctatgcaaatctggccatggcacggactctgtcacatcttcttgaagcttctgtatcgtcgataacaaaccggcatgtcggtcatgcagaacacaaacatttggtctgttttgaacaacacacattttaatgtgccacaaaaaccatagccagcttgatgtgttctcgctttcaacaaatgcaaaagcaacaggaatgacatggctatccgcgtcgactccgatcacggttagaattgttcctctatacttgcttgtcgtgaaagtgccatcaacacagagcaaaggaatgcaatttctaaaggcctctatcatgcacccaaatgaccagaaagcccgacgaagaacattctctctattttcattcacctcgtggagaatagccatgtgtgtgcctgggtttcttgcctgcatcacctccaatagtgggggaagattgtgataagaatcctcataagttccaaacctcatctcaagtgctttctgttttgccctccaagccttgacatacgatatctcatatccgtactctttctctacgtcatgcattattgtgaaaggggacaaagatgtttttctaaccacctttgaatataccatttgtgccacaaataccgctgtcatgttcctatgtaccagatgagtattctccaacaaacacgtatgttgctcaaccctcgaagctacccataaagtgtcatgttgtggcttgtaaccatgcactctccaaggacatccagcctgtgtgcacttcacgtcgtacgtcgtcctatttgaaaccttcaccctgaactcacgcttctggtcaaatgcccacctcttcaccgcatcttgtaagtgacctttgtcatgaaacatctgcccaacttgcacctgcttactatcataacgccagtgggcatctaaaccatcgttaaccttcatacgactcatcgatatggtcgtccaatcatcgggtatgttggtttcgttgtcccacagtgttgtatcttctccttccactacaagcgcaatgtattcttcgttttccacttccatccgatccactaccgcctcattctcctttgctgcatcaacacgcataggcgaatctggttcttcatcgtccgagtcgtcggcctcacgattattgtcacgaacaatgacctctgcttgtgtattaccctctactacttcttcccccgaccttgctcagtccgccaaacattttcagcttgtgcaccttccaatggagtttcttccaccacggcatgacttgactcccccgatcgatcaacacatgttgtcttctgcaccactattgccaggctataccctttctcccttactttactaacaaacttcctccaactcccagttgacgcaacctccactactctccgctgccatccatgttgaccccttactggccacacggcatttatgacaaatttatcgagcactggatctaccccaaacatattatacaaccaccctaacacatcgttcaaacccatatgctccggtgcattcagactagtattatagaaggcatatacagtcaaatccactccgctatcacatatttgtataggagcatctccataatacagacgaatgggcatatcacctgacatcctgataaaacattataaattgtcttattatacggtactgaccgacacatatcttacccttacgtttaataatcatcatacccagttgtactaacctctacctatttaaacacatcaaacattaaatatatgtactaccatgtactaacttaactaatttcagcatacgactaatttaatatctctactcacatttcacaatgacaactgttaacgtatcatatgatatgtagtcacattggagaatgataaacaattaacaaatcacaagtcttcttctataagattaaaaaatcgtaatcctcatacttagggattacaaatttatacctcaatgtcgtcgcttcaagccgttgccttcactgccctccaggccggcgccgccctggccttgtctctggccgcccacaccctcccctcactccctccagcgcgcacggcgacagcactggcgactgcaatggtgacgatggcgatgtggtcctcctcaatcggtttagagaaagctaggttcgggctgccgatataaagggacctgtcgaatgcccattgttcgacaggggcggcggcgggaccagtcgaactccccgtattcgacaggccgcgcggcaccgggtggtgggcccagtcgaacaaccccggttcgataggccgtcctgtcaaatggctacagttcgatagggcccaatcgaaggctggatgttcgataagccccttgtcgttcctcccccattcgataggagcctatttttgcgatttccaacagatggccgctaattttgcgattttccataaaaataatattaattctcaaaaaaattccttcaaggcatggcaacatgtgttgaattgtgtcttctcggtacaattgtgcacatctggccagagtaaaactatttaaatagttgtgccctcggttatgggcgatcaaccagattcaccgtgattaatcacattctattaattaacttgacttaatgaattggtttagatcaggtagaatggttgggcctgttcaacatggtgtagcgttgttcagtggagatttaatagtgccttaattaatcaaccgttttactattttaaactataaaatgtttgcaatcgcctttatgcaactagccacaaacccctctttgttcccccttgcatgtctgcatcattggtgtggcttgctgaatatttgtactcaaccttgctattattcaccctttttcaaaagtgtagtgtttctgagttgaagacgaagttagaggaccaaggcttataccccagttgagttttgcctatggagtggagctaaagccccattaggatcgcctttgtccgttgttgctgttttttttctgtgtgaggactaagtgcctcttatgtaagtatttacagtttatttatatttggatctgtatatttacttgttgttttgtgtaccctagctgattcctggacagggacttaatacacaaaatagtctgaaaatttgggctaaatttctagatgtgacagttttaggctttgcagagtttgtacagatatccacatgatatgaacactctaatttgttttgtgctcgccaggcactgccatactcttcatggtgaatgtggtctagaggttataacaaggcttttacattgactaccgtctgaccttgcatgagcacgatgaattttcaatccctactaagtccagaacattagtgttgttaggacggttggcctatcgaacctgacaccgtggcgaagcaactcttcccatgaggcattcagcattgtattggacaaacttagacacccacgctgtgaggcggaacagtacactcatcccctcacagaaaacacacacttaggactagttcactcatcctaaaattcaacacacacatgggtagctcctctagatagcctacagttcactcgtggccactacctatactgcatcggtctccttaatgcaatgttagacaagtactcaacttaataggccaaggttaccccataaataacatatgtggatgtacggtatatgtgatatcccggcccaattagaatgaggcctgtgtggcccatgagagctgtgtttaaacaataacacgctttagtttcaaattatatgcatgtatcattactaactacgcgattatttgtttctccctcttatgcaaacagacgatgagtacggttcggcatcgacgtatcatggaatgcctacttactcccctcgcacagcattcgttgaggacttcttttccactgagcctcctcaaggggaactagggatggattactggcacgcagcacctcaggtgacacagccgacgcaggagatgggggccattcaggctcccaatgtgacaccacagcaggcagcaagagagaggcacccccctgataatttgacttatcccactgagcaggttaggcgtaggaagaaggggggacctagcaagcgtgcgaagggcactgatcgtccttgagttatctatttctgttaaaaattgagacatttatgttgtgtccgtactatttgtgaacaatttattattaacttagtaactatcagtactatttttgtcttttttttcataccctttccaatgacggagtacaaaagattcgcttcgaactttgcagcgcactatactacaataatgaaaatataaattcattcatccaaatattttaaccaaaaaataaatactaaaatttcccacaaaatattattaaaaaatattaattgtagaaaagttccagaaaaaaattcacaaaattcacaaataaaaattcagcctgaggacaagtcgaagaacagttgttcgacagggatcctatcgaaccaacgctattcgactgctacctgtcgaactgcccctgttcgacaaggcgccagtcgaactacccctcttctatcgcggtccacccgttcgataaggcgcctatcgaactgcacctattcgacaggaccccatttttgcgattttccacaggtggccactagttttgcgattttccataaaaataatattaattctcaaaaaaattctgccttgaagtaccacgatgatactgcaaagggggaaatggtaactccccctaaccaatcgcactacacacctcaggtttcaccccctccttaagccaagtcgggtaggcccctctcgtgcctaggtgaatccagaagcagcataggccgtctgtcgacctccaattttggaaatcggaaatcttctgtatttatcagtaccaatccctggatcagtagttggtacacacatacatagccaaatcacaacatatcatgaatgaattcaggctaagagagttaaatgcttacattagggcaaggcaggccaacaactatcagagaacaacagcggaagacaaaataatacaagggcccggttgacatgccacaagcaatcgactggggaacgagacctagaatggaaccgcactccgatcatcttgttaggtacgcaagcatactaacaagggcttctcttcaacactctgctaaaagatatatatagagcaacaatgagtacaaaagtactcaacaagccaccacacaaaatgcaataatgtacaggataatacaaggagtggctatggtttctttgcgtaaagctgagttttcaaatattgtttcacaaacctaagacctagcataaactgatcaagttttaattccattattcattaaacagcgatggttctgtccaccatctattgtgttcccaaggatagcttctcgccactggtcatcatggttttctggggtctaccacttctcgcctctcgagaagttgatccaccagcacaaaatcatcatgcatatcccatccatcattttaagaatttagagtctagccaagtgtaatacatatcccggtgctcaatatccgcgagcatggctattcgaatagattgatttactcacactgcagtggatgtacactttacccgtactcgtactccgcgacttgcccatcacataagcctatgtcccaacgaatgagacttgctacggcaaagcctttcaacaacctcactttggcagtacccgctccatgaactttagtcctcatgcactccaggcgtccaaggtttctagcagtgagaggagttctggcgctcgcgagggggaaagactcacacattcattaagttatagttaagtttaggtttgcacatgacagtcctaccgatggcgacaccattgtaggcacccgccccttgcggtcctaccaatggctgccccaccgtaggccctgcctcacacacaacaagaaaaccactatggcttgggtaccgcctccgctcggctatttactccgctaggtctatacccacacgagaagtacggttgtacaggggttgtttcatgcttaacttcatggctcggtccttaactaaccagggacggcactagccttttccggacaccacccaagtcctctagccgccccagtcgaaaacagttgtttagtttcatttttttcatttaacaaatcatgtcaccaatgttcatggcaatgtggcgctcatatctccacatgccgaatctcaactaccttccctaaggtagttgcccaagcatatagcatttaataaatatgagaatgcatgattctaaaatagcattactaagcttttgtcataattgactaaggactcatacgtaatcatgggtacaaggaaataatgagggaaataataatcaaaggcatggcataataacaagtaggatattcatcttgcatgcaattttatttataaacaaaacaatttcgcaattcggatcaacatgctaaagggatggggtgatgacttgcctgctcaggatagttcttattcttgatataatcttgatcaacgttcacctcctagaagctgcatatgttacctcacaactaattgatacaccaatactataatacgcgagagaaaccaatattcaaacaacaatcaaatatgcacaaacaaaatataattgttgaagacatacctaaggctgttggtactactcgcgtttgctaatggataatctcttaatcattcttattgtcatggcggcttatttaggagctaaccagtataatatgaatgaggtacatactactaatatgtggtttattctagctacagggttatgggagggttatagtcaaacaaataattacagtgtttcatttgtattattattttatcaatggagtcattattttaatcatgatcaggttttacttgtcactataaataaaaaaaggtaataattatccatgctatatatgttagatttgtgaggttaataatattatagttacagattatcttattgtataactttataactttataatgaacaatcctcagttgtggttaaactaaaattatgtgtggtcaagatttataactagcactagtatttagctaatatactggttcttcatttattacctagtttaatatatgcaacttgtagattatctaaaagggtatgtgtgtgcaacagtatattaacattgaaccatttactgaatataggcaatcgactataagctatatcatattggtgatctaatcacactagctctgttattatttctcaaaagcaagtcaacgattcatctatgagtattcatattttagttacaggatatgaggccaaatttgatttagataacctataagtcatgggtttaattatatggccatcgaatattaaataatactagaattttcctatacatccattcatttgagacattacttatatttaatttacatggttgctactgtgacaaaacatgctagaaacaaatattattacatctactctactgtataataccaattttatttattagcatattttcaagttgaccataatctaatcatttgatattaattatgtaataattataaatatattttattaaacagtgagttatataccattggaaagcttatgaatttagatgaatttaggttcaagtttcacttgaatcggagctaaaatgaataagttatgctagtttaaatattcaaatttgaataattgcgaaacagtactgttcatatccgatttattttaatccgaaacctatctacagctcagagtcacagacgtgtggggtcaggggtcttattatcttttctactgaattatttttgctaggggaaatatgggagtgggcccgacctgtcagcgacttggccaggagtcgtcttctaccttcgtcttattcttcctcccgaccgagcgggagcagcatgggaacacggcgcgcacgggaaggccggccgagggtgacccgacggcagccaggagaggcgcggaggagctccagcgatctcccgccggtgaccacgacgcgtggcgatgcggaggcgagcggcggctagggcaaaagggagagtttccgatcgaattggtgggcgtgggagtatctacggggtatggggatttcttttttctcgctagatggagaggggagctcccgggatagtctacccacgaggggcttgccggcggcggaacggcggtcgggccggcacggccataggcattaatagtacaaactggagccgacgctagctattagaggtacagagaatgctatggtctcgagggtttacccagggatggagagacagtgaagggcggcgacgcgtggtgcagtgcagacaaagcagaggtggctagcggtcggcgacacacgaaagtgttcgacgcgtgtttcccggcgtccagcggtcctcggcttccccaatggcaacggcggcagcacgacacccccgcccccccgccccccactccctccaacctccagctctggacggggagtcccgcaatatggtctttggtagcggtgagattacgcacacaaggtgttcgacgcaatgtattcgggaagaaagctgagaggaatggggatttttgttgggggcttagcttaggttgtaaggaaacggtgtggataagatcgccagcacattcccaggcgaaatagagctctaatggctatcggataagggcaaggaggtggatgacacggataaggtttgatctcctcctccattaaggttctatggctccatcatcatacctaaagcctaaagtctgtgcgttctagctctagctgtggtaggaggctccgttttacccagcggacataaggaggggcgccaaaacatcatgagatgtggataaggttttctcttctctctcacactcagggatttggggaatcaaatggccggtattaggtttgcaggcctcggagctaggggtgacgaagggcgaggtggcggccgttatccctcggcgtcgagaggcgacgcgcgatggcgacatcgatgacgccggcgctcgtggcggcatgggcggagcggcttccgcggctgaggtccatgtgcgagcgcggcatggcgcacggtctcgcggtggagtggcgcacggttaagtaaagacggacgcgtggtgggggctgggtcgctgggtgttcgactcactaggttcgagtcgaacacctggcgcgcaatgaataatgccatgctggaataaaaagagatttttagggttttggtttatttaaaaatcgagaaagatagctaattcaatttgtattttcaccagtgcatttgatcaacaatattaagtattcaaatgtgaatttggtccaaaattaatattgtccaatattttaaattttactatagcttttatgatttcctatataccttgtaggctctgatatttataaaaattaattaaaatattctaatgtgactactattaatacaatagctcattggttgaacttatttgtctagcaatgtattttacatggaaaagtttaatctattttattctagaggtaatttgagacttggtataatattgatctaagtatttaattagatactcccatccttcaatctttatatatagggataaatttattttatgtgaacaattattttatatgagtgaattttatgccatgagagatttgttgtaagttatagatattaatttaattatttcagtgaaacactcctatatatatagagtcattgtagtgacgactatttcgtggttacttagatgtcaggacactattcaatccgtaacttatagaaattaataagtgacttgtactttatttggctttgctatcatgtgcacaaatatttatgggatcgatagatagcgtattcttgcaaattgtacatctttaatttaatgtttcattgtgacaatttatagtttggcaagcaatagcaaccataacatccagcatgatgcaaaagttttaaaaagttcgaaattttagtgatttttattgtcgggaattttcagggtgttacaccgtcgcaaggcccatccatactccattacgtccacccttgcccgggtacgttagctaggaaaatctacgctacaaagtgcagctgttgcccacgctggcttgtgtaagcgcggtaattctattcttccagggtttcccccgaaccggtccttaattgccatgggtgcgactagcaaaaccatacacccagagctcgttgttaagccatattttagttagataattacgaccaataaaacatgaccatatgtctcgagctcatagctcatcaagatgctaatgcatatagtgtgattatcccataatgtgagctagtggtaattaaaaatggctaagcatataaagattctagcaagatcaacataagtgacacaagctagtcaaattatcacccaagcttgacaaaggagggatcacaagtaaacatggaacacgcgaggaaataggtagtcccataatcccatgtactcctaattagcaaaacgtgcaattttagttgcaaagagtaaaacatttgtaaattagcaaggagggctaccggtttgaggaagaactggggagtgaagctcattagctgcaaacttgagggggatcaatcaataaaacatcacgcaccaacagaaaagagaaggtgagaatttcccccatactaccaccacaaccacatcctctagtaaattaaacttaaaacaatccatcaccactgtgtagtttttccctagcaccttagttcagcttttaatagaaaagaaggagcggtagcaggctagcagcagataaaatggaggaggaaagaataggagcacttacctaggggatgattgctcggtgaagtcgagctccatggggcgctggtcatggcgtctgggtctagagctccatgcgtgaccctattctagccatgggggggtccacttcttggagctgtgggttggagagcatagagagaaggattaagaggggaggtcttgctggtagcctgggcattgaggtcgccgagagcaacatggtggtagcagcagcagtactagagtagtagagtgaggatttgagggaaaagatatccactgctaatggcaaatggaggaaggaagaaggggattagctagctgatgcttttacctgcaggagtgataagaggggagagacggggagaggtttctgcaggtgagagaatagagaagaaaggaaaatgtggactgattgctagatgtacattagtaggctacacagaacaccaacctgagcatagtgacccaattctgtagtccaagtatagtttgataaattatctagcacatcacaactggagtttcggtacaataaaaaggttacaaatttgtaagcacatttgtatttgtaaattattgtatttctattagtatagtttaattaaatctcgacgcatttgacggaatacaacaagggaactagaggcggagtctggtcagttgggagcgccagctatttttgatttgaactacgagaattcaggcaagcgaacctttgatcttgatgatttgaattattttgcataaaccttattttgcttcatgaaactgtcaccttgcataaaatagatttaccaaactataagtcggatatataaggatgatgatagatactgggaggggcagttgatggagaaactgatcaccttcggaccttccaacacttattagggtgtccacagatggggattgactggaaacgggaccctttacatatggctataatataaggactaaaatcactctcacatgcatatgtgtgctgtataaaaatcatgtcaaccatatccttgttgcaaggcgagcaacgctttgtatcttatcaagttcttacactccgcatggtgtgtaatgatagatagtgctaagatgggagaccctataaaccccatagaacattagtacttggatgggagatgatataaaccccatcaagatagtagcacgtggtggagtggagtgtaatgtgctgaaataagagaagagcatctagctatctattagtccattaaattttctataaacgcttctaaaccgccacgtggcgctcctacaaatgttcttatatcgccacgtggcaggtggacccaatattttataaatcattaaattatactaattttcaccactacatcttatctccaagaatgaaaatctgtacacgctccactttccgttcgcatatttatcacgtaatatatttgaaaagaaaaacagaacgtgcacatatatgtacatactctccctccctccctgtctgaccctcttcccttccgtctcttctctctcctaatttctacctctaacaaccatacattataaaaattaattatatattaaacttcctacaaacgcttttaaaccgccacgtagcgctcctacaaacgctcctatatcgccacgtggtaggtggacctaatattttataaaccattaaattatactaattttcaccattacatcttatctccaagaaagaaaatatgtacacgctccactttccgttcgcatattcatcacgtaatatatttgaaaagaaaaatagaacgtgcacatatatgtacgtactctccctccctccctctctgacctccacccttccgtctcttctctctcctattttctacctctaacaaccatacatagtataaaaattaattagttagctaaataatctattagtacatatgtttttatataaaaattataatatatatacccttaattttcggtgacaaacccagaaaaaaatattgggacatcacttggatatataccctttcttttcaatgtcaaaccaagaaaaatattattatgacactgcacatataaattatttaattattaattgatattattaattaatatggcatgaattagttaaaatcgaataatctaccttgaaggtgaatgtagttacgccactatatattttgtatagcaaccaaatagcaataagatattatagaaatgaacatatattttgacatctggaaccattcgacaaacatgaaccatgaataaattttcatataaaagaataatttatctagcggccacaaagaaacattaaagagtaaattgcatcgtcggtacacgaacttgtcaggtgggtgcaatatagtgcacaaacttgtaaaatgttcgttttggtgcatgaacttgcgtggtgcgtgcgggagaagtcaaaaaggacactatatgactaatcctattgatttaggggctgattaggatgctatgtaaacatatatatatatatatatatatatatgagaaggttgccactagacttacacctattcaataaaatatagaataggatttagtgatagtagaaaaagatttaaaatatcgagcactgatataagggttagaaacatataaaattcatcatttcaatgatgaaggataaagtagagactaaatttataaatattgcatgtcctatgcatacttgctacaggtatacacgtcgcatcctaatcaacgtcaacttcataaaattgacattgccaagttattttggtcctcattcgcacgaaccagacaagttcgtgtactgaaacgagcattttataagtttatatactaaattgcacccacctaacaagtttgtgtaccaccaatgcaatttactcaacattaaaataaatgaacatgtattatgtaatcttaaatcagtgattccacaaaatttcatagcgaaattagatcgacggtattaggataagaatttataaactcactggctaaaggagtaatttatctagggaccacactattacactttgcatataatccaaattaccgtacaaaattgtaaaacaatttaacaatatatgttgcttcatcatacattaattactttgtaagcacgcatagaaaaattggatatataatatgtaggtgaaaaagaactaacttaactttgactaacataacaattatgaaaaaaatattttacctttagtcagatgcaacaatatccaaataattatgtcttttgaaatatgcacaattgataagacaaattaaatcagttgatcctttacataagcgctctaaaatataatatatggtgccatttaatggacttacaggtccttttaacaaccagatgaatattgctttggcttccataccttctatatataaagataattttgtctattttatatgcgtaggctattgaaaatgtgaatactcctataataagtagtagtagagaagaagaagttatgtttgttattcgtacacatgcataaccaactttaaaatccatttagattttataacatacttattataaacacgctatactgacaactcagacaaaattgcagccatggaacacatataatgattaacttatttcgattttctatgtaccaagaaaaatcaaggtatatcaaatgttagcaaactatgatacgcatatatttatatgtattgtttcacatagggaatatcaataatctatgtaccatgataattttaagccactttgtcagttctacatattggcaataagaaaaaggtggtgtacgagatcgaaagtggataggtagaaagcaaaaggtttagacaagttcagaccctcttgacaaagaggtaatacccctactcctgtttcggcgattgaattcgtcgagtgttgtattgatctaacgatcttggctgtggttatgccttcaaaacaccccgtgtccttgtataggttggtgcaaggttagaagggtagaaacctaaccgaatccggcatcggtttccttatatattacataaccgtatatgagtaagacttatgagacttgccgtaggaaacaaggcaataataaatccccagtcctaattattacataattcctagactcgacccacctcctatcttcaatcgaatatccaagcgagtgggtatgtggtatccataatatccacacacttatccattatttttcattacactattacataaatgtttttttacatatgcggctaaaatgttaagccgcttgtattgatgccttagctgcctcaacctcagtggccacttttgcaaataacatttgtagtttacacgggtggagaaacctttattagttccggatggtaacccccttagtcccggttctcaaaccggaactaccaatccgggactaaagatcgctatcattagtcctgggtggaataaccgggactaaagatcgatctttagttaccggtaccaaccgagactaaagatcgatctacctttttttttatttgcatggccctgttgctgcatggtttatatatatatatatatgtgtgtgtgtgtgtgtgtgtgtgtgtacacatatgtatatatatatatacatgtatatatatacatgtatatataaatgtatgtatatatatatatatattacatatatacatgaataatatatatatgtatttatacatatttatatgtatgcaaatgcatatggatatgtgtacaaaatagacatatatgtatatattaaagcacttaacattttatgtgcatatatgaccaaaatatatatttacagtaaagtaaatgtgtacatatataaatatagacatgtattacaattcattatgtcctagctacgacttcgacgtagtcgttatctcagaagataacgtcttatgaattgtagatttgtcgtagtagaattcaccctcgggattaaggacttgttctttgatgaatcccatgagttgttcttgaaccgccgtgataaagtccttgtgtgtgaggttgtccctcatgtgaataacctatgaatgtatgaagttatattaattagtaaacaagaaatcgatacgtatgcaatgaaattttgaatggtttatttatacgtacatcgagctctcttgtggtgatgatttgagttgcaaagcagtggcaatactcacatacgtagtagccacacaagttagttccctcttcctgctttgcacactatatacatgacaaacgacgagagatttaatatacacttatatttgaattagagattcaatataaatttagatcatgtactcactggaaatttgaacctctggctaagtttttctttccaagtgccgcggaccaaatgacagaaccgataccaagccctacatggagtttaaagctacgatttgtactagcaatagcaaaattcataataataacactggaacatatgacattacctatctataagttcaaaaacctggtcaaaagtagactcatctttattcattgagtcatagacattaactctgcatgcctccaagtcgaagagtaaaaggacccagtggaatatgcaatttgtgttagatgatatatgaaacactgtacatgtatatgtacgggaatgaaatttgttcggtagacaataaaaactaacgctgtgttgtacggcagtagtatgaacgtcttgaaatgctgctccttgaggagatggacgagattttcctcagtggcctgtggatacttggtgaccatttcgacgtttacattccgagggtcgatgaatccagtatcgaaaaccccccgccgtcgggcccattgaatctccattttacaacaataaaggaattgttatttatggtgtacatatatacaaggagctaattaaaggaacgtaagaaatataactctcaacgatacgtacaaaatccatgcgctcagaagagagacgtcgacgacgtctagctggtatagttcgtagatatccttaaaattgatccagagaacatcttctccttgtaagaagtcggcgttcttgatcctcgctccgataatctccctaccgctggtgctcatctctatgtaccgttcatggaattggtacgtctgtgtcggtagggactgtagctgctcaggtgatgaggacacaactaagcttggatataaccatgactaccttatgtattaatcaaccaaaggtgcatatgctctacattagatttacttgttatatatttgaacaaacgttgcaacacaatgagtttcgtgtgtttttgtttgcagaggtacttgcttgggcgaaagaaaagagaccgagcgtaaggaatgcatggatgattgaagaagttgattggggaccaaaccaagaccttctccaagtccacttccatctcaccacatcacttttggtccatagaagataagagataaagttctacacgttttggattcggattcgggcctcctagcagcatcaacttcaaatggatctaggcgctgatctagaaggaatttcggggtccatgagtacttgttgaaaagcttatggagtctactttcagatggttttggtcctgcatcaaaattcctactgagctgccgggaatctgcaaaacaagccatgtatctcatccagtccgaatctgatttgggttttgggccttgtaattgtgtcgtgggcttagcccaagggggtgtgcgccctagtgcaaccctaggacgtccctaatcacatttattcagtagccgtcatcgtttagagttgggttttacttagattattctgttaagaacagtttcgtcgctagatcggtttgtggaaccccaaattcgagtgcttaatcattcatatgcaatttggttgcaatctatcttgttctttcttgtgttcttcgattcgcatgcagggattagccttctcggcgaggtcaaccgggtttcagcacggttgataaccagaggagacgtagtgctgcgattgcggggctcagtagcgtgttcgttcagaagccggatcgagttgtgtctcgactccgtccaaatcaattgtttatcaatacctatcggaagatcaggacctaacatccctcatcagtaggtatcagagcccggttgcccgttaggtaatttaaattcccataaccagaaaattgccacacaaaaatatttattctttacctagacaatttgaactgttgcattgttctattagattttgcttcgttgaattttagattgcatcgtcgtgtcgagtgctggtttagttttagatttaattttagttttgagtaatgcatctgttcatcactttggtccagggttcatcactcaagtgtgtgagttgtacgtcagttttgggtccattttttcatctcgttggttgttgccgggacattgaaaaattgaatcgtctcgtcatcgggtttccatttttgtgatttggagaaattttttatgagttgccgtactgtgcacgtgaggagagtactgcgcgcgtgaggagagactccggatcaaatccgatctatccgtgaccgtccatattttcctctttatagaagtgttaagtaacggatttgagatattttttataaaaacagaacatacatgacatgagcaatccatttttgagatgatccaattttagttttgcactttatgtttgagtccttgtaatatttatatttacatttgagtccctgttcgaggtcagtggtcagtttctgttgaaaacaaaaacacacgaaactcattgtgtagcaacgtttgttcaaatatataacaagtaaatctaatgtagaacatatgcacctttggttgattaatacataaggtagtcacggttatatccgagctagttgtgccctcatcatcaggcttgacaagcggtttaccgagttcgtactggtgtctcacttctgccttagggattggtgcgctttaagcaactgagccctagttagcccggtgtcagaaatgaatttttttattccaaattcttgcccggtcactaacaactcgacctcctggtttggttgctctccaagctgagggacttttttggactttccagaatgtgctttcctaagtgttcgctcatagtccgttagctttaaggcctccttgagtggtcccgacatcttctggaagaacttcttggcactcgggtctataggaatcttcttttttggactctgaggcttcaattgcctcttcacttattctgccacgtaagcgtcgagctcctcttgcgtgcaatcgtacggtggctccttgttcttggcagcgtcaactttcgccttcttcgttgcccttgtgcgggcaagcggtggagcttggtgagttcttgacttggaaggtgccggaggacatggcagaggagcctgaggagaagtcgatgcaggagcctgaggaggagacggtgcaggagcctgatcagtaggagacggtgcaggagcctgaggaggagatggtggagccggaggggatggtgcacgagacaccgcttgtcgcccagggaggatgatgtagcgcttgcgccatagtataatggcgtggcttgtgtcgcgtagatacgtcttaccgtctcctccagggtagtccaactcgagttcctcgtacgcggcttccaccagttcaacttcgaccctcgagtatcctgctggaatcagcctgcagtggtaagtccctgaagggtccgttgggatggtcattcccgacgtaaccttcacgtgatgagaggttatctattagtaatcaacctaagcagaaacttgcggaatgtacaagtccaaaaaaacataaaactacgggcataccttgattgataagttcttgaagggaatatgcagctcacatggtgtccgctgcgtgatctcatcaatggggcaagtggtttcgtcctgagtttgcacggcgtccatgctctgtgatcctacctgccccgttgaggcgcagctgctacgattgcctgaggggctgaccattacaggaggaatgtatggctgggcatcatggcaccgatgtgcggccatgcgttcatccaccttccttgccacctcctcttgcatgctgagctcgtagctcgataccctgtactcaagatctgcaatcttcgcctcggtatctctcttgctcctcatccgactcttgtacgtgtggatgtcctccttgaatccaatcttccaaggaaccacgcctttccctcgtgttcgtccaggatgctcgggagtctgcagggcgagtgacagctcgtccttatctctgttgggtcagaacgtgccctgacaagaggcttccactacatccgttagtcgactggcagcctcgcgtatctgatcgctgaacaccagggagccgtcaacagggttaagcgttccaccgtgagcatagtaccagaacttcgatcgatccagccatttagcggtggccggttcgacacccctctcaatcaagccggcctccatctcctcccacttcagcattgtgacgctatagccatctgaccccaagaggtgatggtacttcttggcggcattttctttgtttctgtccatcatcgcttgcccttgttgccctgtcttgtaagcgacgaactcgtcccaatgatcccttagcttcgggaatacgtcgaagttcggtgtcagccccttcaggatgtatttcttgtagagatctcccttgaagctctggaattgttctaccattttcttaagagtccactgtttcactatgttctccgtacccgcagggagcgtgaacgtctcgagcattgtgatccacatcgtatctttctctgattccgggacaaagctgtcataatccccgcgtgcccttgttctgcgccagtacaccttgctgacaggcacgttatccttcacaacccaaccgctgtgtcgtacaaaattcttggctgcttcagccggggcactaggtcgatcgtcttcgtccacctcagttatgatgtgccgaccctctatcttcttcgcggcacctcgttgtccgcgtgccctcttctgtccagcggaggattgacttccactagcctccgcctccttgttcccctcctcagtcccctctgcatcactctccacgttcccctcctcgttcaggtactggtttggatcctcgttcccctcttcttcgttccagtactggctgcttccctctgcgattgtatcgtatagtatatgtttgtcatcgcgatcagccatctgttcatacaagaaatatttgcagccgtttgttatttacgtatataatatttgattagaactctaataatcatatattaaaactctaataatcatatatgctaagtctaataatcatatatgctaactctaataatcatatattaaaactataataatcatatatgctaactctgataatcatatattaatactctaataatcatatatgctaactctgataatcttatattaaaacgataaatattaatacatgctaagtctaataatcatatatgctaagtctaatattcatatatgctaactctaataatcatatatgctaagtcgaataatcatatatgctaagtcgaataattaatcatatattaaaactctaataatcttatgtgaaaactctaataatcatatatgctaagtcgaataatcatatatgctaagtctaataattaatcatatattaaaactctaataatcttatatgaaaactataataatcatatatgctgagtgtaataaccgtatatgctaagtctaagtttctaatattaaaactctaataatcatatatgctaagtctaaataatcatatattaatactctaataatcatatatgctaactctaataatcatatattaatactctaataatcatatattaatactctaataatcatatattaaaattcgtaataatcatatattaatactctaataatcatatattaaaactctaataatcatatatgctaagtctaagtttcatatattaaaactctaatagtcatatatgctaagtctaaataatcatatattaaaactctaatactcttgtattaaaattctaataatcatatattaatactctaatactcatatataattacatcacttgcctgcgcaaattcctactagggctagctaccactttggcttaagggacgacgacgacgtctttcctacaacatggaaaaaaatgtgttagtctaaacacaaaggaacatattttgattagtgcgctgcatgattaaactaggacggaggggagtagaagtttaggttcatggattaatttgtgagacatgtaactttgcgttcattcgcgttttattcccgttcgttcgcggttcgttcacattcgttcgcgttcattcacgtttcgttcttgttcattcgcggtccgttcacattcgttcgtgtttcgttcccgttcgttcgtgtttcattcccgttcattcaaggttcgtttacattcgtttgcatttcattcccgttcgtacacgtttcgttcccgttcgttccagttcgttcacgtgtcgttcgcgttcggcagtggcggccacggcgtcggcaaaggcggcggtggcaaaggtggtggcgttgcacggcactggtggcgtggcacagcggcgtcgtcggcgttggcatcggcagtggctttggcacggcggcggtggcatggtgcggcggcggcggcggcgtcggcgtaggcgttggcatcagcggtggcgtggcgcggtggcggcggcggcggcgttggcgtcggcgtcgagagtggcggcggcgtcgggagcggcgcgaggacgacgacgacgagcgaggcggccggtttagagagagagagagagaaagattgagatcgcggagcctctcaccccaatgcggcggcggcgtcgacggcgacgacgacgacagcgagatgactgcggcgtcggagcaagggatgccctaggcgcggcggcgaaggtgatgcagctgagatcggagaaaaacatctaagtgttggtggagaagacgagtgcgccttgggcatatatataccccatgatctttagtcccggttagtgagaacaaccgggactaaagatatctttagtccctattcatgacaacaaccgggactaaagatcttatcttaacatctttagtcccggttgttcttacgaaccgggactaaagatatctttagtcggactaaagatatctttagtcccggttgttatcaccaaccgggccaaaagatcttttcccgctatttccaaattcttttttaacacggttagggttaagaaccgggactaaagataatagcattgcatattaaatttcattacatatgggtttctaaaatagtaaataatgcattaaaatgatttaaagtcacaaaattaatgacaaaaccttgaaaatatattgttgtctatagtaaattaagtggataatatataataagcacatgaatgatttaaaattgttaaaaattctaataatcatgtgtaaataccacatgtatgatttaaaattatcaaaaattctaataatcatatataactagcatatgcatgatttaaaattgttaaaaattctaataatcatatgtaaataccacatgcatgatttaaaatttttaacattctaataatcatatgtaaataccacatgaatgatttaaaattgttaaaagttctaataatcatatataataagcatatgcatgatttaaaacttttaaaaattctaattatcatatataactagcatatgcatgatttaaatttgttaaaaattctaataatcatacataattaacatataccatacaacaattgatttatatggatattcaatacatccaaaatagtttacatcgtgtacacaacaattacggcaatacattggcggtgacggttgaccacacgtagtttctcctcactattgtttcttccttgtgatcactaggtgagtaaggggtgtcttcatttgataggaggatgctagggtcaattgtcaccgtgaaagggggttgcccatcaaactgatcgtaatcctcgtcagtcttgtcctctacttcgacgatttttcttttgcctgggagaaccacgtggggctttggctcgtcaggccctttgcccttctttcctttgctagacatgtccttcatgtaaaaaacttgcgttacatcattggcaaggacaaaaggttagtccgacaaccttgttaaggtcaatcgttgtcatcccactgccatcaatcgttacgcctccaccagtcaacctaacccattggcaccggaacagagagaccttgagaggtcgatagtcaagttcccatatgtcctcgatggcaccgtaatacatgccagttgtaccatcgtgtcctatggcatctatacgaacaacactattctggttcgtgctcttcatgtcttgggctctcgtgtagaatgtatacccattgatcttatatccctagaatgtcgcgatcgagccagatggtcccctcgctaggaaggccagttgttggtcaatcgtctcgttacacatgagatgttgtcacagccacgcggggaaagtatcaatgtgataccgtgtaatccatgcatcggacttaccgatgtttctggcgcgaactagagccaagtgctcctcgacgtaaggagccaccaatgaagattgttgcagaaccatgaaatgggctttacggaataaattgttgtccaccgtcattattgatttccttccgagagtcccctttcccgtagtctcctttcatggcgtgattcaagcaccccgattgggcgaaggtcttcaataaattctacgcagaattcaatgaccttctctgttccataccccttggcgatgattgcctctagacgagcacggttacgaacatacttcttcagaacgcccatgtacctctcgaaaggaaacatgttgtgtaggtacacaggcctgagaataccaatctctttgacaaggtgacaaagcagatgcgtcattatattgaaaaatgaaggtggaaatatcaactcaaagctgacaagacattgcaccacatcattttgaagggcttctaatctatccagatcgatgaccttctgcgaaattgcgttcatgaaagcacatagctttgttattgttgcccggacattgtctggaaggataccccgaattataactagtagcagctatgtcatcaacacgtgacagtcatgagactttaggtttgtgaacttcttctccttcgtgcttattattcgctttatattcgtggagtatccagacggtaccttaatgctctctaagcattcaaacatactttccttctctgccttgctaagagtgtagctggctggactaaagtaatggcttcctttatcctttggttccgggtgaaggtcgccgcattgttccatatgcttcagatcattacgtgcttccagtgtatctttcgactttccatatacacccagaaagacaagcaggtttacgcaaaggttcttagtgaggagcatcacgtcgattgcatggcagacatccaagaattcccaataggttaagtcccaaaatatagagttctttttccacatcgccgcatgaccatcttcgctctctataggctggctgccaggcccctttccaaacactactttaagatctttcaccatagcaaacactgttttcccgctgcgatatttaggcttcgtacggtggtccgccttatgttcaaagtgcttgcttttcttccgtaccgggtggtttgtagcaaggaatcgatgatgacccatatacacaaccttcctacagtgcttaagatacgtactttcaattttatccatatagtgagtgcaagccttgtaccccttgttagattgcccggataggttgctaagtgcaggccaataattgatggttacgaacagcagcgatcgtaggttaaactcctcctgtttgtcttcgtcccacacggggacaccttctttcttccacaacagtttcagatcttcgaccagtggtcttagatacacattgatgtcgttaccaggttgcttggggccttgaataataatcagcatcattatgtacttcctcttcatgcatagccaagggtggaggttgtagatacacatcgtaacaggccaagtgctatggccgctgctcatctctccaaaaggattcatgccatccgtacttaaaccaaaccgtatgtttcgtgcgtcctttccaaagtctttaaatgttctgtcgatgttttgccactgcgaaccatcggcggggtgtctcagcatcccgtcctgttaacgttcttcagcgtgccaacgcatcattctagcattcccctttttcctgaacaaatgccttagccgtggtattatagggaaataccacatcaccttagcaggaattctcttcttcgttggctgcccgtcaacttcacctggatcatctcgtctaatcttgtatcgtagtgctttacaaacaaggcatgcttctaggttctcgtactcctcaccacgatataggatacaatcattcggacatgcgtgaatcttctgaacttccagtcctagagggcagactatcttcttagcctcgtacgttgtctcgggcaatttgtttccctccaaaaaaatgttcttgatgaatttcaataaatcgccaaatgccttgtcactaacaccatttgttgccttccattgcaagaactccaaagtggtatccaactttttgtgccccttctcgcaacctgggtacaacaacattctgtggtcctctaacatacactccaatttatgggcctccttttcactttcacagtcctccttggcgtcctgcaacatctgaccaagatcatccgcagcgtcgttatcgtcagcatccctgtccaccttgcccgtttgatttccttcaaattcagcgtactaagcccagtccggaatgttctcgtcttccacttcatcttcttccatttcaaccccttgctcaccatgggatgtccaacaattatagcttagcatgaaccccgactcaaacaagtggatctgaatagtcctgaatctagaatactccttctggttcttacacttattgcatggacaacaaataaaacccttatgcttgttagcttcggccactctcaaaaaataatgcacgccatcaataaactctttggaccgccggtcagcgtacatccattgccgatccatctacataaaatgaaaaaaaaaatcgtacataaataaattttcgtacaataatgacagtcatacaataatgataaaataattaaaaactctttcaacagttataaaataatgacatatcattattcatacaataattataaaataatccaacaaacaattcttatttattatttttgaagttttaaactaatattaatgttgtacttctttgaattttcaatttagtttgttttctattttttaagattaattttcattatattttaaactatgagttaaaaactctttcaacagttatacaataatgacatatcattattcatacaataatataaaataatccaacaaacaattcttatttattatttttgaagttttaaactaatattaatgttgtacttcttttaatttttaatttagtttgttttctattttttaagattaattttcattatattttaaactatgagaataaaactttcttaagtaaacaaacaaaattcctatatattcttcttccccacacaaattttctctctcatcaacttacaacaaagttttggagacaaaaaaaatatgtgaaacattgctcccaaagtaatataacaacaaaaaaaacattggaggatgaagttactaaccttctatacacctccaatttatatataatcaccaaaaaaatttcacaagaaattttggcatgacctcccctcttttttgaagaaattttgaagcttgctcgggctgaaggaggaagaagacatatataaaggggatctttagttccagttggtgttaccaaccgtctgaccgatcaaagatggtttctccactggtgttactcctggaacttattaatccacaagctaacatttaatgaattaactctcttagctacagaaaaagttcatttgacgttctaattatatttttcttatcttctttattttatgtttctcttcatatatacaagtcgtattttgctttgataaatgccaagagacaaaagctaataataaatccatcgagtcaataaactcatatccttgtacgtagtagctttataggtttctctacatcttgtatatatacacgccactagctcaaaatagtttaaattgttcctattaaatctacatgttaagacccaagtggactatatgtttttctctaaaatatcgtacaggtcctacgtatcatgaagaaacaatgtccaagatatgtatatttcttccgtctttactcattgacatgaatgcatacaacaaattgcatgcttatgaaccaattaaagtgatgactcgaatgttacaagtaaaatacattttgttagtaaaagtttctttgaggtttcttaagaaaaaggagacaatgagacaatggacgacattcaattaaaaaaagagaacatcttgcttttaatttaaacttaatttgttagacctgtttttctgcacaaattatacatgtgcccgcgcgaatgcacgggctaccttcctagttgtactctaaatattacaaatacgcgaccggtaatatatagattgaatatgggtacagtgatacaagcctgcgcagtgctcaattaaaccttgattcacgcctgtctcttggattagaggctacgggtgcctattgcggttctttctaactatacaagtgattagtagtttttcttataaattaaatatggactcttcttacaagatattttttaaaataataaattataatcgagaaatgatgacttgatatgatttatgaaatcgcatgccatacatccttgctaataatactgcttgctgagtacttgtactcacccttgctattaactatcctccaaacacttttgggcaagccacttttgggcaagccagtgagttaaatggtgggttggagggtcagtactatgccccttggtgtgatgaaaatcaaggggatgttgtttatgactatcacgtgtattatggaggatgggatgagttgatgtacgcaggggagtggtctagtagctatgtcagtgaacctgggatatcgaagcaggaactcccccgtctaaaaaaaagacaaaccataaattttcgtgtccaatatttgactcttcgtcttatattaaacttttttataattagtattttcattgatgttagatgataaacatgattaatactttatgcgtgacttgtctttttaattttttttatatttttttcaaataagacggacggtcaaacgttggacacagaaacccagggtttgtcttgttttgggaccgaaggagtaatgactaaagtactgctagctcctgcttagaacttgtattattaatgggtgaacttgtaaggccatgtttcagactttaaccctgcatggcatggtattgtaatgttatctgaaccttcgctatctctgatgtggatcattattcgcaaaagcgctactgtggcgaaacataattgatggactagtgacgtcattttggtaatgacggcgcgggtcgtcacaatattcttactctataggaccgaaatcttttgaaaaatattatttctgtaaaaatgtatttaaagccactcataagtcatcacggaagagagagcgggtggataaataaggaacgagagggagagagaggggagtatgataagtgggctctattttatttattttattttattagaaaaaatgctcgtgcattgcaacgggaaaggctattttaatcttatttttgttatatggtttagttaagatgaaattcactgtgttaaattcgtttggatatatatattgttagaaaatcatgatctgcaactaggagtctgatcttctcaaattagcatgcgaatttttttaaagagatttcttatacgatttcttctgtatttccaaaagcgaatgaacttaaaaaccaactcaaatatggatttgtatttccaaaaacgaacgaatttaaaaaccgacccatacacaaatggcgtaccaaagtaccgataaaaacatcttcaatttataatagtagagaagagatataagtagtagatagatagagaataacaaattaaaaccgactcaaacacggatgacgaaccgtaggagcatcttcaatttttataatagtagagatttgataaatgggatgccacgtgtacaccacgtcaacagatactatagtcaatattgctctggaattcaaattataccgtttttaatagtttaagatcatgatatcgggtattacgtactctctctgtcccaaaatataacaacttttagccatcaggatttatcccaaaatataacaatttctccagcaacattctctttccaaccaatcataacccaataagagcaaaatggaaaacttgtcgtgaaaaattttctccaaaaatttgaaatttttgagtatgttacaagcatttagctgttctcttcccaaccaaatacaaccctccaccattcacttttcccatatacctccactactcatcgaatcacaaccctccaccattcacttataccctattttcttaataaccgtatcccacttaaaaactttttatattctgcgacggagggagtattatagttgacaaaggtatattcagggagtcaaagtggacttatcactgcggctttgataaatccgaagtggactggaaaccgacaccgtgtgatccgtgggcgggcctggacttgttctccttgtcggattccagcccatataccacatcacaggcgcaggggcacagagcagggcgacccgtcgtataaaaccctaacgccgcctccaccagctctctcaccccagaattcccaaatccgcaacgcacgcacgacagccagagagagagagagagtcagaccgccgacacccgacgacatggccgtcgcctccgcgtgggccaaacccggctcgtgggccctcgccgccgaggagcaggacgacctgcccccgccgccgccgcccgttcccgccgccgacttcccctccctcgccaccgccgccaccaccaaggtccccaagaagaagaagccgcagcccgtcccgctcggcgagttcaacagcaccaagttcgtcgcccccgcctaccgcgggcccacccaagacgacctcctcagcctccccacaggcccccgcgagcgcaccgccgaggagctcgccaacgccacgcgcggcttcggggctcgctggggcggcgccggcgccggtggcccccgcggcgacgacgagccccgccgcggcggatctggcccccaggacttcggcccgtcgcgcgccgacgaggccgatgactggggcgccggcaagaagccgctcgagaggagggagcgcatgggagggtttggcgtggactcttcgatgtcgcgtgccgacgacgtcgatgactgggtctccaccaagagggcggcagcccccgcgcccatggagcggagggagcgtagcgtggcgttcggggccgactcgcattcccgcgctgatgattccgcgagctggatctccaacaagggctattctgcggcgccgccaccgccctccgacagccggaggggcggtccagtctggggtttcaacagggatggaggcccagacgccgactcttgggagaggaggagggaggaggtgagcggtggtggttcaagcggtggtgcccggccacgcctgaaccttcaaaagcggaccttgccactggctaatggcactgatggagaagggaaggaggacaaggaggaggagaagggagagatgcagcctaaaagcaggtcatcaaacccgtttggtgcagcccgccctcgcgaagtggttcttgctaccaagggagatgacgggaggaaggaggaggagaaggagaaagaggaggagaagctggagattcaaccaaggaccaggacttcaaacccgtttggggctgcccgcccacgtgaggaagtgcttgctgcgaagggtgaggactggaggaagattgatgagaagcttgaggccatgaagatgcgcgaggcaccaccacctgagaggaggtcctttgggaggagaggttcccctgttagaggagaggacaatgggagccgtccactgccagagagtcatgtcgagggagcttggaagaagcctgatgcagttcaggctgttggagaatccgaagatgggtctgataagcttaacacggctgaggctgcgagaaaatttgaagaagggtttgataactgaacttttatccttcttttattcaattggctaattcatcatcgattgctccctgttattgaattaatagttaattgatctctgttaggtactagtagtttttattgatctcagttattttttgtctgaggtatgctttctattgctagggtggaaaacaaatattgagcctgttactgtgtgctatctgcttttcagtatgtgtccctctagattcattgtcaagtgcatgtcctagcagattaccaattagtatgcagcgaagctttatttttactggcttcattaataaaataagttcctctcttactagtcaatttagcaacagttttattaagacaaattgcattcatataaacatagtggttggtatggtaatgtttgatttgattattgtttgtcttttgctgggaatgttttgtttgccagattttaagattatcattgcagtgaattgaagaacattgtttgcttgcttgatgtgatatttagacatgagccaaatacccgtgcattgtaacaatctagcataaatatatgatttcaaattgaatagttcacacttaattctaatacaaacgacgtgcaaatgatacagttatgcagagaagattgttcagataaaagaaaaatgaacacagttatgcatagtatggtggtggtgcaaactcatttccatcactgctagcttcttttacaatatactagtaaatatcaccctgtagttttggttcgttacatgttcttatggtctcaatatgacaaatgcttagccaatagccacttaggtagttggtgttgttctccatttgttccacaatctaaattacaaaaagtttcttgtctggtgtttatgctccttttcttttggcttcaaacttatgtacttgagtgctcaaattcgtgttgtgttgggttgcaatctaattctggagaatatgcgtctggtgtggcattgtactgaacaggaagggtcctgttcccatctgagttaacatcctgtgttcgcatacatctcttccttctaatgcatggaattataagcatacatcctgttttcaattctttgaaccatatagtttggtgatggtggatatcttgaatatggtatagtttggcataaaaaaaaacacagtaaggtacctacatatgtttttccaagcgattgacaatattgtggctgcgagtggcagatgtagatccaactatcagaatgaacaatgcaaccacaaccttataatagggaaatactgaaacagacatcatgacatgtttcttatgccttgcatgaatttttttttggttagtttatatgtgatgtagtagatcagccaccaggaagaaatttatcatagtaatttactataatttcattattgtgaatttatatgtttgtcatggtttgctttgtagaatgtgaattcggttaatatgattgttgtaattttagtaagtcacgtatgagttaatattcattgttattagctggtatggtttgtgcaccattagtgtgttcttgcttgtttctgattcatggacctcacatggaggaagtcttcgcaagcctgcaactgtacccctattgccttggccccttctagttcagtttaatttttgcatgtcatctcttattgaaagaaggaaaaattgtaaatatactttgcatttgtccacttaggttgaagaatcttgtttggcttatgtctcttattgaaagaaggaaaatgtaccatttttctaggttgataaagctgcgttgttagcattctctactatagggttattgttgttttcacaaagttcatgttgttcttccattgtcatatcacttgaatcatatttcagtgtttgtcttctttcatgttccctctatctgctgaacattatttcattgcaggtctgatgctaccaaagagactgctgcagcaaactaatctatgccggtacttgcgaacccaaggattgcagatctcttctgctaaatagcctttctattatttttttgctacttgtgtgctacagttgtaacactgagtcaattttgcgtccatgtttcttatcttttcttagcacctggtaatcgtgatttatggtattgagaattttgatctggaacttaggtcttaatcatagtgggtagtagctattcattctattgtgactgttagttgtcatgctatgttgacatggtgataatgtctcgaagaaagaaatagtgcttttttaaccttgttagctgtggagatgtggagtagcatttgtttagaattttgcatttacaatgcggctgaggtttgcgccagcaagtgtgaccgcacctatgatttctgcgctaccttgaatcacggtgaacgcttggctgaggtcctgttcgcgaaaagaattttttgtcacatcggatctttgaccgaatatctaagatatcagaaggggtttttggacacgaataaaaaaaattaatctcataactcgtatggaaaccgcgagacgaatttatgttttagcctaattaagctgtcattagcacttgtgtgttactatagtatttatggctaatcatggactaattaggtttgaaagatttgtctcgtgatttccatacaaactgtgcaattaatttttatttttatctatatttaatgcttcaagcatgtatcaaagattcgatacgatgtttttgagaaaaaaaaatttatggctaatcatggactaattaggtttgaaagatttgtctcgtgattttcatataaactgtgcagttaatttttatttttatctatatttaatgtttcaagcatgtatcaaagattcgattagatgtttttgattcgatacgatgtttttgagaaaaaaaaatttagtaactaaactaggcctcatttcgatgcctatggctatgtggcctgtttgacatgcatagccggtccaatgaatcactgcgaacgttcggctcatttggcttgttggaataaactagataaaacagccccctacgtatgtctgtaacatttgataaagcagccccctacgcatgtctgtaaaaaaaaaagttaagtggggtttcatgcggccttccatgatccactagtcgttctcatgctagattagcccctttgtttgacattcatatggattttacaatctgttgggaatgcataattttttattcaacgaagaccttcagttataccatcatttggctcgtacgttaaaccgatgctagcctagtgtctagggtcctccagtgtggtttgtaatatgagataccaaacctagtttgatgaacatctgcatgtgtctcttcatgatactcaaagtgacacatgcagatgtcctcgacctccctgccacacatgtagatgttcttttcccatatcatttttctaatctgccatcaaattcgcaaacaaaacaaagattgcattgctcatttttctcacgttggattggacacttttgtaagctgaaatttgtattatggagtttgttgttgttgttgcaaaagtcagctaaaggtaaacaactactccctccgtttaatattacaagacaatgatagaaagacttataatatgaaacggagaaagtaatcaaaaagcttctcctggtggagttgattgattgatgcctatttagatttcctccagtattctcaacgcagattccgcatagatgcgttgtctgaaaattgaaaaccacattacaggagcataaagttaaaacaaaatttagccaaaatttatagaattggagggagatagggaatgaaaggtttttctttcttggcgtacttctcttgggtgtgtctagggccagccggccagggcgattgtgtttcatgtatccatcccatggaaccttcttaaggccaacctgagcagcgatcatatccctcaccccatcaaagtattggaaaatgatgtgagcaattgtatattttattcatttattttaaatgaagagccaattcaattgcggtctctcctggcataatttgctgagggtccaagaaccaaacatcacacacaacaccccatgatgtcataagtcgaaacaattcaactgcaaaagaatgtctgacaaagcgttggatgtttagtttatacttcgtactcaaataaccaagacggccaaattaagcagatctgcacaattattttttgcatttcctcacttcttactgtcccaaaaagtgtcagtaaactctttgttgtatttgatagctattgggcatacaatgcagccaagctcaaaagcagcctgaaaaatcacagtgcagacaaatatgcaagccgtggttagtctggcaagaaagatgaccaaatatatcttatggaagaggatggctgattctattcgaccgtcttgtgtatgctttctggggtacccgatatacactgccagattgctactaccatatttggttactgctcaaaaagagtttaacgcgggtactctgatacagttttgtttgaagaaattgagtcttgaattttgtcttgtagaaactctgtacaacttaacaatttgaaatatcatttgtatgggcatatcacatatccatatatgattttttttcaacaaaaaggaaatgcttaccttcttgaacatgactgtataccgattgttaacgcaagttccttctgggaatatcataagaggattgttgtctggaagttggacatgctcttgtaggttgtagcctggtaatgaaatttcttcgagtaaaagtaagattaccaaatataggattgctaaggatagcatttcttacttttcttccaccatgttgaagcagaaggagcggctgcttgtccttggcgttggcgcgggtgtgtggttgggtgatgacgatctgctagccattgtcaataataacgaaattagggccctcctgtgtgtctcctggtagaaggcatcccatgcgcaccacctgaagtagtcaacaatgcagggaacttcttgttagagtggagccagaaggtcttaaggtaggacttggatatgacaactttgccggtgatggcggtgaaggggtcgaactccacggtgtcgatgacgagcacgtggtcgaaagatgtggtgtgcgtgtccgcgccgccccagcgccgctatcaacacagagctggagcgtgccagcgctctgaaggctagatcagaacgtgccctcgtttagcaggaggaaaacgacatacgcgtcaccgccaccaccatccattaaattcgcaccttggaggagaatttgaaagacttgggccctcttcactgcaagctctccacgtggtgtgctaaatttggattgtcgcacccgaatgcttgccctttgtgcgattaagatggggagacaatgcaacacatcttcatatcttatcttgtgtctctgcccgtcaagtatggttctctagtcctagaaaatatcagattgacgatggcagcacctcaaccttaggcaacctgtttttttagtgggtgatccaaggtagtcgagcattatactaaggagacaaagaaatgattaagttccttaatcagcctagtggcacaagaaatttaaaagtactggaataattgtgtgttcattaatatcacaccaacggcacagttgtcttgcaagcattagcaatagagtgttcgtattggctgatgccacataggtcgctttcttttgatggttagctgctcatgggaggtttttgtgtgtcacgtgttttttaatgtctttttcctagagagttccttttttgtggaccactctattgtacaaatttctgcttcttgaagcacaagcctctcgcattttcttgaaagaaaaaagaaatgttctagggtaggactagtgatccttgtattgtaaaagcataaaggaccgatgcaaacgacgacccccaatacagtcctatggaagaggcagtacaccatcatgcgcgccacattttgcagcaacatttgaatccgatcttccaatgcaaccatatagatcgatggcaatacacattgccagtatatcacgaagatccctcgtgcttcaaagtaaaaaaagatagatatatactggtttaccgcaccatatcttggtttcatttaacaatgacctatttattcttcattcagatccaacatgcacccgcatgttgaactatagtaaataaacgcatatgagaaacaaaacagtattttgtcctgagccactaaaattcttggcaacatttgctacagtacatttaaagtttgtggcctttgcggtgagacacctagagaacgtgtatcttctcgtggacactgtaaaaaatatggtaatcagctgctggacacccgcctcattattttattatttttggtggaaacggagagagaaacaatggttaaagataagtttgcccatgggcccacttgtcaatcacacatctggctttctacgttcctcttcttgctgctgggccgactcgccgcgtggacggaggacaaagaacgacgtgcccacgaggagggtgagggcattgtctctcgcggtggcgtcgggcaaccgactgcgtcgactggccttgaaggtgagggccccccatgggccgacagtgggacggatagagatgatcgggaggctcgactggcggaagatggcagcagcggcatgcgtcgggtcccccgtgggccgacagtgggacggatagagatgatcgggaggctcgactggcgaaagatggcagcagagcggcatgcgggaggctcgactggcgaaagatggcagcagcggcatgcgtcgatggtgggacagacggagtcgaccgggaggctcaattagcagaaggcggcagcagcagcatcctggggagggctcgaagcgacaaggggcatccacccctaggcacggagctctaggctggcatcgacggagtcagggtgtcggtggagacgaccctagggcgcgaaggacggtgattgcggcgggcagaggtggtgtactgctgatcgatggcagtggcagtgaggcgccgctagccttgacgtggtactcacgacggcatccaccgagaggctggccagtgacgaggagtccaagacacacggtgtggagggccacccgacaaggagggtgagggtgctgcttctcccgccgcctctctgccggtcgccgccccacccatcgtctaccccctccgccgcccactgttgcgctcacttgccaccactcggtcctctattgccagcagcctcccaagctcgctaagaaaagagaaggaaaagagaatataagcaggaagaatagtgtccaggggcatttcagtactttcaacactctttctctattttcaccaaaaataataaaataatacatcgagagtcctacaggtaattaccacattttttaatgttcacaagaagatatacgttttttagtgtctcacagcaaaggctacaaaatttaagtgtcctgtagcaaaatttgccaaaaatctttggataaaataaggtaccgacatcacagtacaataaaaaaaaataccgattctacagcaaactgtactgcgctatcaatccgaatcctgatacagccacacataacaagagaaaaatcttattacaattgcaggaaaacgagttaggcagagagattatcaaagaacttcatgtagtcatcaaatgactctccacgccgaatcttagcaatggacccatcatcttctacctgcattacaaataacagggcatattggatgggaaccaacaattataaacattgcataaagggagcattttgaaaacctatcaacaaatgatttcggatgaaaaatatataggtcagtttgtacccaatattcaggtggtcgcaacttcaagttgtaggttgaagccatgctcatgcagtaggctcctgcgtcatgaaccaccaaaccagctccctacaagcgcaatatgtttgtagggtaccaacaaggatatcaaaaagaaaacacaagatatggtcaaaccttatcaggtgttggaagttccctgtctttgccaaggaaatctgcagattcacaaactggtccaacaatatcgaatgttgctacttctgcatctggggaaggagaaaccagttcgatatgctgcaccatgtggatagagatgacaggtaaataacatgataaaacaacatagtacgaaataactgaatgtatatttcatgtttattttgaacatttgttggaaaaactgtatgcaagaaaaaaattgttggaaagatgttatttatatataggtcagatggagatgtaaagatcagagctaaacctgagaccaacgttacaatcatcatatatttatgaatggtgagcatcttatccaaacgaactcagctattatgaacaatggacaaaaccaacactctgcttgcaaccactatcagttgtatcactaaacaaacctggtatgctccatatagacttggtctgataagctctgccatgctgccatcaactacaatgaaattctttgtaccattagatttaacaccagtgaccctattgacgaagcagcaagtgttagctatgagggatctcccaggttcaatgatgagtgtaagatctcgtgacagaactaattctcgcacctacaaaaaatcacaggggcacatataagaatcacgccatatgccaaattttaacagtgcaaaaatccaaagtaggaagtgatctatttaaataaataatgtgcctacgaagatgagaatcggaaatataacatggatattgagctcacagtgttgatgaggtccataggtgtaggcaagactgcatccgtgtggtgataatctatgcccaggccaccgccaatattgagatattccagttcaaaaccttgtgctcgaatttcatcaacataattcaccataagacctgccgcatctctaaatatatcgacctagacaacaagaaaacaatatcatataccataccatgtagctcaaatgtattgtctaattatttgaacatggtctgaagaaaaaaaagttatttagcaaataagcataagcccacatctttaacaggggcttgtccctggataaacagaaacaaacacattaagtttgatgaagtttcaaagtcagcataataagtctttttgaatggacacactgctgcacagaaatagtatacacacaagaaaggaattatccctttctcctaatttcttcagtaagctttattcacataagctgcaagttcacaagcaatggagaatgggagaggagaggagagaagagcacgggttctttgatgctgtccatacccggtgctgcatccctgatttccattccccgaactgatcattatactacttgtcaagagaaaaacattacagcgtccaaaacacgaacacgatgctttccatcaccgttgctccacatccactgaaacaaaatcacgtcggacatgctcaccgatgtctcacccgatatcacatgcgagagccctcttctaagttaataagtcttccaattttaaatatttgtgatgaaccttagttcgttatgggataaacattacaaggtggacggctggaaatggatagactagagactatcagctgtacttaattctttaataatcaaccaatagtcagagattttaaaatttcagaggacttcatttagtcccagctgtactattgatttacaaggtggcacttagtttatctcagaggactgggactcagataaattcagctgtacttgcttgttaataatcaatcaatagtttcctgactatatagtgagcctcataacaaccactgctacattatgatgcaccgatacaacagaaaacagcatattcctgtaccagatatgtatccgagacaggagtacgcagtcaatacagtattgcagaaatattgatcatataatggcgaaacaaatcaaaactattagcaatgcttcctcgattcaaattagatgctcagatatgcagtcaagccaaccctcattcgaaagcccacagatggtagtctaacccaagaccactaacccttgttcgcacctgtgtgcgactgtgagtgctgttcccctcattctccacctccattatagcatcaccctgcctacatcaccttcagtgagcaacctgctcgcctcaactacaccatgtgtgcaggaggcttttctatgacaattgaaagttaacaaattggaaagatgtgtcttgatttaaatgtttcttatcaaacttaaaatgttttggataaaaaaaaaacttagggtgtgttcgttagtttggggttgggaacccatctccccacacggaaaacagaacagtccattagcgcgtgattaattaagtattagctatttttttaaatgaattaatttgatttttttaaacaactttcatatataaactttttgcaaaaaatgcaccatttattagtttgaaaagtgtgcgtgcggaaaatgagggaggggtgttgggaacctagaacaccgaacacaccttaaaatgttaacaaatttggtttcatgttaaatggtccccattttatcccattgaactgacacatcttagtttccagagagtgagacacagagggtaaaatgaaaagctggtccgttggagctaagagtctgacacctgcatgtggaggtactcatgcctgtgacttgaggcttgaaacattgaaaaaaacaaatcacttttttctaaaatggccagttcagaaacaagagcaaaaatattttgaacattcaatctagttccgcaaggtcagctatgccaaaaatctagttcatggtcattaacagatcacgtactatgttatttccataatgctttcagtactatacaattggatagaaggtaagtctcaaatttcaaaatgtagatgtttcagacattggcacagtaattaaggaagtcttaaaatgaccttgttgcccataatcatagcacattggaatgatatcttatttattcatgagatgtattcaatttacaaggggaatagaggaaaaaatgggacaggtacctaaaagtcatataacaatttacattttgaatcagagcagtgtggttcctataattcttagtgattgaaatgatctgttgttgccattcgcatacactaaaacaaatggcaacaataactttctaaataaactcaaatcaacaaaaaagcacatttttcagagcataatgcagcccaaaatgcaatttcttactagcaatttccaactgttacttaattgttctcaactagctagaagtatggattaatgttaatcatctgaatgccatattaacatgcttggatggatataacatcatatggaagctacggcgagacgaattattgtttgagcatgatgcataaaagcatgtccgctggctcagaagtacttacaagacattttagctcattgcacaaggattaatgtgtagaagaactccccttgcagctgtacaagaatgctgcagctgtacaagaatgcatgcagccatcacatgcttgcacaggaggggagaggaatattactaaccgagaaaaccctggcatatgctaacggttgatggttttggttaataggtttaagtttgtgcgaagtatttatcaaatggaaattccacccaaaattactttctcagaaaagcagaactattcttgaaaaagaatgtctaaaacgatatataatgaatgaagtggtaaccataaaaaggtacaactaatgcaaagcaagcagcatgttttttagtaaatttcacaagaccccaggtattggggcatccataacacaaaaccccagttattgtgatttgtttcagggaaccccatgtttcggggtaaaatgtttcaaaaaaccccatatttatgtaaaatactcatgtttcattattacatatgattttttttcataaattcacatttgttgactctcgtctagtttatttattttttctcaatttttcactgcacaaaaaaactcaacataatcataagtgataatgacataataattggttaagtatacacataaatgatcagaccacgatgaacaacgattattgaaaagcagctaacgtgtatatgtacttaaaaaatggcaactaatgtaaagaaatgcagcatgtcaggttttggggcactagcattataaaaccccacgttttgaggtttccttcactaaatcacaacttattcaaagagctcacagagtaaagcagggagaggcggagcaagttctacaatatagggctgtgactgcacaatggaagccgagtgcctggtaacagaggcaatgtgatcttaggatacaggaacctacgtttcgaggctccgagcctctgatttctggggttgtcttatcagctaacgggaacctaacaggatatgatggaactgagttttgtgatacatgccggcatgttgcaaaacatgggatttagtgaagaaaaccttactacctggggttttgttaaaatttacacttttttgtggcaaaaacagaaggcgagttgcctgtactgtatgacaaaatgtctgttgagcacaagatgctaaggtacaaaacaccaccacgaacaagctcaccataacaaatacctacttattacaactcaaagtttccaacaattataaccaaagaatagtacatcataattcatttacctttgtaatggtagatcccagatgacaatgaacacccaccagtgtgatatcatttgagtatgacttgatagagtctaagaaccattgtagtttctcattacggataccaaatttggaggttttgtttccagtcgcaacataaggatggacctgttgacagaaaaaaaagacaagcttgtaagaaataagcaatcttaagtttgctcctcaaaagaagattatcttgcttccagttcttaatacaattgacatgcctttttacaagtaaaaacaaagatactttcatacaattttaaatcaactgcattagtatcatcatacaaaagactatggaggaacaggtaacactatatgcacatacattattggcaaatttcgctacatgacatcgtgacttcgcggttttagct

SEQ ID NO: 7537 - DNA, 8265 bp, Oryza sativa
cacagatgggtctgaattgtttgaagatgtctgtattgtgccgctgaaagcctgaaactaaaccaatttccatgcagattcccgttcttccagctgccattctgaacaacatcgcatggaaaattgctaccaatttcagatatgtacactcccataaacaatcaaatatgtctatgtatatagtatacacaatacatgaactagtacatcaaaatatgaacaatcaatgagtagtgccccaattctctgtcctctatattagagtgtatttacacatagtataagcaaatatgtgtttttccaactgaaacactgaaaaagaacaaactacagcttggtggcggcagtggggcgtcgagtgccgacggcgcccagcggcggggttggcggcgcccggcggcggagtggtggcggcgcacggcggcgggggtggtggcggcgaacagcggcgggggtggtggcgctcacggccgtgctgagcgacgcctggagactggagggatcaatcgattgagagaggaggaaacatcttcctttgatctgacagtgggcccaggggcaaaacagtccacaatgcctgaaaagaaatacaaattgagttaagaaatgagaaatacataaaaactgagaaagtggtaccaaatagactaattagcaatcctaatgacatattatagatggcatgtggattgggtggtaaaaaagttgaggcacgcgaattggatggtatataatctaaattctccataaaaaagaatgctgattgtggtatcttgtaagtacttcactatacgatcttcaaagctgggtccaaattcttaatccaagtttcagccaaacttcattgcacatttgcataccagccgactatcattattgaagaaattaaccatatctctaacagataattacataatccagttttaatttagttcatgtcacttgcaagaggaactttacatgataatatagactgttgcctaagatttttcattgataattttttatgtaatctgcggtactctctgcccccccaaatggatctttcattttccacacacgaatgtacaaaccagaggtcccattaaaagcgtgttcaattaatcctcatgaggagggattggagaaaattgagggattaatttcacacctcaatagttatgtaataaataaatcatctccaaatctccctcgatcccttttggggattaaccaaaaaagtgaagtaagccaaaaaaagtaaatctaacaaacagaacatgtaatggtacagttaaaaggtaacgaaaacatcggcaaacgagaaaaaaaacaagtaaaacagatcgagcactacaccttaccaagaagctttaccaccagggacggggagacgtacgtacggcttcacacgaccaattgcgacggcagaactagggtcacccacgtttaatttgttggagtctcctgtccgcttgcgctacgtacggactctccctggctcctcacgtaagcccatctggcccaaccacggccttccaacctgcccctagctggctagctagggctgcgtgccaccgtgacctgacctagacggagacggccgggcccgggcgcgcgaggggacggcgacgaagctctcgttgggcgcacatggagattgaggacggctgcgccaaggttctccacgggaagaaggaagaagcgatcacgatcacgccccaagacgaccggtgcccagatggcgtcggcgggcaaaccggcggcgggggtcggcggctgcagcaaggaagccggagagagacgccgcgccgccaagaataataagcgccgccgcaccgagaaagcggaggacgccgacggcggctgcggcggtgacgaggatcaggtggtcacctccaaggcgatggaggcggtgtcagtgccggaggaggtactccgggccaagaagaagaacggcgaccggcgaggtcgcagcaaggaagccgaagagaggcgccgcgccaagaaagccgccgacaagaaaaggagagcagccgccaagaagctccgcaccgaggaagcagaggccggtcgtgatgacgacggggcaaaggaggcagaggagggtacaagtattcacttaaatagcatcaaattctgctgtctttactgcatacattgttgatttgccctgttctctaatctgtactgattcagttcaggatttctcagttttgtagcattagaaggctcacataataaacagtaccgaactttcagtggttaccgcatatcgcatctctctcgcaccgttgtttgctgcgttttctttaacctgcattaataactgtgctcacttactttttttttctactttcctccaggacgtccacctaattaatgcaggaatgattaaccatgttaattacagacaaacccatagtaatagacttcccctagtctatagtactaccaccacctgacaacacggaattcaaatagatctggacgctgatcaattcagaatacattttgggaccattgatgagtacttgttgaaatgtttatgaagcttagacctagtttagttcctaaaattttttcccaaaaacatcacattgaatctttagagacatgcatggagcattaaatataaattaaaaaaaaactaattgcacagttaggggggaaatcgcgagacgaatttttttttgaccctaattagtccatgattagccataagtactacagtaacccgcatatgctaatgatggaataattaggctcaaaagatccgtctcgcgatttccaggcgagttatgaaattagttttttcattcgtatccgaaaacccctttcgacatccgatgtgacacccaaaaattttctttttgcgaactaaacatgccattacttttcgatggatttggtctcatgtcgaaattcttcctaagctgtttagaattatcaaaacgagtcagttacctcatccactacgagtctcagttttgggtcttgtgtaattatgtcatgagctaaacccaggggaaatgtgccttggggctgttcgtaggacatccactcatatatactccctgcgtcctataatataagtgattttggttggatggaacatattatagtactacgaatctaccctgtcctgattcctagtactagaatatgtcatatccaaccaaaagcctttatattatgggacagagggagtattcgatagtcgttatcgtttaattaagaaccgggtttgtttatattattctgccaattgtagtttcgacgctagttcgatttgtggaacccaacttgtgagattcatcttatattcgcaatatattcagattgcatcttctactcttttgcttatgctttcaatttgcttgcaggagatgggttaattggattcataaaaagaaactaatagatgaaaaggagttggaagctgtcgaaacaagatttcagcaatactaaaaggggtggctatcaagctagaaaagtggatgggtttgaagacaaggaattttatacaggttcaggcttccttattcaagaagtaataccctactcctgtccggggatgattccgccgagtgtattattgatcgtatgatctgggagaaaatcgtgtcccgagagggacccggacccctccttatataggggaaggggtccgtattacaaaatacagtccatatccctaacggaatatgtgattacagataaaatacaatcgtaaccgactaggatcccgggtatttccttgacatacaagtttagaaactaacccgagtcctcataaagatattctatctatattcggtaccctgtacccaactagactataactgccgtgtagatatggggtatccataatctccacagtagcccccgagacctttgcagtcgatgaaatagccttctccgaacaaaaagcaataatccgagtgcttcaattcctcctgctctggtctgccgagtactaaaatcaaagactgtgaagggcgaaataaaacatggtgcatcgagtagatgcacctaattaggtgtagcccccgagtatgtggttagttaaaaaactaaacatgtagtcaagaaccgagtggttttacaaccaaacatcatatagcaaagcatgcgtggtattcaataaaacacccagccgactgcttcttagctttaatatatcgagaatagaaatatgaaaaggcccgagtgacaaacactcaaaagatccacaaatagacatattttacaagaatccgagtaagaaactcttaaaatgatccgccaaatatgataaaaaccatggtaattaaagaatctaatagcctaggctatgactcttaccacaatcaaaataagcatataacatgccaagagaatgactcctaataaactagtcatctcaaatcaacccaaacagcttttgcagcctaataaagcttacaaaaatagtataacacctttttgtcgggcacctttttatttgcatcataataattccaaagaattatctaaccgcgttaaaaaggattttagcagcatcgggtcacatcattgtgagcacaaattgccaaagcaaaaagcgcctaagtccctagggatcacaacgggccacgctggtaataatattgggctgaagtattgtacaggcccaggcccattagcactcccgataccctaacaaaacaccgaagtccaagcgacgcttcgtcttccccgccgagactctcgccatttccccattcctcgctacagtacaaaactgcgccgacgaagctagggttcatcaatccgccccaatccattctcaaaaatcccatgaaacttctccgagcgtccaccgcaccgattccccatccccctccagctatatctcggaccaaatcagaccattcagctcgcattcatggcggaagagagagaaagtttcgagagtcagtgggcgccctccgatgtggcggaggagaatctgaaagaaatggtggcgcacaacgttcttccagcgaaggagatcatcgggtggcgaccagcgttcggcgaagtgttcccgaccccggatacacacgaggtcgtggtattttctcacttcttttatggcggattttctcttccaacttcaagattcttccgaggaattctgaacttctatggaattagcctgcatcatttgaatccaaactccatagtgcatatcgccaattttattcatgcctgcgaagcttttctgggcattaggcctcattttgctttgttccgccgcatttacttcctcaagccccagccgaacaagagcaaaccatgcgttgttgggggcgctggtttccaactcagaggaacactaagccaaaagtatttctccatgcccttcaagacgtcaaacaaaggctagcacgcaaactagttttacgttcaaaatcttgaacccgcactccccgagtactcctgtctccctccggtctattaggacacatggaattcattgcctatgggagatgaagctgctcaggcagtggaattgatggagcgcatgataaagctgaaggaacaaggtttgcaaggagaacagatcactcggcacttcatcaaaagtcggttagctccaatcaaagagagatcccgcacggcttttgagtttgacggcaaacatgatccaaatcgtgaagatctagactctcttgactttaaggtcatgaaggaaagaatgtacaagatcttctcaaatgctatcgtcgtcagctattcacatctgctgccagttgtgccatacaatgcattcaaccctcctccaccggtatggattcaaacacttcaaccttcctcaaaatatgatcttgtcttcttgttgaatcagttgacagtggaagatattatgtctaggaatttgctttgatgaagtcggatcccccaatcgctcagcgccgatcaccccgccgtcaaattggtcaggggagcggggaaccaaagatccggtctgaagcccagtcgaatacctctaatccagtcggccagtcggattcccgcaagaggaagttagtgctgagtgacgacgaaggcgatgacgctaaaaagcctggagatagagaaacaaccagaaaactgccgaagcaagctattccaaagaagaaaacatccagtcgtcctatgccgaagatcaggaagtcttccaggtacaaatcatataacgatcttccttgtttcgatgctcacttatcatggaaacaacgctgacagtacaactcaaacttgtagaaaaccatctgacatagacccttctgggaaagactctgatccgactaacttggacacgagttcttccaaagaaaccgggccgactgctgaggatcatccgagtgacaatcagccggcaaccgataatgtaggatccggtgatcaacccctgactggaaaccagtcggtcgaagctgaagccggagttaatcaggagcccctgactagaaaccagtcggacacagggccaagccaagagattccagaagtcgaagcccaagcagacaaccctcgtggtcaagacgccagcaatgaccggagatctggatctccttcaaaggcatccgagtccactcgtcctcgtccagaaatcatcacaggtaaacactttgtctgaaatcactttgatctaactgactctatgtgattgttcgacctttttccatggatgcattaggaccaatgattggtgatgaagaggaaattctccggatacgggtggctgaagattcgcgccctcccattctggtcaagtggtgggatgacgatttgcaacctcaaggaattgtgataaactggcaaaaagaggacgaagaggtgtgcctactgaaaaaggcactcggccaggcgactcgcattgtaaacgtaagttccttgacgcctgacctcaaccatcttgttcgctatctagctcaaacgctaataaaactgttttgtagaggattcatcttaggaatgaagcgaaaaccgcgaccctagaaaaattagtccctcatcttggaacccttgaagctgtcagagatcagctacacgaggcaaaagagcttgccaagaaaaccgagcacgatctgtcgcgaccgagaaaaatacattttcccgaacgctagtgtattaatccccgtcccaggaaaagccggggtacaccacacaaacatgatacaaaagacacatctttattatatcgataatatttacattattacaaaggcatttaaggcctgacaatcaaaaataaacagcagcggactagcgggcctatggctccatcttcacaggcgctcaactggggtataagccaggactccacctaagacttcttctccaaagcttctcttactgaaggggggaaagattgagcaagaatgagtacaaccacagtactcagcaagccacaccggcagatgcatgattaatgcaagggggtacaaggggtaataatataggggttaagtttggtagaaaacagcatttaaaagtcacttagttgcccaaagccattttataaagacgatactagagttacacagtattattaatcaaggccatggacccacacgaatgtcgcgaccgagaaaattttgcattttcccgaacgctagtgtattaatccccgtcccaggaaaagccggggtacaccacacaaacatgatacaaaaggcacatctttattatatcgataatatttacattattacaaaggcacttaaggcctgacaatcaaaaataaacagcagcggactagcgggcctacggctccatcttcacaggcgctcaactggggtataagccaggactccacctaagacttcttctccaaagcttctcttactgaagggggggaaaagattgagcaagagtgagtacaaccacagtactcagcaagccacaccggcggatgcatgattaatgcaagggggtacaaggggtaatgatataggggttaagttttgcagaaaacagcatttaaaagtcacttagttgcccaaagccattttataaagatgatcctagagctacacagtattattaatcaaggtcgtgaacccacacgagcctgccttagcccaaggcctacgatgattcagaccgaactggcaacccgaccctgggtcccagctcgtcccaagccaacccaggccaaccattctacaatttagttgttaagcaaattttaagaattaaaacactaacttgggtacattgctcggcttgcccataaccgagggcgcggctattcgaatagattatactctgatcagaagtgtacatctttac

SEQ ID NO: 7538 - DNA, 13675 bp, Oryza sativa
agtgagagggggtggccggaggaggggaaaacgggcgcgggagtcccggccgccattaatggcgccggcaaggttaggggaggagtttccaaacgaatccagggagagagagagggaaaaatggggggaaagggggaggggatcccggggaataattcccccctattgattgcacgcggggcggacgggggcggcgggattcgcggcggcggcggcgctagggcgcgggcgaggcggcgggagcggcggaaggaaggggatgacgggtgggccccacccatcaccgagggaggcgggcgggcgggcccgtcagcggtgcgcgcgcggggaggaggccgaatgggccgcggggagaggagagggagggggaaggagatgggccgaggcggcccaagagggagaggggggaaaagggactttttagagcttttctttttataaaaccattttaactttgtttatttcctcttaattattatttgtgctctgaaaatttaagtaaaatttgagggctccttttagaccaaggagaatttaacaaaaattctccggaccacattcgaattcttctggcacgtattttagtgtttgccaatttcttttcgaattttaattaattctattattccttttagataatgatttttatttcgggatgaatttatcaggacgtgacaaatccaccccccttacaggaatctcgtccccgagattcgaggaggctagcaagaagataggttgggtggtcttctcttcttgtctgacttcttccgttgcatcttcttgaacgggcttgcccagcaaaacttccccactctgaactgcttggcttgatctcctcttgcagatggaatcttcttttcacctgacttgaaccagggtgcaccttttagctgactcagactaggttgcggtagtttaatgatgcttccatttccagaacttctcataattcatatctttggcgtcaacctcatacaggttacccacttcacgttatgcgtcgatatcagcttgtcattactaggataccatgcttgtcatcatgagaataccatacttgtcatttacttctaacttgccaccaactgcctcatattaactttcctgctctccgggtgctagctacttctgctattcgatgcaagggtcgataactttgcctttgaattatgtttctcaaccgaaccaacttctcccacttgacatgctttgacgtcttcccaaatggctttactgctggacttcttattgtttgatcgttatcctgccaaatctgaagcttcgttgtctgacctctgtagactatcttcgaacatatcacttggttcataactgggaatagctcccacgaacaagcagctcggattcactttctttacattcagtttatttcccactattctcttcatgttgtcattatttagcattcaacgtattcctttacaccttcgaccttgatgagttccttcccattggatcatctcccaagacatggcattgcctggtaaccggtgcctgcacttttcactccgtgtagcatctgataccgagttgaagatttcactccttgccttcatagaaacacttttacctaggtcatcttgcttactcacaatttttttttctctcaatgacaaggtgactgttgcagggcgattactgtgaggagtcttccttgtgtgatgcagagcatgtttctgattatcctttatcaatcaccgttcggcctacatctttccttctagagaacatcttggccaacctcttttatcaatcatctttcggcctatctctaacaggtggtactctttaatgtgggttgcagacacttctggtggcgatgaggtcctttggtctgctgcctttcagtgaaaccttgaagtgtttcgccaaaagctatactgactgtcattgcctttgacccgaaaaagacacatttgaaactcttagttcaaacaaatgtctctttggttaatcgcttgattttcttttccatcatcaggttggttattaactcaaggttaaaatatagttcctctgaaatgagaccctatgtctcctttgtcagtaaacaattatacacataatcccatatccacatcttccaaaagaatcctaatagaacttgtctgtattacatatttctcccttattacatgaatacaaggcactaccttaaacaaaaagggaagatgcttaacatcggtacattgtttctactatgggttatgattaacacgaggcctcacaggtatggcgtttgctccagtgaccacaaggcgagtgacttgtcttcttcttgcataatggccggagtgatgacgcaggttacgcttcggctgtggacaatctctggagaaatgacctggttctttgcagttgtaacaaatcaatgtcttctttactgagttgtccgtctgggaacgatcattctgacttggagttggaattggtggttggaaatccttgctaacattggcatcagtggtaccatatttgctatcaccattggagtctttctcagagtcaaaattgctagggttgtcattctgggtgccttcattgatactatcgtcgatatcttggtgaatgctgttgacattgcacgcttgatctaagtggtcatgaatggggcaagaaccatggttgttggtggtatcatcagcattagtattgctaatgttgttgtctgcgttgtgtccatcttcttggggtagtaactcttgatgcgcaacagaagatccggtgatctgaagtggctcagtgcgctgtctttggttaccacatggaaatactgggatgttgacaatccttctcttgtagttcgtcatccgattatgctcactttcgagttgcatggctttgtccacaagtttctcaaaatcttcataatcctctaggagtagttgcactgcaagctcatcttttaacccttggagaaacttctcttgtttgtcttcatccgtttccacatcttctggtgcatagtgagccaaacgatagaactcgtgcaggtactctgtgacggtcaaatctccttgcttccggtagcgaaactctcgttttcttagtgtgatcattcctgcgggaacatgtgatctcttgaatacagatgaaaactcgttccaggtgatggtatgtccttctggccgtgatgcttcgtagctatcccaccactctgaagccggtccaaccaactgatgtgttgcgaagccaacccgctcctggtcggtgcactgaatcaaccctagcttcttctcgactgtgcgcaaccaatcactggcttccataggatcgacggcaatggcaaaggttggaggctcagttttgagaaattctgataacttgcactgttgctggactgtaggtacttgaacgttggttgcccctgctgggttgttccaattctgtaatagttgaaaggctgttgccaacatgttggtttggttaaccacaatttggattagctctggtgaggttttgttgatgcttttctcattcccattggcttgggttcttgagtcatcggatccatcattcccatagcctttgttaccagtgttatccatctgtcacaaggtagaggttgagaggggaagcagacaaggaaagaatggaccagaactagggacaagaccttaaaggaactaactctttttgttgatgtgttgtttgttttgcttattctgcaggttgattaagcaaacaacctagcatggtcacatcacaacccaccgatgcaaaccacgcactacacacacaagcaaggaaacacacgactaacaacactatcctagaggacggcttaggttctgcgactggttctccaagatcttcactcctgcttcacagctggcttcattgcttccttcgcttcgctagcggaccctacggtcttccggaccttcggcgaacaattgacgacatcttcttcttcgcaaaactaaccatctagtactagctgaaatttgaagaaggaagaaagagtaaacattttgcaaatagcacaggggaaaggaggaaaaagggactttcgcaaatagtttcatttataaaatatgtccttaggttttatccacttggcttatcctacagtcgagatggctctgataccatcttgtcgcgaccgagaaaattttgcattttcccgaacgctagtgtattaatccccgtcccaggaaaagccggggtacaccacacaaacatgataaaaaaggcacatctttattatatcgataatatttacattattacaaaggcacttaaggcctgaaaatcaaaaataaacagcagcggactagcgggcctacggctccatcttcacaggcgctcaactggggtataagccaggactccacctaagacttcttctccaaagcatctcttactgaagggggggaaaagattgagcaagagtgagtacaaccacagtactcagcaagccacaccggcggatgcatgattaatgcaagggggtacaaggggtaatgatataggggttaagttttgcagaaaacagcatttaaaagtcacttagttgcccaaagccattttataaagacgatcctagagctacacagtattattaatcaaggtcgtgaacccacacgagcctgtcttagcccaaggcctacaacgattcagaccgaactggcaacccgaccctgggtcccagctcgtcccaagccaacccaggccaaccattctacattttagttgttaagcaaattttaagaattaaaacactgacttgggttcattgctcggcttgcccataaccgagggcgcggctattcgaatagattatactctgatcagaggtgtacatctgtacccacaagacacatcttcctcacgtgtaaccacgtgccacataccaccacggtatacggacggaagacatgacatagttcccaacccatcctagccataaacaagagtaccgacccaaccccacctacggccggcacccccgggacaggtaggcaggactgagcccccagcagcaggacaccaaccctgtgccatgacatctcgactaccgggccgcagctcgtgtagccttcatttgtcctagagatgtccatcgacccccgacttcgtccatctccatacgtgtgcttttgtttataaccagactgagccacaaactaagccttacccactagacatgtggaagtacggtagtgctttgcaacagaggcccgagcttagtccttatagtggccggggtgctacttcccacaactggcatgcacccaaaccccaccgaaaaaacaggttttaggggctttgaaagaggaagagaggggtatgtccaattccaccataagccaaccattccatagtatccaagagatatgaatattcccaaagtctaaagttataaaaaccacctaatgttgtcctattaaccagcgaagcatctacctaaagtcatactagtggtaccatgagtagagtgtccactagttggggttttgtttaatctagggtgaacaaggtaataataacaataacaataataataaggtcataacaaaggtaaataggcatggctagataaaacagtgataacgcgggaatttaaataaagcgataatgcaataatttaaagcaacataattttataagctgggattcaatatgttcaaggatgatgtgacttgccttgctcgcttttccaaacgtcggcttcaacttccacgaagagcggatcttccgaagctgcagcgtctacacgaccaacggaaaagaaaaggcttttactctaataaactccatataacaagcaggaacaaagcacaaaaatgggttcttgacttcttaaggaaaaattagagacttgaacggtccaattccgagttcaaatggccaagttatggccatttgaagtttatatgctctttaaatgaatatttgcgaatttcttcatttaaattttaatttaaaaaaaatggatttattgcgtcagccgaggggaggggcgcgcggaccgggtccacgggggtggggcccacgcggcagccccacggtccacggtggaccgggcgcacccgggctcacaccggccggcgccgggggtcccacgcgttagccgcacctaagggtgcgggcggctgacagccgggccccacgcggcagccgctcggtgcgcccgaaggcgaccacgccggcgcagcggcgggaggcggcgcgcccgcgcccctatggtcgccggcggaagccataggcacggcggagcggcggccgagagaggggagggaaggggggaaacgaagcggcggtccacggctcaccccgggtcgacggcgacgacggaaacggcgaccggagcggaggaaggcggcggcgcggctcgggtggacggggtcggcggtgctctggcggtcggcgagcgaaatagaggggtggacgaggtcggcgaggatgcggcgaagccgaaggaggcggccccgagggggaaggtggtccggggagacgacggcggcggaccggagctcggcggcgacggcggagagagagagcgacggcgcgagctcgattccgatggggagtgagggcggcgagtggcggaaacggtggagggaggcacggggagggtttatatagggttgggagtgagagggggtggccggaggaggggaaaacgggcgcgggagtcccggccgccattaatggcgccggcaaggttaggggaggagtttccaaacgaatccgagggagagagagagggaaaaatggggggaaagggggaggggatcccggggaataattcccccctattgattgcacgcggggcggacgggggcggcgggattcgcggcggcggcggcgctagggcgcgggcgaggcggcgggagcagcgggaggaaggggatgacgggtgggccccacccgtcagcgagggaggcgggcgggcccgcccgtcagcggcgcgcgcgcggggaggaggccgaatgggccgcgaggagaggagagggagggggaaggagatgggccgaggcggcccaagagggagaggggggaaaagggactttttagagcttttctttttataaaatcattttaactttgtttatttcttcttaattattatttgtgctctgaaaattcaagtaaaatttgagggctccttttagaccaaggagaatttaacaaaaattctccggaccacattcgaattcttctggcacgtattttagtgtttgccaatttcttttcgaattttaattaattctattattccttttagagaatgatttttatttcgggatgaatttatcacgacgtgacaacgaacctgccttaacccaaggcctacgatgattcagaccgaagtggcaacccgaccctaggtcccagcttgtcccaagccaacccaggccacccattccacattttagttgttaagcaggttttaaaaattaaaacactaacttggatacattgccaggcttgcccataaccaagggcgcggctattcgaatagattatactctgatcagaggtgtacatctttacccacaagacacatcttcctcacatgtaaccacgtgccacatagcaccacggtatacggacggaagacgtgacatagttcccaacccatcctagccataaacaagagtaccgaaccaaccccacctacggctggaacctctgggacaggcaggcaggattgagcccctagcagcaggacaccagccctgtgccatgacatctcgactaccgggccgcagctcgtgtagccttcatttgtcctcgagatgtccatcgacccccgacttcgtccatctccatccgtgtacttttgtttataaccagactaagccacaaactaagtcttacccactagacatgtggatgtacggtagtgctttgcaacagaggcccgagcttaatccttatagtacccgaggtacgactaacaaaacccaaccacgcacctcgagcccagcctaaaaccattttgggggttttgaatagagggggaggtgtgtgtccaattccaacataagccaaccattccatagtatccaagtgatatgagaattcccaaagtctaaagttataaaaccacctaatattgcctaattaatcagcgaagcatctacctaaattcatcctagtggaaccatgaatagagtacccactagttggggttttattttcctagggtgaacaaggtaataataacaatacaacaataataaggtcataacaaaggtaaataggcatggctaaataaaacagtgataacgcgggaatttaaataaagcgataatgcattaatttaaatcaaaataattttataaactgggattcaatatgctcaaggatgatgtgacttgccttgctcaaagagaacggtcttccgaaccttcggcgacgaccgcgaaccacgcttcgggaacctccagaacgacagaagctacgcgaagcacacaagcaaagctacaagcctataaagaagcaataactatacataaaaagaaagcacacggttctttaggttataacaaaaattaggagacttgaacatatcgattcggagctcgtatgaccaagacatggtcatccgaagtttaatgctgttatatggagatttgcggattattgtaattaggttttacaactataaaacatgtgtaagtgctagcctggaaaagacaggaaggctgcgctgttgacatgcggactccacatgtcaacctaagggaccgcggtagaccgagtacacagagacggtcgacgggtcgacggaagcagaccccgtgtgtcaaccgaggcgagtggccgacaaatggactccacaagacaccacgtgggctgtacacgtggaaaccacgcggctaccgagcgggcacactaacacggtcaccacacgcataagcaaacgactaccgacaccggtacacgggtaccggggtcgacaaccgcacaacgggcacgggcgacaccgaaaggacgaggacggggcaacgaaggagagatccttaccaccacgcgacgaggcgagggaacgacaacgacgaacgggcgcggcggagacggccgggaatgacggagacaaaaggcgaggggacgacttcggcagcgatccttggacgaaggcgagacgcagccagcacaacgcttggcgacacggaggcgaggacgaagacaatgacggggctgcggcacttgacggaacgaggacgacgaacgagaacggcttgacagagggacgaacaccacgatgaccgggaacgacgggaggacgacgacgaccggggccggcgaggaggcgacgtgggcagccggcggtagctgcacggagacgaggacggcgtggaacacgccgctgcgaatccgatgacagaggcggcgcaatgagacaacgagccggcgaggaggaacgatgacgacgacgacgaacaccggcggggttcggtcgaaggggaggcgaggccgagggcgaccttgccgctgcgatgccagaggtggagatggcgacgtcggccgacgcacgggcacggcggaagaggctgccgaaggcgacgtcgacgaggaggaaggagaggccggcgtgggcgacggcgttccggcgaaattcgggcgacgccgtggcctggccggggaagaggatggcgccgcggtgccggggaaggaggtgacgacgacagccaccgtacctgcgaggtggcacaggcggctggaggcggtggagtggtggcgacaccactagacgtcgacgaggacaccgttccagcgagcttcggtagaggggacggtgaggccggtgaaggggacggcgttgcagagccgagggaggtgacggcacggccggacggcgcgcaggcgaggcggtaggggtggctggaggcggccggcggcgtgggagagagaaggaggacggtggagagaggcggggcggccacgggagagcgcgggagggggctaaaactggagaacgtaccgagggggttccattttataggggaggagagggagccgggcatgggagagggcggaacggcgacgggaaacacggccggcagccatggaaggcggccgggaatggcgcggccgttccgggcgattgggggcgccattcaagggggaaaacgggagaaatcaaagaggaatcaatggggattaattccccctatttaattttggaatcccatgattaaatcgcacggatttgagggaggaaaggagctagggttcacgggagagagaggaggccatgcgggaggaggaagacgaccggcgcgtgggccccacgcggtcagcgcgcgtgcaacgcgcgcgcggcgcgcgtgagggggggcggctcgggaggctggcgcggctgggtggcgcggcttgggccgggcggccgacctaggaggagaggagggggaggtggcctcggggagagagggaggaggagggagtgggccgaggggaaggagaggaggcccaagagaaggagggagaggaggaaagggagaggaagagagggaggaagagaggactttggccgcgggccgagagagagagaggactttgggccagacttggcccaaagggaggagggggattatttttagctctttctttttaataaactttgttaattgtttttgttgcttaataattattttcggtgctctgaaaattcaagtaaaatttgagggctccttttagaccaaggagaatttaacaaaaattctctgggccacattcgaatttttcttgtatgtattttagtgtttgccaatttcttttcgaattttaattaattctattattccttttagggaatgatttttatttaggaatgaatttatcaggacgtgacacgatctaagggatcggatcgccctgctccaggagtctaacttcgaactgagtggctcatcaaaaggtacacacaaaatctgtccgactaacttgtgctgtcatctttgtaacttcaattaaccggagtcaatgtagtgcaagccgccaagatatctcaattggagaagcagattcagactctggaaagcgataaagcagagctggcaaggcagagggactcggctttgaaggacgttgaaggtaccatcaatcttctatatactgactcattaatatgaatctgttgatgcagactgcaagatcaagtcgcaggctcaattcgacgtcctggttggcaaaatcaaaaggcttgaaggggccagggatgaagttgctaacgctgctaccccactcgtccaagctatgttcttcaataacaacggtccgagtacattcgatgcttccgaaatctttgacaagctgagagttgctccggatacatatttcaagaacatcaaagaggccgggagtatgggagcgagtctggcgctagcaatgaccaagtccctttactcgaaaatcgacattgatgccattgacggctttgcagacgggacgagcgaagaagctgctcttgaccttatcaatgatgcgcagaaagccgccgacaagatagcggtcgatgtagtcgagaggttccaggacaccgatcttcgaccgactggtcctgataactctgatgatgaaaaaactgatactgattgatgtaatgtgataaaaatgattctaatgaaaatgatggaggcacaatttgtataatactgatgaatttatgctgtgctcagtgtttcatacttagcttctgatttcttaaaagcttttgtcaagccttattgagcctaaaacccgcaaaagctattaaaaactttcagtcctcatggactaagccaaaaaattaagcaaggcaatgataaatcgagtaagcaaattgaactaataaaaatcacactccattattattatgatagcccccgactgatgacttcaaggaaaagcttgatgttgtcagtcaaaatagggaaatacagaaacaaaactttaggcataaaaacgacgaagatgttcgatattccaagaattgtcgataggtgtaccgtcttcacgcttgagtcgataagaacctggccgagtaacttctgagattataaatggcccttcccataaaggagataacttgtgccgatcccgtatagtttgaatttttctcagaaccaggtcgccgactaagaaggctcgcgatcggacgttacgattatgataacgacgcaacccttgcaagtatcgggccgactgaattaaggctgcttcgcgggcctcttctagtcggtgtaggtcatccactcggtcttctccgtagcgctcttcatgaaaattgcgaaaatgcaaagattcaaattctacttcactaggcaacattgcttctgctccgtaaactaagaagaatggcgactggcccgtagcccgactgggggtggtgcgcaaggaccaaagtacagatagcagctgttccacccatttgtcggtataaggattcagtcggtcaaaaactcgtgcctttattccttggagtaccatcccgttggctcgttcaacttgtccattgctcataggatgcgctacggaggcataacaaattttgatgccgaagtcttcacaaaaatctttgaatactccgccggtgaattgagtaccattatcagtgatgatccaattaggtaccccgaaccgatgcacaatgttgatgaaaaaatctctagctttatctgccgtgattatgatgaccggtttggcttcaatccacttggagaatttgtcgatagccacaaagagatgtgtgtaaccgctgactgcctttttaaacgggccaaccatgtcaagcccccaaaccgcaaacggccaggacagcgggatggtttgcaactcttgggctggcagatgagtttgtctggcgaaaaattgacaaccttcgcatgtccgcacaattttgtcggcatcggacacagcagtaggccagaaaaaccttgccggtaagccttgccgacaatggtgcgtgcagcagcgtgattgccatagataccggaatgtatatccttcagcaattgtctcccttcttctgaagacacgcagcgttgcataattcctgatggacttttcttgtacagctcggcctcatgaataatataaagcctgctgcgcctggaaatctgctcggcttcgtctttatcttgagggagttcttgggaggtcagaaatcgtatgaggggctctctccagtcggcttcaaccatagctatgtcttgagtgtccgcggcctcagctgtttctctccttggtacggttggctcataaagatgttcgacgaacacgtcagaaggggctgcttcgcgtttggatccgaaatttgctaatctgtcggctgctttgttattgtgccgaagaacatgggtgagttcgagtccatcgaacttatcctccaacttgcgtacctcttgtcgataagcgatcatattgtcatcaagacaggaccactctttcataacttgattaacaactaactgtgaatctccgcaaactatcagacgcttgattcccaaagagattgcgatccgtagtccgtgaaggagcgcctcgtattctgccacgttgtgagatgcagagaaatgtatccatagcatgtagctcagtctttctccagttggggaaattaaaacaaccccggccctgtcaaagtgcatagtccaatactccactccatcttttcctcgggcgtgtcctcttggcactcggtccactcggcgac

SEQ ID NO: 7539 - DNA, 13798 bp, Oryza sativa
ccgcgccaaccgccgccgccgtaagcttcgccgccacaagagctttcccggccgccgcctcgcgtcgccggaatcccaccggagcgcctctctcctcgcgagccggtgagttttttccctcccctccatctccggccggcaatggtagccgccgtggtcgtcgtctcctctcctaaccccctctccgctccctcccaggtgtcgccgccgcccgtccgcgcctcggcatcgtcggtcgtcaccgccacccttgttttccgcactggtcgccgccgcctctccggtgaggactccctctccctcccttttctccccttcccgcgtgcgccaccgcctttggccgtgccgccgcctttggccgtgccgccgctccggccgtccgccgccgcctttcgcgccgtccgccgccgcctccctccgccggtcgtcgccgtcggcagccgcgcgcgccgccgccggtcgccatggtcgccggtcggctttgaagccgaaccgagccaaccgggtgccgcccccctcttcccccttgagccactgcccgtggggcccacatgccggcgccccctccctctccccttgtgccgctgacatgcgggccccgcctgtcggcacagctcgcccaccctcactgacgtcaccccccctcactgacatcagccctgggtattattgcgcaataaaataattaaggacttttactttattagtaaaaacacagtttatcttctaaaattcataagtaattcactcgagctccgtttaagtccattcaagtctcagtaaattcataaaaatgcaaagaatctattaaaaatggttttgtttcctgtttcagtagtcttatagcatgttttgcttgtgtgctttgtttgtcgtgtagttttcggccgtttcgtcgatccgcggtttctcgaagacgttgctgaggtctcatcagtgtgagagcaaggcaagtcatgcattacaattgatcatattgtacccaatttacaaatatcccgcatttctattaaatgtcgcattcttttacaatgtcatgtgggatgggtcctattactcagccatttattgtttaccatatgccattgataacttgggtatcaaaatgattagatgttggtttaggaaatgcttagccatgcttagctcaactagtacacaaatggggatcacattattacatagactttggctatgagcatagttttggattggtgtcaccgcaatggtgttagttaattaaaatacactgaatggtgggctgtgggtgcatggttttgctggtcgcacccatgacagttaaggaccggttcacgggaaaccctgggagacttaccgtgcttaccacaagcgggagtgggtaactgcttgatctgaagtatagctcgaccctttcctaggcaccggtggcgagggtgggcgtgatggagttgggtcggccggggtgtccggttgtccagctgctggattcaccgcggcgcaagaggggaccgcccactgccttttgaggggtgggggtgaaaccttagcgtggtgtggatggttaggggagggtcttgtcacgatttccccctttgcagtatcatggtgatacttcggggcatggcgacatgtgtggaatcgtatcttgtgggtacagttgtacacctctagccagagtaaaactattcgaatagccgtgcccgcggttatgggtgatcaaccagattcatcgtgattagtctcacccctagtttagcttaatgaactggtgtagttcaggtggttggttgggcttgttgcaacgtggtgtagcgttggacagtgattggttaatattgattaattactacagctgttttactgctttcaactactgcttttaaatgctagctttgtgcaaaagaacccctagccttctttggttatatcctacatcatacctcctcttccggtatgacttgctgagtacagtgggtagtactcagtcttgctctcttttcccccacaccagagctgaaggtctttctagttggagctgtcttgttgaagttggttttgtcgctgccgtcaaggattgcctgtggagtggagtcgccccgctgctgaagtcaagcttcccggtttagctcgcttttatcttttccgctgcatttgtaatcttttctatttttgtaagacgtggatctgtatgtcaacaattgtcatttatgtaccctggctggtcctggacagggatttaatgcacattcagcttcgaaattctggttcgtgaatttctgggcgtgacaagttggtatcagagccgaccttgaccgtaggacaagccaactggaaacctaagagccctctgaacccctttttcatctgcatatgccttttgcacctggaattgtttcgggaaaatttggagttttgcctctttggtttgcgggaaaaatcttggtcgttcattcggatctgatttttttaaaaaattagctcagtctagagctttagaaaaattttagttggagtttattcgacagtcagtcgggaatctattgggggttatgcattaggtcgtgtctatgttcgatggggcaatgttatgcgcatcattttccatgcatccagtctatgcattaatttattgtttagttgcaattgtgtctttatctgggttcatgaaaaatgttctatgcataaaaatcatcatgttcagttatttgtttgagtcatttgttgcttcgtttaatttggattcgagcatgaattggttcttatcccttgtccatctttagatgtcagtcctatccctcgattgcaagcgccgctccgagcttcagagtcgccgcccttagctttattgtcttcctagttttgtttgcctgctagtttccgtgcataggtttgttgctggtggattagtcggcggtcgatatcatgtgtcagtggtatggttgcctcaattaggagttgtgtgcctctctttcagtgttttaatcacgattaagataattgcacttaaacttataggaaagattagtttctgagccccctgtttttcttccttttctcatatttctacctatccccctccagatggtgaagacaaggaatggttcccgtgactccaacaacgccagtggcagcaaagagcagatcagtggagcatgtgccaacgatgcacctaacagcagttcatccccactgcccgagaacctaacgattgctcaggtgttggacaatcaaactcagatgatgacgatgatgatgcaacagatgcaacagtaccatcaggtgttgcagcaggtgcagcagcaagcacaacagcagcagtagaaactgcagtttggtcttccaccacctcaatccaaactgttagaatttctccgtgtcaagccgcccactttctcaagtaccaccaacccaatcgaggccaacgactggcttcatgctattgagaagaagctgaaccttttgcaatgcaacgaccaagagaaggttgcttttgctacacaccagctgcaaggttccgcttctgtttggtgggacaactacgtggtgacccgtccagctgggacagaggttacttgggcagagttttgtcagagtttcaataaagcacaggttcccgagggaattgtggcacaaaagaagagagagttccattctctgcaacaaggaaccagaacagttatagagtatttgcacgagttcaaccgcctcgcgcgctacgctcctgaggacgtgcgcactaatgccgagaggcaggagaagtttttgtcgggtcttgatgatgaattgaccaaccagttgatctcccgagattatgaggactttcagaagttggtggacaaagctatccgtcaggaggagcagggtaacaaaatgaactgaaaaaggaaggcatctcagtttagaacttcccaggggaacagtcagaagcctcgcttcatgatgggacattagggtggaccttccaccatgattatccggcagcaccgtccctaccacccgggtagcttcggcaggatctaccattgtggcagtcacggcaacagcgagaagcacagcctcaacccgactccaagtccactaatgtttccagctcagtcagtttagccagctctgcctgctcagtcaaaacagcccgaggagttcgaaggaaagcccgaactctgcttcaattgtaacaaaccgggacacacggttggaaagtgcccgaagccaagacatgctggacccaagtttgtgcaggcccgtgtcaatcatgcgtctgcagaggaggcacagtcagcaccagaggtcatattgggcacatttcccgtcaactcgacaccggcagtaatattgtttgattctggtgcaactcattccttcatttccaagcgttttgctggtgcacatgggttatctttagtgaagcttaagatacctatgcgagttcatactcctggaggtggcatgaccacaactcactattgcccgtcagtgagagttgaaatccaagggttgatttttccagccaacctcattcttctcgaatctaaggatctagatgttattctgggaatggattggctaacaaggcacagaggagtgatcgattgcactagcctcaccatcaagttgaccaatgcgaagggagaagtggttaccttccagtctccagtgccacagaagccagggatcagtctgaaccaggctgctattgaagaacaagaggtagcagtggagaaaaccactaagaagttggaagatattcccatagttagagagtatccagaggttttttcggacgatctgacaacaatgccaccaaaaagggatatcgagttccggattgacttggtacctggaactgcaccgatccacaagaggccttatagaatgggagccaacgagttggtggaagtcaagaagcaagttgatgaacagttacagaagggatacattcgcccgagcacgttgccttggggtgctccagttatctttgtggaaaagaaagataaaaccaaaaggatgtgcgtcgactactgcgcactcaatgaggtcactattaagaacaagtatccgttgctaagaattgatgatctgtttgatcagttgaaaggagctactgtgttctctaagatagacctacgatcaggctatcaccagttgaggatccgcgaagaggatattccaaagacagcattcatcactcggtacgggttgttcgaatgcacagttatgtctttcggactcactaatgcacctgcttttttcatgaatttgatgaacaaggtgtttatggaatttctaaacaagtttgtcatggttttcattgatgacatacttatctactccaagttcgaggaagaacatgtgcagcatctccggctaatacttgaaaagttaaaagagcaccagctgtatgccaagttcagcaagtgtgacttctggcttaaggaagttcagtttctcggtcacatcgtgaatgctcaaggagtagctgtggatccagcaaatgtggagtcagttaccaaatggaccctaccaaggacagtcactcaggttcggagtttcttaggatttgcgggctattaccgccggttcattgagaacttctctaaaattgctaagccaatgacacagctattgaagaaggaagaaaagtttatctggtctgcagaatgcaataggagttttgaagaactcaaacgacggttggtgtctgcaccagtcttaatcctgcctgatcagacgaaagatttccaggtctattgtgatgcatctcgccaggggctaggatgtgtgttgatgcaggatggcaaagtggtttcttatgcttcacggcaattgcgtcctcatgaaggcaactacccgacgcatgatctggaattggccgcagtagttcatgctttaaagctttggcggcactatctcatcggtaaccgttgtgaggtatatacagatcaacaaaagtctaaagtacatcttcactcaacctgatttgaatctcagacagcgaagatggttggagctgatcaaggattatgatatgggaatacattatcatcccggcaaggctaatgtggttgcagatgccttgagcaggaagagctactgcaatgttgcatgggtagagcaactatgttgtgaggttcaacgcgatttggaacatctgaaccttggtatagttgagcacggattcgtggctactctagaggcacagcccacactggtggagcaggttcgcatagctcaagcaagtgatcctgaaatagcagagctcaaaaagaacatgagagttggaaaagcccgaggttttgttgaagatgaacaaggaacaatctagatggggagaagattgtgtgtacctgaaaacaaggagttaaaggacttgataatgacagaagctcagcaaactcagtattccattcatcctggcagtaccaagatgtaccaagacctcaaagaaaaattctggtgggtcagcatgagaagggaaatagctgaattcgtcgcactctgtgatgtttgccagcgagtaaaggcagaacaccaaaggccggcaggtttgctacagccacttcagattccagaatggaagtgggaagaaatcggaatggatttcattacgggtttgcccaggacatcatcggggcatgattctatttgggtagtcgttgatcgactcactaaagtggctcacttcattccggtgcatactacctactcagggaagaagttagcagagctttatttggcaagaatcatgtgtctacatggtgtacctaagaagatcgtgtctgatcgaggaagccaattcacctcaaagttctggcagaaattgcaagaagaattgggaacccgtctgaacttcagcactgcttaccatccacaaactgatggccagaccgagcgagttaatcaaatattggaggatatgttgagagcatgtgcccttgactttggtggagcatgggacaaaagcttgccgtatactgagttctcctacaacaacagttaccaggctagtctgcagatggcaccgtttgaagcactgtatggacggaggtgtcgtactccgctcttctaggatcagacaggggaacaccagttgtttggtacagaagttttaaatgaggcagaagagaaagtcagagctgtcagggaaagattgagaatcgcgcaatctcgacaaagaagctatgcagacaaccgccgaagggagctcgttttccaagcaggggattatgtgtatctccgtgtcactccgctcaggggagtacaccgcttccaaaccaaaggaaagttggcaccacgctttgtgggaccatatcggattttggaacgcaggggtgaagttgcttaccagcttgagcttccctccaacatgcttggcatccacaatgtgttccacgtctctcagttgaagaaatgtttgagagttcctgaggaacaggcaagtccggatcaaatcgaaatccaagaagacttgacgtatgcggagaagccgactcgtatcctcgaaaccagcgagagaaggactagaaacaaagtaatcagattctgcaaggttcagtggagtcatcactcagaagaagaggccacctgggaaagagaagatgagttgaaggccgcccatccgcacctcttcgccagctcttccgaatctcggggtcgagattccgtttaaggggggtaggtttgtcacgccctaaagtttccccctctccttgctttaaaaattggctaaataaattgctcgaagaaattatcttaattaacctagagctaaatccctaattaataaaggcatttaataattggaattggcaatgtgggattttccttgagttcaacatgtcacaatacattaacaggatttttagtggaattttcagagccttggaaataattttaaccaattaaaaatcaccaaagtgcaatttttaatcctaggaaaatcctttttctctttttcttttcttttccctctttttttctttgttgggccgtcggcccatccctctcccgcggcccctcctccttgtgggccggcccaagccgcccctccctcctctctcgggacgccgacaggtgggccccacctgtcggtcgtctcctacctccgggaaccgccgctgccgtcgaaaccgcccacgccgccgccgccgtttcccgccgttctccgagccccactccgcccgtgccgcgcgcccacgtcgctgccccactcctccgccctccccgtcgcacgcacgcacgaagtgggcaggattcattttgaatcccaccccactctctttctctcctctccacgtcgccggcggtttcagccatctccccggccacatccgcccctccctcgcccataaaaaccctcccccgagtcccctccctcgtttcccccatttgccgacctctcccacgcccacaaccgaccacgagccgtcacacccgagcttcgccgcttgccgccgccttcggccgcgcgccgccgccaccgttagcctttccgccaccgacctataccggccgccatcatcacgctacggaaggccaccggagcgcctgctgctactaccagcctgtaagtcttatcactgccttccatctccggctggcaatggtagcccccgtggtcgtcgtctacactcctaaccccctctccgctccctcccaggtgtcgccgccgctcgtccgcgcctcggcatcgtcggtcgtcatcgccacccttgttttccgcactggtcgccgccgcccctctggtgaggactccctctccctcccttttctccccttcccgcgtgcgccgccgcctttggccgtgccgccgcttcggccgtccgccgccgcctccctccgccggtcgtcgccgtcggcagccgcgcacgccaccgccggtcgccatggtctccgctcggctttgaagccgagctgagccaaccgggtgccacccccctcttcccccttgagccattgcccgtggggcccacatgccggcgcccctccctctccccttgtgccgctgacatgcgggccccgcctgtcggcgcagcccgcccccccctcactgacgtcagccctgggtattattgcgcaagaaaataattaaggactttttctttattagtaaaaacacagtttatcttctaaaattcataagtaattcacctgagctccgtttaagtccattcaagtctcagtaaattcataaaaatgcaaagaatccattaaaaatggttttgtttcctgtttcagtagtcttatagcatgttttgcttgtgtgctttgtttatcgcgtagttttcggccgtttcgtcgatctgcggtttctcgaagacgttgctgaggtctcatcagtgcgagagcaaggcaagtcatgcattataattgatcatattgtacccaatttacaaagcataaaattgcaatgtatgtttatgttggcaacttttttttgacaagaagaaaattacgatcgggacacctaaagctttgtggtgatatggagtcgtcaaccaccccgatctagcaaaagctaaatcaagatgggttttgtagaaaaaagctaaatcggctagcggagtagatttagagatcaaaatcagactctagaccgatttagatcgatatgaggataactacccgtctcgtgggcaaacggaaggtttacgggataaacctacaaaggggtattgcactctcgtagtgatcatgggcgaatcgataaagatggactaaactagggtaaagttgcaaacattgttgaaaagtaaagttaaaagaacgattcaatagattgtagggactgtggtctgttttgaatcgaacaggccttagcccttataaaggggttgggttgatctagcattctataggtcctcctccatgtctagaggaccacgtccaactaagggtagaaaacaatggaaactcaaaaaatacatttccaagcaaggaaatccgagacccgatgaaaatcagctcagactcggactctaccggtctggtcgaacacatgccaccagtcaaaccggccctacacgctggtcagaccagccccgtgaaggaaacccgacgccttccatattttggcagattccctatttcgactctaggtgccaaatttgagtgtaaaacacatgcccccactgcctttttgatgaacttatgactaaaagcatagaatatgtagaattagggcgataatctaattactggccatacgggattccaagtgcctagtaaatcgttctctttgttttttcctaacaaatcaacgatcttctaagaacgattcatactactcagtacagacattcccaactagatgattacccaaaaagcactttacacttaaaccctgacgataaaatgtcaagtccttaatcttgaaatgatttcactctaattataaactttggatatcctctcttttcatctttcaagtaccttccaaagtcttccaacatttatcagtcgttttatcattattattctattgtagttgatagttgttactattcaatagtacatggagagaatattactgcataactgaacttgttatattgagcgtccgctctcggggatgatacatagaggttatatgggtagagataaggaaggatctttcttagagatatgaagactatgatacaaatcaattctattccaatataattctaactaccatataatctaacagtgataaatgaagacaatagaaccaaccaaaccatgagatacacaaatatccctggacctcaatggccctaccctttcaccactttgtaccgccttcctctagtccctacgttgaccttagaaccactcgactttggctcgtgtccttatgttataatgtcaaacacatggttttataatgtttttagactggtttcataatgttatgcttactcaatagtatgttttatattttgcatagttaagctattgatattccaaaaatctaatatagtatttgttttcgattttgaagtgactctctctcatcatcttaatttggtgtcgggatatggtggatccaccgcttgggctcatcggcgttaattacaaataaccagtggaaatagaaatgatgaaaatattccaattgagattataaaatgagtgtgaaccaatttttatgattttattctttttaattagattattgtgggaaattatgtttttctaattaatgtggtaattttaagttttttttcatcctttcaattagtgtggcaacttctatgaggcctaccgatttgtacaaagaaagatttcacttgccaaaagaattggatttcctttgagataaacgttaattttcataaaaataattgatttccccatgcatctttctaaccagggatggacaaacatgggtgttgggggactcgagtccccctactccgttgcccattggatcaccattgataaaagaagagaggggaggggggaagaagagggagaggagaaagagtagggggctgaagaaggaagaaggagacgagtcctccctctaatcttatcctggatccaccccttttccaaccacattataattaaaacattagtatacatcactcgtatgctagtttgatcagcatacaattatattacaatataagatgtcggttagtacttcacaaccgacaaattactaggcacatcaaatgtgcaaaaagccaaacatggtatataacagtacatactcacactttgttggattcgataccatgttttcacctatatagtgttcactggagagggttatttagattaaaattaaatacaccatataattgatcagagcaaattcttagccttgtccaccaccacttccagagccacctcctattgcagaacttgttgatccaaccccactacctcctccgcttccgctactaccaatcacgctaccagaacccccgccgcctcccactgcattcccagcacggccaactccatttcctccaccaaatccacctccgctacttcccgcactttcacctccaccagcaccaccaccaccccctgtgcttatactcactccaccatgacctatatggacaccaacaccgccacctcctcctcctcctgcgtgcacgccaccaccgttaaccgcggcacctcctcccccaccaatccccacatccaccccaccatgacccacatctatgccaacacctccacctgccccaccacccacacttgcgccaccaccacgtgtagtgccggctccacctccaaagccaccgcctataccaattgatatgtcgtgacctccatggctaatactcacaccaaaaccccgcccacctcttgcgccatcgccacctttgatggagaaggccttgctatcattgagggtgtttttatcggaaaggaggagccgcgcgtgcgcaagagggagaagtgagaagcagcacaatagtataactgagatggccagtctgcagggtgtggaagtagccatggggaactgcctgtattattatgcaattgcacgtagctgatccaaggcactaccacggctatatatattcaggaaaagtgagactgaagtgagctgtgccgcacattagcccttgtcgagaaataaagagcaccacatggccaagaaaactgttcggtgtacttgtttagccttatgaatcaaagcttatgatatataaaaagagtaaaaacatgaaattttaaacatatatatatatatatatataccattatatttctgagattataatttcgttggccaatctccatcatattggtgaaattacaaaaaaaaaaatcccatgacaaattgacagtagattaaaaacagtaacaagggatgtacaaattaaagggtttagcttaaactttcataagctatgcacgctgggtagacttggcttataattcggttttgctacaaaaaataagtgtcaacatattctttttacctgatttcaattgttttttttcccaccatctggtgcaagtctgatggtatctccctcatctcatccctcttgatttatgtaggtttccatttttacttgtgtgttactctcctcttcgttataaatataagggattctgagatcgttaaacaatttaagccagataggaacacaattttgtacccctcaaaagacagtggataggttttgattagtgcaagaaacatgattaaagaaggttacccgtgcaattattgatatccatgagttaatatgtggtgtactacctagaatctcttatacgtgtgggcaaaatttggcggtagcgtgtgtgtattcgtaaggggtgtgtatgtgcgtacgtttatgagtgtttgcgtttgttttgtgtttcttatgaaaaaaaattcaaaccttagaatcttaatattatatttgtggatggagggagtaaaataaaagcaagcactcgattttccttttaaggaaagcgggcgatcgaccattttagtgacatttctcctgtatgcaatgagtactcgaaatattacgttgtaaaactggaatttagagagtaaatattgacaaatttgacattttttattagcattatatcaacatagatattgaatatagtagcatataaataagttccactggtggagaaaccatctttcgtcggtcggccgatttccacaatagtcccggatgcaataaaaaccggggctaaagatgatctttagtcccggttcaaaagggtaacgggcatatttgatctttagtcccggtttgtgttaccaaccgggactaaagatcatctttagtcccggttcgaatgctgtcaggacctgtcaggcccccccggatctttagtcccggttggt

SEQ ID NO: 7540 - DNA, 99047 bp, Oryza sativa
  unsure (1)..(99047): unsure at all n locations
aggtgtcccgatcgtaattttcttcttgtcaaaaaaaagttgccaacataaacatacattgcaattttatgctttgtaaattgggtacaatatgatcaattataatgcatgacttgccttgctctcgcactgatgagacctcagcaacgtcttcgagaaaccgcagatcgacgaaacggccgaaaactacgcgataaacaaagcacacaagcaaaacatgctataagactactgaaacaggaaacaaaaccatttttaatggattctttgcatttttatgaatttactgagacttgaatggacttaaacggagctcaggtgaattacttatgaattttagaagataaactgtgtttttactaataaagaaaaagtccttaattattttcttgcgcaataatacccagggctgacgtcagtgaggggggggcgggctgcgccgacaggcggggcccgcatgtcagcggcacaaggggagagggagggggcgccggcatgtgggccccacgggcaatggctcaagggggaagaggggggtggcacccggttggctcagctcggcttcaaagccgagcggagaccatggcgaccggcggtggcgtgcgcggctgccgaccgcgacgaccggcggagggaggcggcggcggacggccgaagcggcggcacggccaaaggcggcggcgcacgcgggaaggggagaaaagggagggagagggagtcctcaccggagaggcggcggcgaccagtgcggaaaacaagggtggcggtgacgaccgacgatgccgaggcgcggacgggcggcggcgacacctgggagggagcggagagggggttaggagaggagacgacgaccacggcggctaccattgccggccggagatggaggggagggaaaaaactcaccggctcgcgaggagagaggcgctccggtgggattccggcgacgcgaggcggcggccgggaaagctcttgtggcggcgaagctaacggcggcggcggtttggcgcggcggcgactctagcggcggcggcgcgcggccgaaggcggcggcaagcggcggagctcgggtgtgacggcgcgggcgcggtagagggcgtgggagaggacggcaaatgggggaaacgagggaggggactcgggggagggtttttatgggcgagggaggggcggacgtggccggggagatggccgaaaccgccggcaacgtggggaggagagagagagagtggggtgggattcaaaatgaatcccgcccacttcgtgcgtgcgtgcggacgggaagggcggaggagtggggcggcgacgtgggcgcgcagcacgggcggagtggggcgcggagaacggcgggaaacggcggcggcggcgtgggcggtttcgacggcagcggcggttcccggatgtaggagacgaccgacaggtggggcccacctgtcggcgtcccgagagaggagggaggggcggcttgggccggcccacaaggaggaggggccgcgggagagggatgggccgacggcccaacaaagaaaaaaagagggaaaagaaaagaaaaagagaaaaaggattttcctaggattaaaaattgcactttggtgatttttaattggttaaaattatttccaaggctctgaaaattccactaaaaatcctgttaatgtattgtgacatgttgaactcaaggaaaatcccacattgccaattccaattattaaatgcctttattaattagggatttagctctaggttaattaagataatttcttcgagcaatttatttagccaatttttaaagcaaggagagggggaaactttagggcgtgacaaacctaccccccttaaacggaatctcgaccccgagattcggaagagctggcgaagaggtgcggatgggcggccttcaactcatcttctctttcccaggtggcctcttcttctgagtgatgactccactgaaccttgcagaatctgattactttgtttctagtccttctctcgctggtttcgaggatacgagtcggcttctccgcatacgtcaagtcttcttggatttcgatttgatccggacttgcctgttcctcaggaactctcaaacatttcttcaactgagagacgtggaacacattgtggatgccaagcatgttggagggaagctcaagctggtaagcaacttcacccctgcgttccaaaatccgatatggtcccacaaagcgtggtgccaactttcctttggtttggaagcggtgtactcccctgagcggagtgacacggagatacacataatcccctgcttggaaaacgagctcccttcggcggttgtctgcatagcttctttgtcgagattgcgcgattctcaatctttccctgacagctctgactttctcttctgcctcatttaaaacttctgtaccaaacaactggtgttcccctgtctgatcctagaagagcggagtacgacacctccgtccatacagtgcttcaaacggtgccatctgcagactagcctggtaactgttgttgtaggagaactcagtatacggcaagcttttgtcccatgctccaccaaagtcaagggcacatgctctcaacatatcctccaatatttgattaactcgctcggtctggccatcagtttgtggatggtaagcagtgctgaagttcagacgggttcccaattcttcttgcaatttctgccagaactttgaggtgaattggcttcctcgatcagacacgatcttcttaggtacaccatgtagacacatgattcttgccaaataaagctctgctaacttcttccctgagtaggtagtatgcaccggaatgaagtgagccactttagtgagtcgatcaacgactacccaaatagaatcatgccccgatgatgtcctgggcaaacccgtaatgaaatccattccgatttcttcccacttccattctggaatctgaagtggctgtagcaaacctgccggcctttggtgttctgcctttactcgctggcaaacatcacagagtgcgacgaattcagctatttcccttctcatgctgacccaccagaatttttctttgaggtcttggtacatcttggtactgccaggatgaatggaatactgagtttgctgagcttctgtcattatcaagtcctttaactccttgttttcaggtacacacaatcttctccccatctagattgttccttgttcatcttcaacaaaacctcgggcttttccaactctcatgttctttttgagctctgctatttcaggatcacttgcttgagctatgcgaacctgctccaccagtgtgggctgtgcctctagagtagccacgaatccgtgctcaactataccaaggttcagatgttccaaatcgcgttgaacctcacaacatagttgctctacccatgcaacattgcagtagctcttcctgctcaaggcatctgcaaccacattagccttgccgggatgataatgtattcccatatcataatccttgatcagctccaaccatcttcgctgtctgagattcaaatcaggttgagtgaagatgtactttagacttttgttgatctgtatatacctcacaacggttaccgatgagatagtgccgccaaagctttaaagcatgaactactgcggccaattccagatcatgcgtcgggtagttgccttcatgaggacgcaattgccgtgaagcataagaaaccactttgccatcctgcatcaacacacatcctagcccctggcgagatgcatcacaatagacctggaaatctttcgtctgatcaggcaggattaagactggtgcagacaccaaccgtcgtttgagttcttcaaaactcctattgcattctgcagaccagataaacttttcttccttcttcaatagctgtgtcattggcttagcaattttagagaagttctcaatgaaccggcggtaatagcccgcaaatcctaagaaactccgaacctgagtgactgtccttggtagggtccatttggtaactgactccacatttgctggatccacagctactccttgagcattcacgatgtgaccgagaaactgaacttccttaagccagaagtcacacttgctgaacttggcatacagctggtgctcttttaacttttcaagtattagccggagatgctgcacatgttcttcctcgaacttggagtagataagtatgtcatcaatgaaaaccatgacaaacttgtttagaaattccataaacaccttgttcatcaaattcatgaaaaaagcaggtgcattagtgagtccgaaagacataactgtgcattcgaacaacccgtaccgagtgatgaatgctgtctttggaatatcctcttcgcggatcctcaactggtgatagcctgatcgtaggtctatcttagagaacacagtagctcctttcaactgatcaaacagatcatcaattcttagcaacggatacttgttcttaatagtgacctcattgagtgcgcagtagtcgacgcacatccttttggttttatctttcttttccacaaagataactggagcaccccaaggcaacgtgctcgggcgaatgtatcccttctgtaactgttcatcaacttgcttcttgacttccaccaactcgttggctcccattctataaggcctcttgtggatcggtgcagttccaggtaccaagtcaatccggaactcgatatccctttttggtggcattgttgtcagatcgtccgaaaaaacctctggatactctctaactatgggaatatcttccaacttcttagtggttttctccactgctacctcttgttcttcaatagcagcctggttcagactgatccctggcttctgtggcactggagactggaaggtaaccacttctcccttcgcattggtcaacttgatggtgaggctagtgcaatcgatcactcctctgtgccttgttagccaatccattcccagaataacatctagatccttagattcgagaagaatgaggttggctggaaaaatcaacccttggatttcaactctcactgacgggcaatagtgagttgtggtcatgccacctccaggagtatgaactcgcataggtatcttaagcttcactaaagataacccatgtgcaccagcaaaacgcttggaaatgaaggaatgagttgcaccagaatcaaacaatattactgccggtgtcgagttgacgggaaatgtgcccaatatgacctctggtgctgactgtgcctcctctgcagacgcatgattgacacgggcctgcacaaacttgggtccagcatgtcttggcttcgggcactttccaaccgtgtgtcccggtttgttacaattgaagcagagttcgggctttccttcgaactcctcgggctgttttgactgagcaggcagagctggctaaactgactgagctggaaacattagtggacttggagtcgggttgaggctgtgcttctcgctgttgccgtgactgccacaatggtagatcctgccgaagctacccgggtggtagggacggtgctgccggataatcatggtggaaggtccaccctaatgtcccatcatgaagcgaggcttctgactgttcccctgggaagttctaaactgagatgccttcctttttcagttcattttgttaccctgctcctcctgacggatagctttgtccaccaacttctgaaagtcctcataatctcgggagatcaactggttggtcaattcatcatcaagacccgacaaaaacttctcctgcctctcggcattagtgcgcacgtcctcaggagcgtagcgcgcgaggcggttgaactcgtgcaaatactctataactgttctggttccttgttgcagagaatggaactctctcttcttttgtgccacaattccctcgggaacctgtgctttattgaaactctgacaaaactctgcccaagtaacctctgtcccagctggacgggtcaccacgtagttgtcccaccaaacagaagcggaaccttgcagctggtgtgtagcaaaagcaaccttctcttggtcgttgcattgcaaaaggttcagcttcttctcaatagcatgaagccagtcgttggcctcgattgggttggtggtacttgagaaagtgggcggcttgacacggagaaattctaacagtttggattgaggtggtggaagaccaaactgcagtttctactgctgctgttgtgcttgctgctgcacctgctgcaacacctgatggtactgttgcatctgttgcatcatcatcgtcatcatctgagtttgattgtccaacacctgagcaatcgttaggttctcgggcagtggggatgaactgctgttaggtgcatcgttggcacatgctccactgatctgctctttgctgccactggcgttgttggagtcacgggaaccattccttgtcttcaccatctggagggggataggtagaaatatgagaaaaggaagaaaaacagggggctcagaaactaatctttcctataagtttaagtgcaattatcttaatcgtgattaaaacactgaaagagaggcacacaactcctaattgaggcaaccataccactgacacatgatatcgaccgccgactaatccaccagcaacaaacctatgcacggaaactagcaggcaaacaaaactaggaagacaataaagctaagggcggcgactctgaagctcggagcggcgcttgcaatcgagggataggactgacatctaaagatggacaagggataagaaccaattcatgctcgaatccaaattaaacgaagcaacaaatgactcaaacaaataactgaacatgatgatttttatgcatagaacatttttcatgaacccagataaagacacaattgcaactaaacaataaattaatgcatagactggatgcatggaaaatgatgcgcataacattgccccatcgaacatagacacgacctaatgcataacccccaatagattcccgactgactgtcgaataaactccaactaaaatttttctaaagctctagactgagctaattttttaaaaaaatcagatccgaatgaacgaccaagatttttcccgcaaaccaaagaggcaaaactccaaattttcccgaaacaattccaggtgcaaaaggcatatgcagatgaaaaaggggttcagagggctcttaggtttccagttggcttgtcctacggtcaaggtcggctctgataccaacttgtcacgcccagaaattcacgaaccagaatttcgaagctgaatgtgcattaaatccctgtccaggaccagccagggtacataaatgacaattgttgacatacagatccacgtcttacaaaaatagaaaagattacaaatgcagcggaaaagataaaagcgagctaaaccgggaagcttgacttcagcagcggggcgactccactccacaggcaatccttgacggcagcgacaaaaccaacttcaacaagacagctccaactagaaagaccttcagctctggtgtgggggaaaagagagcaagactgagtactacccactgtactcagcaagtcataccggaagaggaggtatgatgtaggatataaccaaagaaggctaggggttcttttgcacaaagctagcatttaaaagcagtagttgaaagcagtaaaacagctgtagtaattaatcaatattaaccaatcactgtccaacgctacaccacgttgcaacaagcccaaccaaccacctgaactacaccagttcattaagctaaactaggggtgagactaatcacgatgaatctggttgatcacccataaccgcgggcacggctattcgaatagttttactctggctagaggtgtacaactgtacccacaagatacgattccacacatgtcgccatgccccgaagtatcaccatgatactgcaaagggggaaatcgtgacaagaccctcccctaaccatccacaccacgctaaggtttcacccccacccctcaaaaggcagtgggcggtcccctcttgcgccgcggtgaatccagcagctggacaaccggacaccccggccgacccaactccatcacgcccaccctcgccaccggtgcctaggaaagggtcgagctatacttcagatcaagcagttacccactcccgcttgtggtaagcacggtaagtctcccagggtttcccgtgaaccggtccttaactgtcatgggtgcgaccagcaaaaccatgcacccacagcccaccattcagtgtattttaattaactaacaccattgcggtgacaccaatccaaaactatgctcatagccaaagtctatgtaataatgtgatccccatttgtgtactagttgagctaagcatggctaagcatttcctaaaccaacatctaatcattttgatacccaagttatcaatggcatatggtaaacaataaatggctgagtaataggacccatcccacatgacattgtaaaagaatgcgacatttaatagaaatgcgggatatttgtaaattgggtacaatatgatcaattgtaatgcatgacttgccttgctctcacactgatgagacctcagcaacgtcttcgagaaaccgcggatcgacgaaacggccgaaaactacacgacaaacaaagcacacaagcaaaacatgctataagactactgaaacaggaaacaaaaccatttttaatggattctttgcatttttatgaatttactgagacttgaatggacttaaacggagctcaggtgaattacttatgaattttagaagataaactgtgtttttactaataaagaaaaagtccttaattattttcttgcgcaataatacccagggctgacgtcagtgaggggggggcgggctgcgccgacaggcggggcccgcatgtcagcggcacaaggggagagggagggggcgccggcatgtgggccccacgggcaatggctcaagggggaagaggggggtggcacccggttggctcagctcggcttcaaagccgagcggagaccatggcgaccggcggtggcgtgcgcggctgccgacggcgacgaccggcggagggaggcggcggcggacggccgaagcggcggcacggccaaaggcggcggcgcacgcgggaaggggagaaaagggagggagagggagtcctcaccagaggggcggcggcgaccagtgcggaaaacaagggtggcgatgacgaccgacgatgccgaggcgcggacgagcggcggcgacacctgggagggagcggagagggggttaggagaggagacgacgaccacggcggctaccattgccagccggagatggaggggagggaaaaaactcaccggctcgcgaggggagaggcgctccggtgggattccggcgacgcgaggcggcggccgggaaagctcttgcggcggcgaagctaacggtggcggcggcgcgcggccgaaggcggcggcaagcggcgaagctcgggtgtgacggcgcgggcgcggttgggggcgtgggagaggacggcaaatgggggaaacgagggaggggactcgggggagggtttttatgggcgagggaaggggcggatgtggccggggagatggctgaaaccgccggcgacgtggagaggagagaaagagagtggggtgggattcaaaatgaatcctgcccacttcgtgcgtgcgggacgggaagggcggaggagtggggcagcgacgtgggcgcgcggcacgggcggagtggggctcggagaacggcgggaaacggcggcggcggcgtgggcggtttcgacggcagcggcggttcccggatgtaggagacgaccgacaggtagggcccacctgtcggcgtcccgagagaggagggaggggcggcttgggccggcccacaaggaggaggggccgcgggagagggatgggccgacagcccaacaaagaaaaaaagagggaaaagaaaagaaaaagagaaaaaggattttcctgggattaaaaattgcactttggtgatttttaattggttaaaattatttccaaggctctgaaaattccactaaaaatcctgttaatgtattgtgacatgttgaactcaaggaaaatcccacattgccaattccaattattaaatgcctttattaattaggaatttagctctaggttaattaagataatttcttcgagcaatttatttagccaatttttaaagcaaggagagggggaaacttcagggcgtgacaaaaaacaagagaaaatgaaaaggctctataaagattgtaaccaattaacaacagtttgcttgaggggatccttcattctgcagagatgcagaagaattttatttataaagagagacttccaagattgtaaggttggctacaaatttctgaagatgaggccatttcgttgttttcagatgtgccaagcagccacgaagaagatttctagaaagccaggctgattgaactgccatcttgtgtaagctgtcctttggtaaaattcaagattggcattccatgagattcccagaaactgccaacaagcagtgctaaatggacagttgaagaagagatgatatctggtttccctttggttagtgttgcacagtacacatgatagatcatcatcttctttggcacaatgcctcctatccaacatatctcttgtgttcagtctgtcctagaagaataaccaagcgaagacttttattttcattacacacttggtcttccaaatccagatcagagatctgggtgcttgaatggcagcaaaattaagtttatataatcgtttaggggtaaaacagctgttattccaaatgaaactccatgaatctcaccttccttgttccaagtgaaggtgggttagttcttcttgaaggttgagatactcacaataggcttgataagagagtggtaacatgaaagaatcctccaatggcctgggacacatagattgtaccaaatcatttttatatagagatgaagcataaaggtgatgatattgctgacatttgaattgatcattccacagatctgtccagaatagagctgtagtgcctgtccttatgttgcattttgcaatttctctaaaaacatcaaccagaacaataatgtctttcaaccaaaaagagtctttgtttgttagatgagggactttagttaccaggtaagacttagccacaagattaacccaagaaatatcagctgtagagtaaactttaacaagatgtttcatgagcaaggctgcattttggatttttagattaatcacacccaggccccccttttcttttggtgtacaaactttttcccatgaggccaaagattttctggtggaatcagggctatttcctctccaaagacaattctttcttgcagtatctatggccttgataacagtgacaggtaattgtagggagcacatgtaatatgtaggtattgatgataacacagagtttattaaagttagtctacccccttggggtaagaacattgagcttgttgtcagcattctttccactctatctaccaggggggcaaaatcaatcactcttggccttgtagttcctagggggagtcccagataagtgaaaggcagttttccaacaaaacatccagaagacctgcaattagatctgccttttcttcagagagattgaggggataaagactggattttgcataattaacttttaggccaatcgattgagcaaacatatttagtagtgccttgaagcaaaagatttccttttgtgaagcttttagcaggatcaaagtgtcatcagcatattggatgatggggaacccactgccatcattttcattgattggctttgaaattaatccaagattgaaagccctatttactgttctttgcaagagttcagcccctagaacaaaaagaagtggagataaaggatctccctgcctaactcctctcttgcagataaaagaaataccaggaaccccattcaacagaactgcagagcttgccgaggagaaaatcatttgcacccaattaagccacttttgtgggaacaccatgctgtgcatcacagataagatggttgtgtgttcaattgtatcaaaagctttttcaaagtctaacttgaggatgattatttctctttttgattgttggcattgatgaatatactcaaaagcccatgccaaacaatcctgaatggtcctccccttgatgaatccatattggttttcactaaccactttgagaatcacaccttgcaatctatcagccatcaatttggtaaggaacttaaggctcaaacccattagagaaattggcctgaaatcattaactgtttctggagaagtttttttttggcacaatggtgatgtaagaattattcagaatctgtaaatctgtagattcaacatgaaaatgagccgcaagtctgtagaagtcatgtgcaatgatgtgctagcgttttttcatgaaaaaaccattgaaaccatctgggccaggtgcattatctgctgggattatagcgatgagactatcaatctattgtgtgcaaaacatgtcaatcaagcactccaaatctgttctaggaacaaaaagctcattcaagttaaaatccattgttgggaagcaagagatacccatcctattcttgaaactctgatagaacagatttgccttttgatcatgcagataaactatctaaccattttgattcaaaatttgtgaaaccgtgtttattctgtacctttctgtggcaatagattggaaggacttggtgttttcttctcccagcatcatccatctattagtacatcgttttttccaatatattttcctgaattccagaagttttaagatacaatgtttaactacctccctgaaattccattcaattaaagaaatgcatctctcttcttccagaagatcaataaaatcaattactttattagagttactcaagagaagcacgattctggacaaatttttactccaaagcttcagtttcttcctcagaatttttaatttgtaggagatatattttgcaggatcatgaaaaccaggatctagcatccaaacttgctgaaccacctcaaaaaagccttgtgcttcaacccagaaattttcaaatctgaaaattggggacttaggaattttcgtatcaatctttactacacatggtacatggtcagagatattcctagttagagggagaacagttgtattggggaaggttaaagtccaggatgcagaggtgaaaacccaatcaagtctttctagcaaatgattttgttgcatattgctccaggtgaaccttctcccttttaaagggatttcaagcaaacccagggaactaataatctcattgaaaattaaaatatcattcatgttagctcccactttattcttgtcatagataaatctgtagaaattgaagtcccctagaaaaagccagttctgttgagcatcaatctggatatttttaaaccaggtcacaaaatctgatcttttggggccattacatggaccatacacacaagtcaaggaccatacttgggaggtgaatctagaagttaactccacagtcacagagaaagggttaacttctttgggtgacccattgaagactcttgaggcctaaacaataagaattccacctgatgcactcatggagggggcaaaagcaatagagccgaagcgcttgggggcaaatttcttgatgtcaaaaagctcaaagttttcctttttagtttcttgaaggcataagacctggcagccactgtcttcaattttctgcctagacagtaacttattttcagcattcatatccctcttgttccagcacaaaacattccaagatttaaaattactattcattatcacaccattgagggaggggcaaaagtaccaaggctagcacaactaaccgaaaaacaaaccaaaagccatacacacaagtcttggcagtctgacaggacaaatatctgataaaataactttgacagtaaacaaattacagaccccttgagcatgataaaaggaaaacacaggtctgtcaataaaactgagtcttctgtcattatttatcctccatgtttggcctggttatcttctgtcttcttttgcccccccccctaggctggattctgccacctcctcaggagagagcccgcacatgtctacccccatcttttgtatgaccaaaagtgaacaatcaggtggagaggagtcagagttcatatcactataagaagtttcattgaaatcagactcctgcaaactgctatcaataaagagttttgaaatacctgcaaattccttaagctttttagcaaacctgccccttggcttcccaatacccattcttggatccatctgcaaatctttggttgccttgtcttgcagtagcctagagctttgtcttctgtaaggactgtaaagaatggtcttcccatctttcttctttataggtgccttggggggaagcagggcaacaagggccacattgattgggctagagtggggcattacactgattggtagaacatcctcaatcaccctttccggcagaggaggagaaatggacttgaaaggttgtaaagcccattcagattcatgttggcccactgagggagaggaatcaattccttggcaggaccaaagttgagaagggattggccattctcaaagcagcagggataggcttgtcctggatcaaaatctgcatgatgccctttgctttacagagaaagtcaatcttgtctaatatgcctttcattggataaaagtaggggtgccttggagcttcattcctagcaattctgttcagccgagctaagaattcctgtacttgtgggtccaagataggatcctggactgtttccttcctggctgatgagagaggtgtggctatctgctgaggcaaaataagctgaccagggttttcttcaatctgacccattggatggtcttggccccaggcatcttcttgctgttcatttgcagcctgttgttgctgcactgcttcgtcccaacctccagctccctggtttccagggttgccaaactgccagacattaccatcatcaggatcctcatcaactgcatcatcagggcccggctgcggaccagcagggggaagatcctcttcagtggggaaattaatcaaatccccttctagcatgaaaaccaagattgtccaagattcccccccccccacacccccagcgccaagaggatcaaagagaacaatctttctcggaacagaatcctggtccctgttctttgccctaacaaaaacccttcccaatattctatctgcatccgcctaaaaggttaactaaccaaaagaggcaactaccaggtgcacatgatggcgatcattgaaatcgagtggaaaatctagaaacatgaaccaaccctctctatggaagttagccgccctccaattaaacctttgtcatgattaacaaaagtaaccaagtgaaccccatcatagaactcaggcggggagaggaccagagcatccctattcatagcagacctcatctggaagaaaccttctgcaaacgggtgccggaagctgttacgaacctcatagtgtagcttatcttgtatgaagttggcaatgagggcccgatgatgatcccagtcctgctccagggggattggctcaacaatggccacacagaagtcttcatggttccgagcagggcgctgcgggacagtgaggtcaacccgcgggatgcagaagtcacccccaacttgcacaacgtgaccctgccttaggaagcgctgcggattagggttaagattggcaattgggggcagagggaagctttcggtgggaagcactgtgtgtttgggagaagaagggtttcgggaggaagaaggtgagatttccggagcattagttttggccttccaaacagcagtagtctatttctttgaaatatacccaatattgtgaaactagtgagagttgaatgaaaacaggctcatgtaattctctactaaatctgtttttgctttcaatgtttcacttgaagggcatctttgtttgttttcaacgaattgtttatttctcgtcattcagttagttagaagatgctaacagttctacgcttgtggaattgtgctttctgtatagccgcttattaatacgagttgtttcttttcaattagtaataaagcataatagctcttctagctagcagcctagcaccataacaattgtacggtactacagaatttgcatttcatataattgcattttacactgcgggcaacaccaacaaagtttccacaacaaggtccacatgtgcaaggaattataattgtcaaaaagtaatgttatataaatatatgtagtacttcctcaaatattctacaggaaactgccacatcaaagtagtcgaacgcggtatacattcactactacagaacttgacatcgtgaacagtctatccgtgtcagggccttacgaaccgtcacatccctatctgaccagattaaacaacgacacataaacacccttgcagacaatttccataggcctttaggctgggcccatcactaatgacactcataagtgacggggagaggttatcgcccaacaaagataatcattgacgggccacaacctaacgccatcaccgatgagtgtcatcgttggcgagcccaacaataggcccgacaaagatatatgttaaactctgtcaccgatgagtacggttttttgcgatccctagttattgactgttatcgatattacacactataaataccccaaccaattcgtggaatggttatcccaaccaaacgtactggtcacatttgtggtgagacgtgtaggtgggcaaattttgccttttttaaaaaaaaagaaaaacagaaaatatagaaaaagtctactaatgtatggaaaaaataaatcatccctacaaattttgtaatacatgtcatttaaaaatcatatctaatatttgttcacttttgtagccatggaccgatattagatgtacgaaattgatcgacatagcaaagagtatagaagtggcattgcaaattttataaacgtggcggagaagaggaaaagaaggaacaatgatgacatgacttgtgatgacacgacttgtccatgtccagattgcaaaaatgagaagatgttgatagcagagtagatatatactgtcatatgatacgtcaaggattcgtgaagggctacacatgttggacgaagcatgcagagcaagaatcaatcaatattgcagatgcagcgagtagtggtcaaaatcagaaagaagatgaagctgacatgtttgttccttctctgttgggcggtgaaatggttgatgtcaatcacgatcttctacaagcaatattgcatgatgttgaggagtcagctcgatgggctgtcgtgccttcgggccgacccggcacggctcgagtcttattgggttgtgcctggaccgtgtgtgcagcctgtgggctggcacggcaccacccgaaatgtaggtcgggtcgtgccgccctgactgacctcggcccaagcacggccgtgcctggccgtaccgggccgggcggcccatttggccatctatataccgtggcgcgtgttttataaattattatgggtgaatagctaaagtggtctccaagtttcatctgagactcagtttagtccttgatatttcaatctatccatattagcccttatccttgaacttatccttgaacctacttagaagccacatggctaaacataactaataactctcttgataaatgacacttataccccctcattcacatgtataaaagaaaaaattgcatgcaatgaatttttttatagataatgtatagtaatttacataaaacgaaaataagttatgtacttgcaagtgtatacgatagccattgcttaagtttcatgtgcacatgttgaaataatataaaatacatctgcaatgttgtttattcatcttggttttctcttttctattgtatagttgtatacaaatgaagggcaaaagggatattttgcaatagaaattttgactagaaatagccatatggcatattaagtggatccaaggacgattttaagccaaaacaaatacttagaggacttatgtggacaaaatgaaacctggaggaccaaattaagccttcgtgaaatttgagagactaaattagctattcgcccaatttttattaggatgcttacttatttcctacaagggagacgtgttggttcatgactaaatagtattttgttggagaaaatgtgcaactttggtgcacatgacgataattgatcaatttctaccaattatagtttgctataaggcaaaatctaaaccgagaggcttctcggtttagtgttaaccagcgacgaacgaattgtgagaagaagtactgctacatgtgctgacgtccatacttgtttttcctcttagacatgcatgtctttttcttccttcttataaagttttctctcaaattacttatccgatctacaatccaattgcaccattatgttcgttacagttaaatcttcacaacaagatcttacatgattatattacaatgaaaaaatatttatatttgtaaattacttttattatattcgtaagttacttttatcatatatatatataagttacttttatatttgactaagttacttcttagacatataaaagtaaattcaataaagtctaaaaggtatttacatgtattataaaagtatcttaaaacaaaatgaaagtaactttgtcacgacattagaagacattaaagttctttctttttgttataagttacttctataatatatgtaaattacttttaagctttattaaatttacttttatatgccgaagaagtaatttagtgaaatctaaaagtaatttagatttattataaaagtaatttatattttttttattaaaatataatcatgtgagatcttattataaagatttaattgttacgaatacaacggtgtaatcggatcgaagatcggatgagtagtttaagagaaaattttatttgaagtataggtagatagagtctcttataggtgaagtggtagctggtttaaacaaaccaggtaccactagttgtgtagtcacgtccttgctataaatatacgggcttgtttgcagaaactatggaaataaatgcaagagaaattctaatcaattataggagatttatgttggaatcataggagattcggccattcaacctaccatcactcgcgaactcagagaaggatggaaacgatgaatggtaatgggccaatagctcttacctctttgctgcagtttcgatctaaggacctatttagtttatttagtttctacgcagaaacttttcaccctatcaaatcgaatatttgatatatgcatggagtattaaatatagaaaaactaattacacagattacgtgtaaattacgaaacgaatcttttaaacctaattgtgtcatgatttgacaatattgtgctacaataaatatttgctaatggcgagttaattaggtttaataaatttagagacgaaatctataatttattttgttattactctatgtttaatacttcaaatatgtgtccgtatatccaatataacacgccaaaatttttcaccctgctgctctagacacagcctaaatcattcttttttttcgcactccctcctcgtcatgataccgcctcgctgtaacacatgtagtactaaatcatctttttcgatgaattgggaaacggcttctagtggtcaccattgacttgctagttaacagtgggacccacttgtcaataacttttttgcttacctctccccggtctccaaccctctctccccctcttcctcttctctcacctttcagcaacaatggcgcagcagtagtggcctggatggcggcggcagcggcggcggcgccggacaacggcgcggtggggtgcctggcgtcggcggtggagggcccgataacgtgaatggcaatgggccaacacccctgacctctgctctgctgcagtttcgatctagttctttttctttttccgcgcatctcgctcctcgccgtctcgctgccgccgccgatgccggtccgcgttttctccgtcccttccattgccgccgttcctctcggccgcgcctctgcttgtggtgccacgttctccagcgccgatgcggcggctgtctgcagatacgccagccgtttggtcaggcacagcaatctccggcggcaaaggttcttggtgatctgccctacggattgttcaggttctcactgtttccctgttgttatctgttactactaccattttaccgcattattgtatattcccctgattcgttaatctagggaagaggtagtagaactggaacacaattcaattcaacgtgctgaaatgcaccgtcagagctgatgccatttctagtcaatgctaacggttcagttctgatgcattttcgatttatgaaactctcaactgttttaccctacatagcccccttgtggtagcttctagcaaacctctcaaaattgtcctaagggtcttcagggtttttaggtagtatttgtttcagttatttacccaactttgctatcctatataaaagagaaaaatctacctaccaccagcattctggcttgcactgctcacccaacccccttccactccctcagcacgaccggtaatagaggcataaccataattaaacatccaaaggatatatcttgattacagataagctagggagcaaaatggattgtataggagtttgtatgacagataacatactcgagatatttatcgaaggaaacctacaaaaagaaggggattatatatttctcaggtcagacaactagttagaatgttagatatatataattgaagttcattttcatatcagaaaaggccatatttttagttttacagaatgcatcatttcttgcaatgtacaacactacttacaacatttattcaaggggaaagctcttttccttgcactaagagggcatacttaaattatacattttgagaaatagtattcataaaataagacatgagacaaataatattgtggtagtagaaattaataataccagaaagaatattagagcccatgccaagggattatattgtatgtttaatggcaaggacattatgagcaaattatcacttactacatacagatccattcaaaacattatgctctaaagtatagcagaaataaaagtgaaacatatcctctgcaaattgcatggctatactaagaattacagcggatttagtgtagaacagctcaaaacagaccatgaaacttcatctaaaaaaagtaagtatgaagtttcaaatatcttaggtaattttccttcccaagcacctttggcaaaccaacgaagagcaccggtgatgagtaccctagttttggtcatctttttgtcggcgctagtagcatactttagttcttattattgcattccaatgcaaagtaaccaataatgtacttgtatgtatgttccaaatcttccattgaacaactgtacatgtatatataggctgcagttgtataacttcggctacaccaagtaattcaacaagtttgtgtgtgtgtgtgtgtatgtctcagatagcaaccagaagaagttatgtatatatgctcccagctcaatcgacagcacagcaaaactcaactatacaacttacaacaataagtagtaaccgaagaggatcttgttgtagaagatggcaaatcatatcttagcagctgaaaagagttaaaccatccacccatgcatcaaatcaatctcaaatgatgagaagataattgaaggcttcgaaaaagccaatcatcaaccatgcaaataaacccttctaggatcacgccaaattaatttccacaggcatggaactgaccatgatagctccccagcggcccagcccccgtcctttcttcttgggcaataaatcaactgtaataaccatccccttggctcaagatagcagcagcaccattcctctgcttgtcttgattcacagagatgagagatgcacattggtccaacttgatcagaaagtttgattttattaccatataaaacagctggtcacatgaaacacattttgtaaggttgatccgaatagaccatcaagtttcaaatctctcaactgttttttcttccaaagcttttgctgcatagttggcagcaacattgggaaggtaacccacaagattaactgaatgtcatctggagtgtaccttttcccgttgccgttgcactcgtccatgccatgataaattgtatccctgtaggaattcagaaaggaatcaatttcttcctcggatccatctctcttgcaccaggaaaatttccttaacagactagtaccttgcagtttgcctccccaatcaagctttcgcaaagcattgatgatttcgtctttctctgttgatttatcacaaggtagcacaaacatgatgaatgcatacatccacaggaaaaatgcttctctgttccttagagggactagagaagcatgtgtacagataagatactccaaatccatactaataaccttgtccccagtgttcattaagtttaggagatgcatcacgtcttcaggtatatcctccttgtgttgtccaaacactatttccataattattttgccagcatccttgtagtttttagataccaaagagtcgttcttgtcatcaagttcgcttcctcttaattgcactatcccatcttctctgataaaaacatttgattcatcaaaattccgtggacacttcccccttttgtgcaggaaatatagctctttaagtagtgctctgatgacaaatttggcttcctcagtcatgaggcgatataccctttgacgcgttggaccaacaagcataactggtgtatgcttgatatattcgataagtggcttaaattccagatcacgtatgtactccgcataactgacatgatgtgtgtttctgttttggtacaaaagaagcaatggtcaaatagatatcaagagtttgcagaaaacacatacgaattgaacatatagtaaaattttagaagcataggagtagaaattacagtaggaaagggaaatgatggacgttactgttactcttcattactaatatgaaaaattgacaaagagttgcattttatacatactagtctgtccaatcgttatgcacgtaaagaatttctattgtgactgattgtttagattagagctaggactgcatgtattcttcatcaaaaaatccaggccaaactcaaataaattggacaaataaaaacaaatatcaagtgaataatcaacttatcacagtttattaagtatttccgaatctagcaattgaagttgacctagtatggacattttttatgaatacagaatatgttcacccctatatctaggatttttttttctttaaaaaacttctaaacaacaaaatataatttggagcacttatgctatgtgcacaagatatgccccattccactattagtaaatttaataaatctttcacgttaaatttccctgcatgcaaacaccacttggtttgtaatatatagaacatggggaatagctcaacttggtcaatcattattgccaaattaagtgaaattgtagaagaatcaatggacataattaagcatcagtacaaaattaggactgtaaaaggtggcaccaaacttctctctattacacggaggatgtgcacacgcgcacaccgcacatgtttgtttaagtgcccctttagcacagtatgtaacacaagcttaacaaatggagccaaaggattgaggcattgaacatacttgtgagagaattttacttttgattagaagccacatctagaggatttttagttatagctagctacacaagcagctctggcttaaaagctgttataagaagagctctatcattatctcattaaatctttgtgtaattgtggaaccagggcttgaaccacatcaacgtgctttccttatgaccaaattgactgtaataaaacatccaaatctattgccatgacataatcgagaggatattactataggtaattttggatgttacaatatatagtgaacgagctgtaaagaaaagggtgaaggagttaccgaaacgggaacacgactcctctctttgtgggcaatgaatcaacaccaatgtcattcttgttcgtgtcttgattcgccgatataggcattgatccaacctaaaaggaaaaattgttgcttttgttgcaatttgaaacagctgaaggatccatgatcacaccaaactccttgtccatgttggatccaaatagactatcaagttgcaaatcttccaactgtttgttttcccaaagctcttcttgcatccttggcagcaacattgggaaggtaatcaacaggattagttgaatgtcatctggagtgtaccttatcctttcctcaccgtatttgtccgtgccatgaacaattgcattcctgtaggacttcagaaagtcagtgatttcctttttgtagcacatatctttctcccgcctgaacaattttttgaggagattatcccctttcagtttcttgtgccaataagatttgtatggcatatcccctgctggtttgtcacaaggtagcataaacatgatgtgtctatacatccacaggaaaaatgtttccctgttccttagagggacaagagaagcatgtgtacagatgagatactccaactccatactaatagccttattaggattgttcatcaagtttaggagatgcttcacatctttaggtatatcatccttgtgttgttgcaacactatttccacaattattttgtgagcatcctggtagttttcaaataccttggagtcgctcttgtcatcaagattacattctcttatttctgctatcccatcttctctgataaagacatttgattcatcaaaatgctgtgggcactttcccattttgtggaggaaatacagctctatgagaagtgctctactgacaagcttggctttttcagtcatgatgttgtccataattggttcagcctccttatattgggtgagtggtttgaattcctcatcgtgcatgtacttctcgtaactgatttgatgcattttgctgttcaagtaaacaaaaaaaagtagcacaggtcaattagtttcaagaagcattggatactaatgacaatattaaaagaatgaattgatgaacaatacaattactcttcactaccaagcaatgaactcagtggacatattgagacatcacgtactaaataatggatcaggttaaaattagaggttgaagaaaacagtcgacagaggtccataaatatgccacttactatctgtctatctccatcccgaaaagcatataattctggctagatgcatagccaacttacaattttttttttaacggagctagtactctctccttttcaaattgatcatcatatatatttatgcacgaagactaaggataatttaaatcatatcaatcaagacatcatgcacatattttccgacaatgcatgtatcgattaaaacaccatgtcaatcacaccttagcatgtacacattctctcatgctacattaattgtattctgatgaaatctgtatccattcggttatatgataattaatttaagaaattttgaattccattatatgatgatcgatttggaaggagtaagtaatacacaccttacacatataagccatggataaatttgtccatcgatatggacatcaaatcaatattttagtctctattgggtagggtcaagtccctataactgtaccaccatgtgaagaaacctctcactgacaagattgacttggtgtggcaaagcatccaaatgcattgccacattatataatcgagaaccccacatagataattcgctaaggcattattcggtttggaggggattaaaggagaataatttcacactataataggtgtgggataaatccctttcaatcctttcattttggggattaaccgaacaaggcctacaagaggaaatttaggatggcactgtacgggactcggatcctcttcattgctgttgctactgcagagaagcatgttttgtgcattagctcaaatctaggccgttcatccaaaagaaatggctgtgatttcttcttgcttcaatctcttccatacttccacttctcttgtgacatatacattagctctgcctcctatgctcatggtcatcagttcatatctatgctcatggtcatctcgctcatggtcatcttgttgtgacggacctcccttgcctttgttggcttaataacttacccgtctattccaaacatctacttgtggaaaaatttctaagcggtaacttctttattttccgttagcacgcttcccgaacagttaaaccgtatgttatatgaaaaatatttctatataaaagtttatagtaaattaaataattaaaaatagtcatgtccgaaggagcgattgagattagtattttagtgacacgtaaaacgagacaagtcattaacgcataatcaattaactactccccgtttcatattataagtcactaaccaaacttgttaagtttgacaaagtttacagaaaaaacaataatatttttaacacaaaacaaatatattattaacatataataaatgatagttttaatgtcactaatttagtgttatagatgttgctaaatattattataaacttttgataacgagaaacatactcatagagaacgaaaaagttacagttagaaatcactctctagaactcagttattaccgtgagtacagtgatgtgcaaccccatgacatcatttttaagatcaccacaatagagtatgaacagataaatttgatagaatgaagccatgaagacataaagtgtgaacagacaattgatttgatggttgagagcagaaagagctagagttttgctagaagtacgcaaccgtccttgcttggatggatggctcggatttgagctaatgcacaaaaatgctcctctgcagtagcaacagcaatgcagaggatccgagtcccactgtacggtgggcaagattgatgcattgcattagtttgacttacatacaagaagcatgatgtaccaaaataggatgtgcaaaacaggatcaaccactacattcagttagaaatataaacagcattacgcatccgttctaagaaacagacacacaattaatgaatgttcgaaagcaacaattgcacctctggattttcttccatatattttttttccattacaacgaagccacacacataagggtgcatcaagttctcataaacagtatcactcatccgttctagtacatgcgtatgcttgtgagtcttatacttttttatatacataatcaaacacaccatacatatgtttatttattttagaaaagatgaatcaatatgcctgagaaaatcataaatcgcacacacacatatatgcatcacgccacgtttgattcatggagctatgcaccttgaagcccgtaacaaacttcatctaaatcagtgatcagtgttacaaaaaggtggctaactcccgatctgtgtccgaaaagcaacaattcgacctatcagtcgaccccatctgtcgctcctagcgggaaaataggaaaaaaaataaatgaaaaaaaaaaacggatgctgaagccgacagattggctaagcatttcgaagagatcttcccaaaaacggaaggattcgtactaaaaaggcccacccacccgaaagcacacaaagggcggtggatcggtcgtccgatcaaaactcatcataggatttattaaagctggaaaaaaattaagcaagatgtcgtgtaaaaaattaagcacaacctcttgaagagcggaagaggccacacacgagctggccggcggtaaaactccggcggaagaggttggacttaccggagagaaatcacggcggtgcacgtaccggagggttttggcggcggcggccactcttgtagggagtactacgcatgtgtggtacggaatgtctctgtcacgtacagtggccgtcgctccatctgacagcagtggctacgctggtttgccgtgggcccaatctcaggccctacccgaatctattttccacgtggttgctcctagaggtgacaggtgggtgggacctgagagctaacggggcacgacgtggctgccgcaacagcaaaagtagagcacataattaatacaattgagccaacataagctacttcctccgtccaaaaatatatcgatgtgatatatcccaattctacgaatctagaaaaaaataataggtatatcacatatatccagaaaaaattgaccatggagaagaagatcaaagtggagtggccgccgagagcatacgatgaggaccatctgccgctggccggtggcatcaaagtaattggaagagcccccgtcgctgctaaccggtggcggtggagccgggcggaaattgaggagggatatgccccggcgagaaagctaggctagccttccccgccagagtcgaccaggacgccgatggcgcccaagagcgtcgcagctagctggtaccgcgcgccaccacttctactgctcccggcgccagcgtcgatagactccggcgggcggaaaggctgagcaaattgagaaacggagaagctcgatcgatttgccgccgccatgtgacacagctccggattgacttggggtcgacgacctctctctctctctcccttgacgaccacgatgcttttgctcttgcaatggatgccgctacactatcatcgtctcgttgacatcctcttctactgatccagagcaggtatacctaaacgtatttatttttaatgactcgatcgtaataatgtatagctgacctgaccctttcaaagtcgtctccgtatttgtaactacgacgcaattctctgtagctacattcctcgaatagtctcacaacgcgcacctatgcatgtactcacctttatgaacgcagatacatacatcgtatcgctacgagttttcgaaatttttttcgaaagattaaatcgacatatctaaaaattaacgaaatcaagctaacttaattcgtggaataaaatttccttttaaggaagaagaaggtgcattgttttttcagcaggaagaaggtgcattattgttcccggcacatgattgacgggacggtacgtagtttttgaattatcttgccatgaaacaaacaagcatgtatggacttggtaatatatacggtatatcgatcatcctagtttacgtttcacaacgtaagatgttttttgttttgaatatattcatgcatggattcttacatatacttcatatatgtgtgttcaaattaatatgcatgttagtgaatctaggggagggacatagaaatcaaaacatcttattgtgtatacgtgtgagagagagtatttatcaagaattttcccaactaatgctgtacagatgatttcttttggatttttgtttgattcaccattcacgttatgacctaactcaatttttttcagaaagagggcgtcctggaatatttaaaaatttttaaaaggacgatgccataatgtttgggtgtttgaatgtaccaacagcctaaataatccataaactgttggcccactaaccggctcgttttctcattatccaaacatcacgcgacccaattgagtagaatttatttggaataaattcacttaaggtctctctatttgtcaccgagtttagaattcacccttgaaccataataccatgttttggctcatgtggcgtttacgtgacattggcgtggcacttaaagttagagaaaatcatagaacccacgtatcagtaagagtcggtttaaaaataaaagagaatacctaactaacacattaatagattaactaggtaactagtaattaattaagtagaattattatttcaattagcatcattagaaataattaattaatcgctaattagtacgattaatctgctctgtgagaccgtggtggtatctcgcaccgggttcatattctctaccatagtaactatctttatacacactgacatgtgagacaataaaaatgtaggacccatatattagtagtaaatgtaatagtagtgatagtcaacacattatagtaaggatcctcaagcggctgccagctgacagctttcaaactcatcatcatcactccccaaatttaaaaggagtccgtcacaactctcctgctctgccgccgctgcagtttagatctcgaaattttttcccccttctcgctcattcgctcttgctcctcctggctgatgctgccgccgccgccgccgcgcagcaaaatgcccgccggacggcatcgccgccgcttccttcctccacctccgttataccatccatccccgctgcagtctacgaagtaaggatggcggtggcggccgtcgctgttggtcagccgcagcggtctcaggtagccaagttcttggtgacgtaagagttaagacttggcgccgttctatttgttctacattaccttattacatcgcccttctgtatttttttgctttcggtatttttgtgtcatagattattactacccatagtattgatgcatttctgttaaaatggaagagtgcaatatgaagactttgccaggataactacgctgtatctggttggtatttgcaaaacatggcaactagttattgacaaagaatcatctggccacatactatgaaaaactcgttgtcaaagctgaacaatctacattgtttctacctgttaaaaactgttctcatatcataagttcataacctgatgtcttgactagtgtcttcaaatgtcaccaatttactcaaattaaaagaacgatacccaggtagaagcgcattccaaattctaagagttctcacttcacactttaattttacactttatgactactagtattagtttcagatctgcaaccaattcactgcattttttttccagagtagcagtatcgacataatcaagttcaagtagcagagcaacattttagtagcagctcagagtaataggggcctgtttggcacagctccagctccacccctcctgaagctggagctcagccaaacagtttcagctccaccaaaactgggagtggagttgggtggagctctctcacaaaatgtactagagttgtggagctgagtttaggcagctccacaactccactccagactcaactcctggagttatatttaggagttggagctgtaccaaacaggctgcagggaagccggtgaattcagatcgttagcttcgccggattgaggttggggagtgcggatcagctgaatgcaggcgtcgtctcccagccgagaaaatcaagacaagggaaaggtgaagaagaccggggatggtggtcttcttgggttttgggggaattgcacatagaatattagaatgatatagaattagggaggtgaggtgacatactgtaggtgtttattggtgtagttgctacaatgcgaatttgcgaggtcacacggcacctctccgttcctccctgcatcagaacaatcatggccattcattatgtgatctaacggctccgaacgatcaatatagtataagcaatagtagtagtcagaaaagttttttcgtcgcggtacatttgctacagagtcatggcaatctttagccgtttgttcctgatcttgtggtatgggcgtctccgtcggcgtttgcggcagcaatagctatctgaaggaatctttttactcttaaaaattgtttgcaatacaaaattgctctgattgtggaccaaatgactagccagataaagatgacggacccttatcggtgaaccgtgatgcaagacagtgacacgtaattaagactggttcccataagacttttggcggcgctcccgtggacggtgcatctcgttcgttaatcttatttgttccaatccagtggaagtgcacccgttagctccctgcttcctgcacacatggcgtgtgtgtgagagaactgagaaccttgtacctcatggcaataccctggaggcctggaactggcaagttgccttttaattccaaaacaaaaacaaaataagagaggaaaagaaaaaggaaaaacaatgacatactttggttagcttatcttggacaagtcttctttaaaaaatctctcggacaagtgaatattattaatgtatgtactatctccaaatagtatcctagtacgaggttagatataatctagtattataaatttagatatgcttccctatgcagatttatagtactagattttttgtgtatagtatactaaagggtgaatagtcaaagtagtcctccaagttttatctaaggctcagtttagttcttgatgtttcaatctatctatattagtcctttaaattttcattttagttcaaactcattcttaaaccaacaactctcttgataaatgacacttataccctcatcattcacatatataagagaaaattgcatgcttgatttttttatagataatgcatagtaaattatgtaaaatgaaaacaaattatgtactagcaagtgtatatgatagcaattgcttaagttttatgtgcacatgttgaaataatgggaagtacatctgcaatgttgtttattcatcttggttttctcttttctatctagtacatagctaaatacaaattaagggcaaaagggatattttctaatagagatattgactacaaatagccatatggcatattaaatggacccaaggataattttaaaccaaaacaaatatttagaggagttatgtggacaaaatgaaacgtgaaggaccaaattgagccttcgatgaaacttgaaggactaaattagctattcaccctatactaaactaaattgatataattttgaaatggatgaagtcataactaattatttcctcttaaccctatcttgcaacgtaaatatacgcttcagtctcttttttatatacatggaaacagggcaacaactgtctcacacggtcactctcaggcttcccaacttttccgtatactctctccatatcaaaataaaccaacctagctataaaaaaatagaatttagtacaacgaattctgacaggtttttgtccagtttcattataccaagttatatcccatgtaacctagttggtttatttaaacttgtcacacctaacctagttggtttattttagaatggaggaagtaattgtaaggcatgatgctgaagtcatatacggtgagcccttatggatggaagttttgttttaaaaaaaaatggagaaattcaatccaaagaaataattcctacatgagtataggattataggattgcttcaaagataattcaaatgataacgaaaaaatcctccatattttgcaggaattctagcaaggggtcgaacctcattgtttcaaacttctttgagatttccaaggcactgtctctcaatctctctacattcttattaggaaaaaaatctaacaataatacaattaaaatagctttcacccattgtaacgcacgggcattttttctatttaatccaaaagaatgtgggactattcaatagccgccgctgttgccgcagacagccaagaagagccggagccatggccgaattttttggggactttgtgaagggagaaggtttgccggaggagggagaggaaggtagcaagccactggcgacgaagtcgagctagcgatggcggcgatgtggttgtcgacttctcggggaaacgatgggattgggccaatccagtggatacccatgggttgaatctaatctggaaccaaacttttgcagccaaaaccaaacaatccaaaccatttcccatctccatccaaaccagtccagtccatcaggtgcaccaacccatttccacccgcccaaagctaacccacactgaaatccaacccactatatccatttattagcaggcttactcgtgtagcagattagctcatgcaaacgctcagtcgaacggagccttagcgcaaactgactacatgagaattgagattaagccgcgcaaacatagcagatacttgaaatttatttaccagcatacatacaacagcactgcgctggcgctgattgcttcactataatagaagcattcgagagacctgacatgttccaacctctcttacgggagaaagaaaagaaatagtagaaccactagacatggaacagcagatcattacagagaaatgatcatatttatgattcttctatctccattttctgctcttgttcatcttgacagctttcagctcctgcattcaccacagccttgcgatacttctgattataccgcaggattactaccgaaatgaaagctgcagataaagaaatagatccatgttagtctcatatttaaattagaaaggcatgttgtgcatatctgctaaggctgttcagatcataatgaaaacttaaaaaacgaataatttgctacgctgtatgaaacacaagaaaaaccgatcacccaaataaaacacatatatgctacattatacattgcatatcagctcaatctatctattatattattaaaacagccttgaaaggaggcaccacgttcgcggtagaaaaagagaaatatctacaccgttagatcgtggtgggtccaaattataacggtgtagatcaattcataacttatatagttatgaaatagaatttgtattcaactaggaaaaggatattccatctctctgtattggttagcagcatatgcatttacgtatattggagtcctgatagtatttccgtatggtgtccgatttgggaaagaaaaaataaagaagtttgcatgcacagcagaactggaaaggtacatgcgggcataactacacatgtataatcacatattactaccagtaacatagcatttgttgccaagtgttaatttactgtgtattaaagaagacattacgttcgttcattgtgtaggctagaaattctcacatcaattaatcagagaaaaaatattttaatcgttacatcatgatgggtttagataataacaacatatattgactgatatagctgtatgtaaaatataattgtatctgtataaatagagttaagagttgtatatgaaatctaagcttatagaaaaagaaaaagttgtatacgaaattaaaatatacttttatatgaaccgtaaaggagtagggtggtccagaaaactatgaaatagaaccctaatgacgattaggtttgatttttagaatcccaataatataaataggagggatggcgagtgggccataaaggagtagggtcgtgatagttgataggacttttatagagtaaaaaagggaccgcaacgatgatcaggttcattttttaactaacaatgataatagggggagcgggcaggatcgggtcataaagatgtaaggtggccacatttgatgggatctctagaaactaaaaaacgaaatccgatgagacaataaactctaaaactctattgtccgatttttaaaggtcgcagggaagatgaatataagccgtggcgggctgagcaacaagtaaagggggtgtcagttgtgtgactttataaaactataaaattaaaaacccggtgatgataaagtttgattttgaaaatcctacaacaatgagatgatgatataataaattttataaaaatcatgtgtaaaaatttaaataattttttagagaaaaataaatatttttctatggatgctagccgcgcaattgcgcgggccaccctactagttatcttcaaagcatgagttttttatcaaataatagcaactcttcattgcagctcatgttgatttcaagtggtgcaagtaaaagagaaagtacaagtaggaggctattatttttctccaaaccagacagtttttcatcacaatttagaggcaacaccaaatacttccaaagaaaatattttttgtatcacgcacaatgcattacctacttatagaaatcaatggtctcaatattccattatgtttctcactatgggttcttgggttggtttatatgatctttaagttaggcttccaaacacaacactcctgctttgctactcttattgtatagcccaagtataatctttgcaacaggatacatgctggtggccggtctgagacagtcaacatataaagaagaaccatctttctacttgaaatttttcagtaggttcctagccagttcataaaaatggtctccttacagatgtgaccaaacactgtatcgaaaatacttttaccagtacctagtggatacataacatttttcatgaaaagtacaatggttataaagttattccaacagtataaaccatatcagcatagatacctgcaatgatgcgggtcttcacactgaacatgttccagcacattgtcactgctgtacccgcaacgagtttcttgcggggacaagacttccatgcttctagagcccgatctctcaaaatttcaactaaaaagaggaggaaatttagcctagcgccctgaacaattgacatatagcacggagaaggttaactcaatagaaacaagtaaatcatacctctcttatgaatttggcttgaatagcagctataaagctttgggagtgtaaagctggtgaaaaaccctgcaaagttccattaaacacaacaagcttcagcagagcagtcaccctaaacattgatattcttctttgtgtatacaatcgtacctgtggccagaagtctccatactgtaaccagactaccgtatttagcaccaaacagaagagcaggtaatacctaagattcggcaacaatagacttctgtattactcaggggaccgtttgtgtgccaaaagaatgtcatcaaattcggtacatgcttactttgagagtcatcgatggttcaccagagaagatcacttgtgcagttgatatcatggagtttgcaactggcaacacggctcgtgcagcacgaagcacatcatcttcagtcaatctgaagctccttcccctctctacctgctgcctgctgcagatgagaactcagattgattgccttgattgaaatgggtttacaaacagattgccactggctcatactgtcatacctctgaggaatggaatctttgaagaaggctaagcccaagaccatcacacccaagtgacaaagcgccgagattgggctgcagatcatcacccgaaagccgaaactcagtaacagtacatgatcaaaagaacgaaatgaactgcaaagcaggaaatccaggtagaaggggatcagattgcgcaaacctgaaggtgatctcccttgaaaaggagcaggagaagaagaacatggatcccaacccaaaccagagtgccgatttcgccacattcttccacatcaccaagtcgacgatcctttcccagagatcttcccacccagactgctcgagggcatcagcacctgcgccacaaatcgagatccgattagacacgaactcgaggaggcaattccccatacacaacgagagcaagagcaaaagagagcatctggagcagtgattttctcgaggcaaaaattagccccaaaccaataagaaccaacaagagatggcttcgctaacctcgtatcgcatcggtgctagccagcaccaacgccatgctcgtatcctccttatccgccgccgccgttgccaccttgtccgcggccgcaggcgcggccttggtcgccgccgcccgggtggacttcctcctgcgtgccctccgcgcggcgtcgtcctccacctcgatctccttctccagcctccgcctcgccctccgcccgttcctcggcgacgccaccgcgggcgccgcgcactgctccgcggccacgcgccgcctccgcctcggcggcgtccccgccgccggcgccgccaccatctccaggctctcgtccaacccagccccgcgatgccgcgaccagttgcggcgcgccgacccgggcggcggggacatcaggaggagctcctgcagcgagcaccccgacagctgcagcggcgacggcatgggcgacgacctctgcgcccccgcccccgccgcggacttccgcggcggcgtcgcgacctcctccaccgccgcagcagcagcagcagaaggggagtggtggtacggcggcgcggggagcctcgcgggcggcgccggcgacgaggcgtggtcgtggtcgtggtccatggccatggccgccatgtgttcgtcgatttgcctcgccgcgtgctttggtcggcgttggatttggaaggtgtatttggcgtattggagaaggttgggttggggtttaaggaggtgggaaagcgagagcgggtgggggagatttttatggggcccacgtgtcagtgtgcgtacgtgcgggaatatagccgttggggaaacgggacacggccacacggcaagcggtggtgcttttccaggtgtcagaatgaattgcggtgatgtggatgacaggtggggtcatgtggaggactgaggagtgggtccggcaagtcggtgagggggagtttgaaccgtttcggagggtggaagggtggttggtgaggaactgatgaggatcgttaactcacactctcacagtgtggagtggttgaaggaaataaagctcgatagaggaattaagaatggtactactaggcctcctttttattagcatatttttcactctgttaaactgtgcatttcatacagtgcatttcatacgtaaatttatatagaaattactataaaatattatataaatatgttttcaagattaaaaaaatttaaatttaattaattaatcatgtgttgattgtatttttgttttatgcacccatacttaatcttcatttttagcactatcgaatagcctaaattctcaattcgttttcccatttgctatttagcctcacatcgttttgctctatggctaataaggcgtaaattaagcaaggcaattataaataatttatgagtaaaacttacatatttatatttgtatgatttataagagctaatgttaaaaacaaactacactaaaacttaaaatcaagtttaaaatttaaatttggcaatagctgatagaccaataaacaaatgacataggtgtcaaataaagttgattgccgatgtctattatacattaagtgaaatgtttgttttagagcaggtatagtagttagtgaaggaataagttcaccagaggtcactcaatataacagcgagagtttttttgaggtcccttaactacaaaatcaaaaatgttcacttctaaactcactcaaaccgtgcaagggagatcccatggcagtatttatgtccggttttactgacgtgtcattctagttagaaaaattaaaaaaataaatatacagggcccacatgtaagcgatggtgtaggccccataactctcctttcttgcttttccttttctcttctcttctctccttctctctagcaggcacggcggcagactcggcgtgaggcggccggcatcgaagcaggggcggcggtagcgggagagggggagagacggccggcgcgatggcgagctcggcggcggagagtagcggcgcgcggcgcggcggcgagggagaggagcggcaggagaggggtcgccgtcggtagcagctggccgcggcgcagcgcgccttctgcctgccgctcacggggcacgtccttgccgccgcggggaccgggaacaccacgcggaggcaggtgctgcaggcgctcggctgcggcaggggcagcgcggccgacgtggccaacgtgggggctgcggctggcggcgtccgtggcggggagcgccgcgggcgacgagatggccgtccgcgccgcgtccgacggcggcgccgtgcgcgtgtagaaccgggtgatggaggagtggcgccgtgcgctcttcgtcgccgcgcgggagaggcccggcaggcgcgacggcggcgtggctgtcttctccgcgctcaccggcgacctgcgccatcgtttccgcgtcgcgcacgaccgtcacgtcaggtccttcacccccggggcgctcgccttcgacaaccggtgcaaggcgacaaccggtcctggtcggcctcgagcagctgcgcgacctctcgacgcatctaccgcacctgtacctccttgcggttcctcagcagcttgatccgcgccagcgccatccgcagcgccgtcttgctgcggcatccacgagacaaaaaagaaaagaaaagaaacactgttagcccttgcaagcacgcgccgtctccgcgcacacaaacgcgcgcggagagttagcgaggacgagatgatcttgggcaggcaggcaggcaggcgggcaaactgaccacttgtcgggcttgaagcccatgtgcaagacgccggacagcttcaccttgctcctgtgcatctccgcgcgctcggtgacgccgacaagctccagtggctcgacggcacgggcacgctcatggcggcgaccatgttcccacggacagactccttcgtcagcctgctgttcatgcgaaaaacacatactagtatgagagatctgcttaactctagtgcaggtcctaaatcttgctttcgggttcaaaaacgtgccagttgatttgattctgcaatcaacaagaaagaaaaacaagaaaacaaggttaaatcaataaacgatagccaatcggctaaaggctgatgacatatcgttaattattgagccaacgttattggcattagatcggcaatgaagaattaaacaaaataaagttaaatctgctcgatcggctgtagatatcaataatatataatctacttctagaagtatatttaagccaaatgattgggatagatcggacagcaagccgagacagtataaatcacttatgcttaaaagtactttaagacgaagatcatatatatatttataacatagccgatgaaacagatttaacacgtatcgactagtactccaataccactctatattaggatattaaaagcagatagactataccagacaataggcctaatatattttaatgcaataaaatcttaatataaagggcagatttagcatattgagtagtcatgtagagagcaaagtagctaaatcaggtaagatcggctgaaactccgatactatctctattgataattataaaacaagttagaattatagctatagatattacttagtaggtcgaactcgatgcagcattaagcatagggacaaatataatatctacacaagttgatgaaaacctctgcgagatggtaaatatcaatgttgctgtctaaccccatcagcggccttctaaccgtagatgttaaccgatttagtgttagacaacgatattgatagaaattatatagcatatacgataactcgacgatttacataaccaagattagagtgtcataaagatgtaagcactaatcccaagaacgcaagccgccatgacaagttttacctcttgttgaagatcgaaatcgatgcagctcaacccaaaagcaagaactcgttgaaacaataaaaataaaaaagggtggcgatacaccgaaagtgttattgaactgtcattgttaattacatgggatcgggttatatttatacccgagatatatgacagttccttgccggacacgactcttatctccaacaaaatttaagatacgaacaaattgtaggatcgagatgtcgactagaggggagtgaataggcgattttaaaactaaatggcacctaatcaaaactaacctaagttgctaggcttggtgagggttaagtctaactaagcaactaagttatgttttgcaaacctagggtgatagtggctcaattaattctctaggaaagtaaatcacactcctatgtcaaagttttgcaatcctagggtgatatgatctcaagtatgtctttaggaatataaattacacaaatataaatgcgacaatcaaataagacaaggagacaagagatccctccacaaattggttgttgttctaatttaaacgaaggcccggtttagatggcaaaaatttttgttttggggtgttacatcggatatacggacacatatatttgaagtattaaatgttgcctaataacaaaacaaattacagattccgccagtaaaccgcgagatgaatttattaagcctaattaatccgtcattagcaaatatttactgtaacaccacattgttaaatcatggcgcaattaggcttaaaagattcgtctcgcaatttacacgcaaactgtgtaattgatttttttctacatttaatactccatgcatgtgtccaaatattcaatgtgatgggtgaaaagtatttgttttggaaacaaaacagggtcgaagtttcagcttgtttctagtttccacttaggcctagttttttttctcaactccaaacttcaaatttataatagttaatttataatagtatatttaacatatactctactgctatatagttaaatattagaatgtttaatcatcaaccactataaattcatatagtttaacaccataaaatttttattttttccactatgataaatacttttataatatataatccacatcttgttaaattatagggatatccaaaaattaagagtaaatttcacaaaaactaaatgtacttttaccaaactatcacaaaactacaaatttaagatgaaatatcataaaaatataggtttaggaataaaatgatgacaaattacatgttctgcatgactacaccaagttaagtacaaaactacaatatttataactctaacataatagcagtgacatgaattcaactgtaaaatatacagttttgtaataacttgagtattaaatctacagttttatgatacttggccttatatatgtagttttatgataaatcttgtgttaaatatgtagttttacgatattttgatctaagtacttatagttttttgtgaaatttactcaaaaactaacttctaaagatagacacaatgaaaaaaaaacccataagtaactaatttgaattggtttgctcaaatcagatgcacatgcgcacacacccatttagtcctacacaaatgtgtcgtatacaggctgacgtattcaaatcaactgtaaccaagaatgacttacagttatagattacagcatttcccgacaattaatacattacaaatacaagataggtttgagttcacctgccggaagaatacgatatacatgtttgacaaggtaaatgatcatcttggtcacagcaacagattattaagaacaacatttgggtgccccaacgcgtagttgccgatgcaccacaataatgaaatatctcaacacctttgtgcttaggtttccagtttgccatgcctctggcagaaagattttatcctttcaaaggcatccacaagagatggtatatcgatggcgaaagtgatgcgaacccaattcttcaatcctaatgcactccctgtaaaatatttttttttctcctgagaaatactcatgtgcattggggcagaattgagtagccaagaacaagaaaaggcgtgccatctggacaaattaaactccttttcacgctgtgtcttatcttaacctttattttcggtaatacgcaaaaggtttgtgtatcgttgcattaagagaaataaagttcagtacaaataaatacaacagaggtaaatgttagcctaattcttgcaagtttcttaacctttatttgtgttgcctttccatgtaaggttgtagaatatacctactagtgtactacacattatcattaggaaattggtgaatggtgaaattgcattctaactaacattgtttagtatacttacactatatgttaaagcaatgacaaaatggctgagatataataggaaggcatgccatatgataatcaagttcaagacaatgtttgaaacgcaaaggctgctatgaaaaaaaaaacaatgcaactgtgtctcgcaatttaccatgatgtctctgttataataatggaagaagcataatgaaactaatcagatgctcaattcgtttcgcattagggtcctcttgtggagttgttgctaacaatatgactccattgcagacattaatgtgtagttgttccagtgtatttccactatgtatccataaaattcttaaaacaggttgacacgttgagtggctgtagtacagtatttctgtgcacatagtggattttgatttatattgctaaatggaagtaataatggtcgtcctgtttttttaccatacaagaggttgaacatttatggaatttgtacctggcaaaactatcacagactcctcttttgccaacctgcagcagaagtccatatcatcatggaagccatccaagtaagagagatccaattttacctgaaaaataaaggatagacatgaattagatgatgattgagattaggatacaaaactgagccagttcatccagagcatgttagcctgtactttttcttaccatcacaaacattgatccctctggcttgtgtggacatgtaatgcccttgatgtcctttattttatcataacataaatccgctgcattccttaattgatcgagaattttgttgaagtaatcttcttttgtgttggctataatttgagggattgctccctgtgaataagaatattagaatgtaacacactttctgaaaaattatgttgccatgcatgtgcatgcttgttagagagtttgtgtccagaaaaagaggaatatgtctgtaaatcatattgccataaatgatggatgtgaaaataagaaaggcacatatacctgaacaaacgttgcaggatcagttgagatgttaatatagttctcaattgattggttaacctgtcatgaaacattttagataagaaatccaattgccagtgcaatataattattatcctttttttgtgaggaatataatgacaaaatatccccttcaaaatgtaattgaatgcacatgcagcaactaaaaagaaaaggaagggaaagatctgggtagcatacaaaaatactatcagccaccgcaaaatggtgcactaacacattattctagattctatgctaccaacgcaaattaaccaagtatttctaagaagaaattatcaggctagacaaatgtaaaaaacctagccaggtgtgcttatttgctaaactgttttggagcctggaatcaaagaggcatcaaattcatctgcacttctgcagtttacccttaggcagaatgtgcagctttgttaggcaaatttacgagcacaatacaacttcgcgaaccaatagtgaacctagtcatggatcaaaacaagatatgcattggatgttggaacacagatcgagagttaaccttggcttcctttaaaatgccatttggatcacatgttgctatccaaccaagtcgccaaccaggtacaagccatctttttgaaatagatcccaaggtgatcactgggacggtcttcccaaaaacaccaataggtataaaaggattattcccaaatgccaaatggtcatatacctcatcagcaattatcagcaaaccaagtttcctggcggtctcggcaatctgtttgttaaaagcacataaatggcaaattgcatcacacaacaaaatacccagtaccttacttgtccaagaaatatactcacttttgccaaatgatcatacgaatacacgcttccacaagggttactgggattgatcacgacaattgcaacagtgttctcatcagcaatagcttgcacaccctctaggtctacctcccagcctctctctggaatgagatcgaaatgtcgaacctctagattgctgaatgtagtccgtgattcatacaatggaaagccgggtttgggaagtaagatgttggatccgggctgagccaaaacagagatcatgacttcgatcgcttggacacatccggaggtcaggtaaatatcatttgccgaaagctcataaggaagatctcgagataggtattctgcaatagcactaaagtttaaacaagtaaatatgagagatacacaccattcaagattgaaatctttgggaaaatatcatgcagtattgacaagcaggaattttaaaaaactggtattgcaagtaagagaagctaaaatattttacagatgagcgcctgacttagtactttttttacaagaaatgcacagagaattcttttatttagttaagaacaatatgaccatcaccacaagaaaataagagagaaggatatgaacatgcattcctaagttggtaaattgtactactatatggataagaaacaattagaacactgcagatccttttctttttcctttgaaattttctgaaatattgttccacactctaaacatgccgatttacattttgttagttatttagtgcaacaaaacatcaacaaattcccctttctttcctcatcaaaatgttaggagtcaaagcatatctacatccatagaaaagagataagaatgacaaaaatggaatcctattcctccatttgcttttagtaaaaatattattattataaaaaggaatcaaatttccagctccatattgaaccattctccattaaatttacctcgcaggtaaatttcaaagtttccagcttggaaggtttgaggccctgtttggtatcccagcaacttgtcaaaagtaccttttgtttttttcctattcttgaaatagcatctccctatgtactcgaatatttgtccaagtcaagaaagcaccggtaaggcaccagacaaaataaatgctcaatcggccagaaattgtttggtgccaggggaaccagggaatccggtgaatacactgtgatgccgggtttgaaaattccaaaataaatcatggatgtatcataaatttaatttgacagtcaccataaacattgaagaactgtttccttttctatttttttcttcttaccggaaacaagaggtgaaaaaaatatgtaattacaacttcgtcgtgcaaccagtatgtgaatgaggagtaccaaacatatcttccatggaaaaaagaattcaaactagaaccacaaaataattaaagagagaagaaaacaggaaccaaataacataagctaaaacatcaaagagttttctaacaaaagagctaaaacatcaaactacacatactttatgcagttaaatttgttgaaaatactaaaaaaaatccaagtatgcaaaatgttgcccataaaaatattcaaatctgtttttctgatcagtcacatactagaacataagcagagcacagtgtggcaagggggggggggggggggggggcagctcaccggcgcgccgagaggacgccgacggttagggagtagccgttgtgcgccccggagcggagcgcgtcgacgacggcgtcctcggcggcgggcgcggtgcggtagcaggcggacgcggtggggtcgccgttgccaagccgcaggacggggcgcggcccgccggcggcggcggcgtcgacggaggagttgacgcggttgagcaccgcgcggatgctcgtgaggccggcggccgccaggggcccgccctgcgacgacggccgggagaagcgccaccgcggcgtggcctccgccccgtcgtccccgcggcgcttgccgccaccgacaccctccattgttagctcgatcggatgccgctcttcgagcggtttatccaaatttgttcgtttcgaaggtgaacaaaaatggaaatatattctccccatatatcggcggtgctgtaccctgtactgtactggctgtgcatcgtcacagatgtcacaataattatggtgatatagtatttttaataggaagaggtagaacatcacgtatcacgtgaacgatttgtttaacattattggttctaaaatatactccatctgttcaaaaaataagcaatttatattttgtatcggtactgcttgtccggttgttatatccagtatccacaactctcatttatttaaggcatggtttatattcaaacttttttctttaaactttcaactttttcatcacatcgaactttcctacacacataaactttcaatttttctgtcacattattctaatttcttcaaacttctaattttgacgtggaactaaacacagcctaactttttctcttattacaccaaccaccctcatactcagccatgcatttctaagttccaacgaaggctctgattagattccaattttcttctttaaatttctaactttttcgtcacatcgaactttcctacacacataaacttccaacttttctgtcacattgttccaatttcttcaaacttcctattttggcgtaaaactaaacacacctgaaatggagtagtatttcgtagtcctgtcttggtccacaaatgcatatactgtatgctctctttcgttccataatgtcatctagtgtccatagcattaaatacattgtcacataagtaaaaaattctactccctccttcccaaattgatcattatgtaatagaattcaaaatttctaaattaatcatcatacaactgcatggatacggatttcatcagaatataattaatgtagtatagtatgtgaaaatgtatgtatgctagggtgtaattggtatgggattttaattgatgcatgcattgtgggagaaatgtgtgcatggtgtctttattgatgcgatttaaattgtccttggtcttggtgcataaacttatatttgggaaggaggaagtatgtggcaagagagttaacgaggagatatgtaaaaagatgaagaaatcatttctcatgcaagaaactatctctacacaagaaccaataatgaaaataataaggggatagatagataaaaggagagagaagagaggtgattggatgagaatttaattgaacacaccatccattgaatacatagtttctacacagtgtctatatgatatggcaagtatagaaactacttcatagtttttggattatggatagcccaatgtacgagaccgttaattttttatcccaaaatatataaaatttagtataaatatataaaactaaaagttaagattatattttctttgatgataaaacaagtcagaaccaaataaatagtatttatatatttattttgaataaaacaaatgatcaaatattataaaacaattcaacacatcatacattttgagacggagggagtatgtacccaaactttaacaacacattatatgattgaaatatgttaaaagcttagtataactattttttttcaaaatatgataattgaagagttaattctagtgaaaattgaatcctatagaatacctcattctatggaagtcccaaccttatagaaagtttgatttgagtctttatcctttctaaaattgttgtgtttttttctacggtacaattaaacggttattctgtaatttttttcttttttaataatcttttttagtacttgcattcttataaaaattctgtgttttctttagttctctgttttaatcctatatctatacttcctataaagttataacccactaattctaaaacttaacatgcaaccatgccacatcatcatccactagcaataattatatattcaacctcatacaagcaatatcatctacaatctatttaattctacaaatcaacatgcgtccaaacatattcaatcatcatctctcacatcatttccataatatttttataaatatatgtatcatttttcggtagcgctattccgagcgctagagcgcggaatatatatatatatttgggaataggcgaggggcgcatctttgtattaagaaggaataaataaaaaacacgaaagggacaagattcaggaggggggaggaggaagaaaataaaagcctaatctcccaacgaatgtggcgaccttccacccgacataagggtcgccatggccggtatcgcggctctagccaaccgccaaaggtccgcttcgcccgtcatgtccatagcaatttccgcccatgtcctgctcttttggttgaagacctgattgtttctttttttccaaatcgtccacgccaccaaagttgcaatggtgtcgaaccctcgacgatgttccttggccattcttttgcgactgtcacacagccaggagtgaaaggaatgctcattgagaggcagacactcagaatgaccaatagctgaaagagcaatccaccatagctggaatattgttccgagcaccgcacatcacgcccagagtccgcaaaaactggtgtttgtttgcccacgttctatctgtctagattagttctatttaaatttggggtaaatcaattatagatccgtaaaatcggtggtcggttgaaaataattgttgtaattggtttatctctgtttccaatcaaggagctgaaagagcaatccaccatagctggaatattgttccaagcaccgcacaccacgcccagagtccgcaaaaactggtgtttgtttgcccacgttctatctgtctagattagttctatttaaatttggggtaaatcaattatagatccgtaaaatcggtggtcggttgaaaataatcgttgtaattggtttatctctgtttccaatcaaggtagttacgatatggtgtgcaacaaactgagaccaaatcttgtagtaatcgaattaacatcacgcccagagtccgcaaaaactggtgtttgtttgcccacgttctatctgtctagattagttctatttaaatttggggtaaatcaattatagatccgtaaaatcggtggtcggttgaaaataatcattgtaattggtttatctttgtttccaatcgaggtagttatgatatggtgtgtaacaaactgagaccaaatcttgtagtaatcgaattactgtcgatgtaaataaaaattgatggtgcatgtgcctgtagtaattagattaacgacaaccatgattagtgaaatcttgtagtaatcgagttactgtcgacataaatgaaaaatgatggtgcacgtgcttgtatgtaacgtctcgcctctcccagaccgggctcgcttacatctggccgctttcataggtcatagattgccatcacagaccaacacaagccttttctgcacactttgtcgagaccggcttccggaaaagaagttgcaacttattgatatgagtattctattaatcctattaagccctaggctgggatgtcacaccctcacccccttaagagagatcgacgcccctgtcgatcaacccaggccaggaacgtcccctcttggccacgtccatgtgtccaatgccagcgcatgtgccatgctgtgtgatcacagaccaacacaagcctttcctcttggccacgtccatgtgtccaatgccagcgcatgtgccatgctgtgtgaccactccgggtccacaccagccatgcataccatgccgctttcataggtcatagactgccatcacagaccaacacaagccttttctgcacactttgtcctcactcatgcgctttcataggtcatagactgccatcacagaccaacacaagccttttctgcacactttgtcctcactcatgcgcaatcaggaagaatttcctgatcggtcacccatcccgaaattgctccaagctaagcacgcttaacctcagagttctttcgagatcggcttccggaaaagaagttgcaacttgttgatatgagtattctatttatcctattaagccttaggctgggatgtcacattgtagtagttggattatgaacaagattggttgatcaaatcttgtagtattcgtattactgtcgatgtaaatgaaaattgatggtgcattaacttgtagtaattgcattattgctagccttggttgatgatttcttatagtgagtgcatcaataaggagggagttactggggcctaattagtttatcccaaataatacgtgaataaactttttacttattcattgaatcactccattcaaaatcacaggacaaaaaataaagattttacatgcacatcatagtaaaagcacaagaacaaaaattttacacacaaacacagcaatacacgcaatcgccagttccttgtgacggctgaatggagtttctgtccgggggggctaatgggcgatcgatcgccagggcgatcgcccagcgatcggatctgcccccctgcccctataggcctcccacttctccccttcctcatccccttcttctcttcctactacagtacaccacaaaaattttttaaagaaacaaaagttagaaaatttatgtatagaaatattatatataaaaaatttgaattcaaattcaaatttgaattcaaattcaaatttgaatcgggtatgtaaacttttgacttataaactttggatctataaactttaggtgtataaactttagatgtatagaaatactatatatagaaaatatttgaattcaaattcaaatttgaataggatataattcaaattcaaatttgaaacatgtatataaactttaggtctataaactttaggagtataaactttagatgtatagaaatactatatataaaaaaatatttgaattcaaattcaaatctgaattggatatataaacttttgacttataaacttttggtctctaaactttagatgtgtaaactttaggtgtataaactttagatgtataaatttactaaaataggaaagtaatgcggtgccaaaaaaggaaactaggtggaggggtggagggggggtgaatctgatcgccctgggcgagcgagggcgatcgctcacccagtagcatttccggtttctgtcctgctagagagagctagcaagaagacaaagcggcggagatgcaggctggagccaaggcagcaccaagtctagccgctgcgacctcggtaggagccggatccggcgacggagccaaagatggaggtcgttgttgctgttgtcaccgcctcactgtcataaactggggaatgacagaggtgatgaaacaaatcacagtttcttgccgatgttaccaaatcgattaaccatcacaaacaggatctccgccatgcaagggagaatagagaagcacgccaaaatgagtgctcaacccaatcgaagtcagactgcatacaatcaagaaggataaagaatttaattaatcatagattatatacaattcttgcaagaaataaagaatctcattaggaattgttgagagaactcaccgtcctcatgacgtccacctcgtttgccatgggccagacgtctcttcagcatcgatctgaagcagatgttgctgcagtgaggcctgaagcagtgccttcgcctcaagcgtcgccggccaccgttcaccggccaccgccatcaactgccacggtgtcgtcgtcctcctccatggtgcgtcgccgatctgtgggctgggatggtggatcgattgagatctggaaaaaaaggaaaaaaaatgaagtgggggcgagaggggttggttgggtacgggcaaaatagaatatataccagaagtagagaggttgtttttatcggagtaaatcatttactccgataatggtgggagcacgatgcgggacgtggggtgggatcgaaagggaagttgtttttattatcgaagtaaatcgtttactctgataacggtaggagtgggatgaagggacgtggggtgggatcgtaaccagggaagttgtttttatcaaagtaaatcgtttactccgataacggtgggagcgggatgatgaaatgtggggtgaggtgggcctggctgatacacgtttggcgcttggaatataggagcgtgcagtgctcccaatagtagttctaatcttttttataatatttaacataaacttatcaatatgttccacattgaagtgcgagattcatttgtttgttttatgctaaaaactgtaagacctgatatttcatttgttttccttttacccttggcttgattgtaaaaaaaaatatatattgaaaagtactaagtaatccccgtagcaagacgctgggaatcacttagttttaaaggaggcctaactgttatacaatgggatcggaatagtactatacaattaaaattttggagtctaatttacttaatcacttaatttttctcctaaacatgatcatcgatctggtgcttaatgcaaaattttgatataactgaccttcttgtgaagccattgaagccgttcaatcggttttgcttgttgttcttcctttctcttttcttattcttcgtctactttgcttgttgttgttattcctttctcttttcttattcttattctttgtctgctttgaatagcatcttagccggggcagagatgtcggcttctctgttgacaaaaagaaaacttgtagagatcacctcatgaaccccttctagcatcgagtcgatcgggcgacttagggtgtgttcggctgtccaactgagtggttgtgcagtgctgctgctgcaataattatggtagaaattgtatgtttgctactgtggttgttggctgccatcctgtcacaccaaacaggcccttaaattagtgttttaaaatcaagacttctggtgtcttcaggagcggcgcggtgcacccgtcatcgtcggtgcatcccttgtcaaagccttccatccattttccgatcatcgttgtttgcttcctctcctactgcctcacatctgccgctgctgctatgtagccactcccgctttccgcggcctcaggacgctggcatgcttcaatgcctcgcaagggaacgaggcaaccgatcatgctgggatatcgggagttcgggactagggattggcctccggtagcccgacaagtgccttatccagtccctctcactcttctctgcgtagcgtgagtgctggagaaaacatgggaaacagtagcagcatgcatgggtagcttttgaatgtggatttggataaatatctatatctatactaatataaaaagaagttgcccccctccaatgctacaggccaaatcatcccccaatcatctttgtcctcagccgtccgatctgttgatccaacagcgaaatcaccgattccgccatcccaccaccacacaaatccaccgcgctatctacgcccccacgctctccccgcgcgatgactccgccgccgcgcctcctcgcgctgctcagatgcgcgctgcgcctcccgacgcttcctccctccaggccgccgtcgtcatcgcgcggtcccgacccctccagtatcccccccatcccgcctcctcctccaccgcgtcgccgatggttccatgtcgtcgtcgtcgtcgcgcggtcccggccagctgtccaccgcgccgtcacagatccagccatccctcataccggactcccccatcccgacggccccatcccagcggcgaggaggcgccgtcgcgcgggagatgactggtggggagagtgaagagggagaggcggatggcaaccatccctctgtcacgctcgctctccaatcccccttcacagtcgagccctgcgtcgtcgccttcccccgccgatgccaccacatcaaggcacctcacgcatggagctctttccccgaagccggatgcaatggccggtccctcgctaaggcgcccagcagatccggccagttgcctcagcaacagagagtccacggacctctccgctgctctgtaagaggatctggactcttctgccaacgaggccactgtctgatccaccatcgtaggggattctttccgttccctaaatgcaccacatatcttcccctccggaaattatttttttcaaatgaaattgatagaataccaatggctgttgtaacaaggtaatttgccctcaacctttagcttttcaaattagaatcaatttaattacttctttgtttacgcgcatcattttaccctaaagactgatgcttgcactgatgtaccatgttgtcatgggggatgatctagacgtgaggactgacaagccatctcttgatatgtttcttgctgagatgaggaggttcgaggtattgccatgtaagtgctctcacctataatgttctttatactaaacacaatattataattttacctggcacaagtgcattgcatgttgttcgggtcaatttggaaccagtatttcaagctccttcttctgtagcagcagttaaaaattgctggaatgtgacttcgctcctcctcgctcctgtgtactgccgccacgccgccgcatcctcgccggagccactttcttctccatccaccgccggagccgaggtccatcttacagtttaattcctcactgaatgttgactatccctgccaatccatcacacgattccctctgaatgctaatccattcaattaatttcctgcactggtaatatctctcccatagtggggaatcatgtgtcttttgtacaaattacataggttattaaactggattctccatttcactttagaagttgattttcttgctttcttggctatatttcctgtcatcacatcttacatttacaagtaggaacgaaatgatggccgactaccttcttgatcactgcgatgtgccccttcgcttcaaggatatgcataaatccaaggtgattctcatcttccaaatctttatctcgatatttcccctaggaataaaagattccaaacccatattcacctatttacagtgagcattaggatcattttatagaaaaagatatcgaggtgatctagaagttattatacattaggtctgctgcttcattataatagatcatatgtgtatttctgaatatatcttctttgtttggtttttcccagtccggcactctgctactattctaggtaccggactacaacctgtaatattattttgcggtgtactgattgggtggttagatttcaaaagcaatttcaaattatctgtcctgtccaataactattgccagattacccaggtgccatgtacaatactatttttttttaaaaaaaagtggcactgaggaagtttgagaaccagtatgtactcctaccaatgaatatcacatcatggtgtttcaggttttgtttaagtttggaaagaaaatatacataatttgtggcaaataatgttcagatttgcagattaacatgctaccaaggtcaaaactgtatgtaatacatgcaagtgtcagattttttttgttcccctactttactaaaactgtaaattaggtttataacgtgtttctgatatataacaataagagaaatcatgatatcaaaaagtatctgttaatgctataaggcatctgaatatattggcttacttctattgtttataatacaggttgacattgtggccaactggagattttggtaaaatcctatcatgtttcaccatggcatttcactgtttggcgcacggtatttaggagctatttgtatagtaaatgctggagtattgaagtaaattatatgttcagcttattaactgcattgcgataagctttgatctagatccggtttcaattttcatttgtgtggtcgcatcctttaatttatatagcttcataagagtatactccgaagtacatgccgttttatgtatttttatgccttcatattctgattgtctaatggctctaaaacaacagacgggtggcctcatcaggcgaattgctccctatgcaacctgacatttcaagatgacacccaacctttttgttcaatgtgctttcacaaacaggatttggagattgctcaggagctaggtgaatgttggctttccgcttcccagtgacctcaatgtagacttggctgattggcagatggcttcaaggagaagcttcagagattatctcagaaaagtttttggtacactcttcttcttcagagattgtctcagcaagttgtatggttgtgcagctctttggtgacatcaaagaagaaatcacaatctggagggaggcaggcttcatggtaggcgaaaaacgattggcattattccttttgtagttttttctctcccgctctttgtaaccggttttgacaacttcgtgtggacgcttagtttgtaacaccatctcataatcttaatgaatttgcttagcctactcttgggccagtctggctaaaataaatgtaatcagagttacactttatttgttggaaacataacttgtaaaataaaactaatcatttttatcctaacaaaaggctgctcaatgctgcaataatttctgttgaaaaaggaagtggcaaaacaacatgtcttttgctactttgttctgtctgtttttcttgaagaattctctaattttattgtgattagtcttttgaaaaggctatattaaagaatttcttattttgttttggttctttctatatgcacaaattaatagctctataaattcaatagttgaagagaagcaatgttcagaaaagttgaatatgcacttgatatatatgtgttaataaattacctttcaaagtatgtgtactttctaatttttaaatgtgactatatattttcttgatatatattatgacaaacgtgctttgcacgtgcatgataactagtaagcacgaatcttaaagataaatcttatggccttgcagcaagtcactttattcgaaaatcaacgggatgaaataacttgactctcatggcatcgggaagctactcagctaagtcggcgtacatgatgcaatttgagggcacaaaggcgaagcctttcaagcgcattgtttgggaaccttgggcaccgcccaaatgtaagttctttgcatggctaatactgcaaaacgaagtatggagagcagatagacttcaaaggcgtggcatggcaaaccagccgctatgccctctgtgtgggacaacgctggaaacgtcgttacacctcctagcaaagtgacggctttccatcaggatttggaaggaaatggagcgctagacatgctatgatctgcatctataggattggcaagagtatgacacagcggtgcagtggtgggagggattcgtttcaattcctggaataccgaagaagcccctaaaaacgttgatcatcatggtttcatggatactatcgaacgaaaaaaacgcaaggatcttccggaatacggcgcaaacgcccacagctctgatccaggccatcaaagatggagctgcactttggtatagggcaggcgcccgatgcctaactgagtttgtaccgtcgggagagtaagccttttccctttcctttttgtgcactatcactttctttaagcaagccttgtacataaaggtgggagggattcgtttcaattcctagaataccgaagaagcccctaaaaacgttgatcatcatggtttcatggatactatagatcgaacgaaagaaacgcaaggatcttccggaatatgacgcaaacgcccacagctctgatccaggccatcaaagatggagctgcgtatagggcaggcgctcgatgcctgactgagtttgtaccgtcgggagagtaagccttctccctttcctttttgccggctgtcactttctttaagcaacccttgtacataaattgaggccatgccctcctctattaatacataaggcaaagtctcttgcctttccttcagaagaaaaagaaaaatctggttgacaaatcaaaataaaacaaccgacggttgtgcagcaagtccattttttttaattacgattgggtttttctttactaattaaacttactttcccatgaatttcattgaagttcacatagaagtttcagtgttggattttatagtccagaactttttcttgaaaaaaaaaattgtagccgtaaagcatttaaaaaaataagcccgaaaataatactagaaaagaaagaatataaatgcaaaaatgccaagcacatgttgtcatgtgcccttccaagcagactatcctgtatataccatataacaatacaaggattgtttgctaaccacccatatcaggtggtgccccgtatccgtggagggcaccttataacgacgtaataaacttgcaatgctaacgatatggtacaaatcagattataccgggaccacaatatgtttaccgctaactccgtatccaaatttgggcctgcacagggttgtcggcccactagaagctacctccgtatgcaaaggcccaccgagaggaagcgagatggcggagatccgatggtcagcacggtggacgcgtcatcatcatcagaaatttggtgccccaagctgaacacagtgtccaaaaaaatgttgactatctggactgatcaactggcaacaaagtttatcacaaatatatatatgcatgagccatattcatatgaaaaatgcaatgcctcgtgaacttaaatttgatttcgaatatataataactaataagatacacaagttcctcgattgaggaatttgacgacataatgtgtgctgatttaagtgtccaacttgattcaactttattctcacatgatgccggttctacacatccatgagtacggatgctgaaagcctgaaactattcacgagctagctggcttccttgattttaccatgcctcttgcagaaacacttggttctctctagaccatcctctagtaattgtggatcaaccgcgaaggttatccggagccaattcttcatccctaatccactccctgcagtgaattacatttacactgttttattcatcttccattatctgaaaatacatactagtcgcggcaaaattcagacagagtaaaatggtcaggtcattcctgacactgaaatgcgttcagtgacagaaacacaaccatcagatgatctacagaaacatatccataatttaccaaaaccagtaaattaaactgatgttctaattactgtaattacctgggcagatgaccacggattcctccttggccagcttgctgcagaagtcgacgtcgtcctctatgccatctagggaagacaggtccagcttcgccatgacgaacatggagccctccggcttgtgagggcaggtgatgcagtcgatctccttgagcttctcgtagcatatctccgccgccttcttcaccaccccaagggcattggtgaagaacgcatcgtccgtcttcgcgaggatgtcgggcaatgctccctgctcgatcgatcatttccatggcgtcatcgtcacagctaattaattgatcttcagagaagcgaagatgcgcgacaactgaatttggatgtgtactgacctgaacaaatgttacgggatctaccgagatggctcggtagtcaatgactgagtcgatgatctgtggagacagagaaatgatccatgaggtagttgatcaagtttttcaaatcaattgcattttggtcagtgttttaaatagcgggctaagatatttagtggttgaacttctcaagcagctataggtaggttctatttgtgggttggggggggggggggagcaactagtgagaatctgaagaagctcctagcttctggattctttaactatagcttctcgatcagaatctgagtaaaaatatgtattttttaggagcttctggtagctagagattttaggagaagctgtagctgccaaaagctctcccaaacaatagtggactaaatgaggctatagtagctaaattgtatatgagagtaaatagctactccctccgttttaggttataagacgttttgattttggtcaaagtcaaactgctttaagtgtgactaagtttgaagaaaaaaataataacatttttagcccaagataaatttattatgaaaatatattcaattattgatttaatgaaactaatttggtattataaatattactatatttgtctataagtttagtcaaactttaaatagtttaactttgaccaaagtcaaatcgtcttataatctgaaacggagggagtagatccttctcaaacagttataaccagggatttagggcatgtttggttggttatttaagcgccctcaacttaacaagtgtggcggacgatttaagcgccacacattcaatgaagaaacatgcggtagagtagttcatcgctgttgaattttgtgcggtagtctcaggtgcaataaacaaacaaacagtgggctaactatctgtggcacgcctaacttgaagtgcggcaagaggaggcaaccatccaattaacaggcccttaaaaccatgattctggctaattgagaaatttagacagcaagcaaattaagcaccttcttgttcctgaggattccgttgggatcggtggcggcgatccagccgaggcgccagccgggcaccatccaccgcttggagatgccgcccagcgtcatcaccggcgccacgtcgccgaacacccccatcggcacgaacggcttgctcccgaacgcgaagtggtcgtacacctcgtcgctgatcaccattatccccagcttcctcgccgtctctgcgatctagtacgtacagatattaatccggttatgtattacgatttgtcatcatcgccgatccgaattgatttgatcagatgtattaatcaatcaaaaccttggcgaggtggtcgcgggagtagacgcagccgcaggggttgttggggttgacgatgaccatggcgacggtgttggcgtcggcgagggcctcgacgccggcgaggtcgacctcccactcgctgtcggggaggaggtcgaagtggcggaactcgaggccgctcagggcggcgcgcgacgcgtacagcgggtagccgggccgcgggagcagcacgttggcgcccggcgacgcgagcacggacatcatgatctcgacggcgtggttgcagccggcggtgagcaccacgtccgccggcgagacggcgtaggggagctcccgcgacaggtgcgccgccaccgcgctgcacatattcaatcaaagctagccatgaggacgatatcgacttctctttagagttcaaaccaatttcatctcttcctgtcacgaaagaatttcttgaaccgaaactcaaaaaacaaacaaatatttgcccttataatatgagatgcaggtaacggatatttctccttttcaaggcagccacaaaattgagcccataaccgtcggtactaattcatgaaatatattctattagtatgagatttatgcgtttgaaaatcaccttatagtatgtagacaaagtgctaattcctaccgaaatatattctattacttctgaaattggaaggtgacctggaaaaattcttaaaaatcatgaatttcagatgcctttgttacgatgccagtctaaaaagaaaatctcaaaatcccctcaatccgcacatggttatctgaaaattagtggggtggcatgaagtcggcatcgcatcatcgctcagatcggaaatcaaatcagaagctagcatctctggagtcttgacactgaaatactactatttctggactgattgattggaatctcattagttaattaccgactgatcgatcactagtcaccacgccctatatcttttattgccagtggctggtcaatgggaaataattgaagagtcttatttatgttattttttgtccgcatattgatttgatagtactatttgtagttgagcattttctaggttgtccacagggctatgttactactctgcagctgtgttcttgggtgagcgttggaaaccctcacctcccgcacagaaaacagcgcaatggatttgtgcacgataaattaagtattagctaaaaaaatattaaaaaatgggttagtatgctttttaaaagcgactttcctatagaattttttttaaaaaattacaccatttaataatttaagaagcatgcgcgtggaaaaaaaatagaggatgggaacaagcagcgccgaacagtgtagacagtttgagaaggggtagagaatattagaaagatactgtatgattaattgagtattaattattttagatttcaaaaatagattaatgtgtttatttaaagcaactttcctagagaaaatttttataaaaaacacaccgtttagtagttcgggaagtgtgcacgcggtaaacaagagaaatcttctctctattaccggctgccgaacgcaggtgcctgtacatcactgttttaaaaataataatatagccaactacttactatatagatatttatagtttatctctcagcttactcatatagtgattaacttttcactataaatatatggcccacctatctttcccacatattttattggttcctttgcctaagctggctgtaaaattacagcccgcttctcatctctctcctctcctctctcatccacttcagcattcagttttcttatagcgctctataagaaaacgatttgtgtcagagctttgttcttgtcttagggtgcttttatattccctacatttcgcttatacaacttcattgtttggtgctttcttttattctatacgtttttcgaaaactttttatattgatgtttctttttagaaaaatcaaataaacatatttttaagtttgtaatagttaatactcaattaatcatgcatcaaaagtttatcttgttttgtgcgtcgtcataaagctaagttgaacctcacatttgaactaggccttaattgaagatactctatttatttcatattataagacgttttagcctctcttttttttttgtctaaactaacattcatatgaatttagggcctgtttactttgatgccaaaaaaaaccttaccaaattaatgccaaaattttggtatagttgacaaaattttggtaagaatttcttatatagttaccaaaatttggcagcaaactaaatgtagctattttttttgacaacttcatcaaaatttggtaaggttgaaaatggcatcaaagtgaacaggcccttagaaatatatctgaagcacataaatagatccatggatgattgtatttaaaactaaaatggcttacaatgtgaaatagagaaagtacttatttgcacatggaggataattagcacttcatgttccagttggaatgattcaagaggagatagaaagataggtatagagaggtagtttgagttgttggaatgtttttatttagagaataaaatacactcctaaaatcaggctgattgagtagtgacttctttagtctaaaatattatcttctgatgaaaaccatagaaaagattgatttcattgaagaaatattatcgtatataaaattatatgatatgcgattttttctataataaattaaatcaaacattaattatgtagctagctagtgtctactcctctgtcataaaatttagctatttctctttttttttcatgtgattaattgagttcggccttgaaattctgtaaaaatatatgtacaatgtaccctatgctaaagtgtgtgctaatttatatatataaatttgaatatttggccaaaattcaccacgcgtattcacatttttcacacgatatttcatccaagaaaaacgtatgatctgtcatccacttttgcacgcgacgacgtacctgcacgccggggcgattcctacggcgggggagtagtagttgtacttgccggaggcggcagcggcggcgacggcgtccgtggcggcgggcgcggcgcggaagcacgcgaacgcggaggggtcgccgtgggcgagtggcgccacgggccgcgcgtcgccgctcccgtcgaggcagcggtaaatccgtgtcacggccgcgcggatgctctgcgaccccgccaccgccagcgccgggttcgccgcgccgaaccgccaccccgccgtctcgccttcgccgccggcgccgccgctctccatggtggtggagcagagcaggggagaagaccagaagagggtggtgtgcgtacagcgcgtgtcacaatctgtttcaattctttgtagtttttgtaagtagggatcaaatttgacccatattgnnnnnnnnnnnnnnnnnnnnnnnnnnnnnnaatcttgttgggggcgatcatgtccttgatcaatttaataatacactacttgtcaattaactgattctatgattaacttatggtgttagagcatattcttcagcacaaaatttacatgggcaatgctccgagtgctggtatgaccatgatgcttcagattgacgtgtcatgtgtgccaacgtgccattaacacaagcaatgtgtattttttaaaggtaatgtattctaaaattacatttagcctctacgtctaaacacgtgcatagagaaaagaaacaagaaaattaagacgatacgaacgtatcgacctgcattacaataatgtcattttaagggaagtggagagtttcatttcacggttaccaagagtgtcatgtcatctaatgagatttgaattgatgaatgaaataagatctctaacatagaatttcattttgcaatttcgtaggttcatcataacatttaatagcaatacatgggattggatgagattaaactttttatctctctttataattatattgtcatgtcaccaaatctgctaatatggtactccctccgtttcaagttataagacgttttaactttgatcaaagtcaaactgcttaaactttgatcaagtttataggaaaaagtaataacattttcaactcaagacaaatttattatgaaaatatatttaattattgatttgacgaaactaatttagtattattaatattactatatttgtctgcaaacttagtcaaatttaaaatagtttaactttgaccaaagtcaaaacgtattgtaacctgaaacggaaggagtatgctatttattgagaatagaactcctgtatgaaactactattgggattggcctaagttgctatcttataacaccttttagaacgaactgtcattaaccaacctaactattagtgcgttatttttctccacacatttttatcacctactccctccataaaacaaataaaataaattcaaatcctggttatgaaactggataagtatttgttcaggttcatagcgaggatttaattcttcctgtgatggaaggtataatttattatatttttgttacagtgattttcggagattcgtttcactcaatgttaatcaacattgagtggtagtacgaactaagcactggaaccttccgttttagcaagttccagtggtaacttatcaaatctgataatagaagcagtgatatgcaatttctcttagaatatctggttctccaaacaacctagattcttacccaatctctaagaatctatagttatataaaaaataaactagaaatcagaaactgtattgctaccaaccaactacatcttagaatcttaacctattccaaataaaaccgtagattaaaaagggcacaacaaaccaacaatttgatagaagcatggctatgtgttaattaacaagagcatggcaaaccaacaatttaaaccaagtatttgcagggataagaattgttaagtggcaaccgagcaagagcatggcaaaccaaccatttgaactaagtgcttcagtgatagggaaggggaaatgtaatgctcattatccaagcaaattttactgaaacacgactccaatacaacggtcttgctttcgtattcgttacgcgtaaaattttcgagttcgacttctaaacagttttagttcgtaccactagtacagaaaagatttttccatacaggcattttgatttctctgtgcggttatccggcaccctgtagccggctgtctgcgaaaattaatattttcgcgtgcgggtgggtcgaccgcacgggataatcgattatcccatacggttgtgttatactgcccgcacggaccaaaaaaaccaaaaataaaaaacaaaaggaaaaatcgctcgagcgccaccgcctcgctccaaaaaaaccaaaaataaaaaaaggaaaaatcgctcgagcgccaccgcctcgccgctccccgccgcgcccggccaccccggcgttgccggccgagttgccgtcgtcctcctccgcttcgccttcctcctcgaccaccgtgactagcttggcaccgagcgtggccatgccggacaggaaagacgccaccgacaggaaagacgccaccgagccggtggagcgtctgatggtggtggtggccgcggcttggtggagaacgtagttggcgacgagcggggtgggagcgttgaggagccccaggccgccgccgcgcccggccgccgccgcctcggcctggccgccgctgttacgctcggcagccgtctcgcccaggatgccgccgcgcccaggccaccgcctcgcctagccgccaccttggcccggctgcctcgcccagccgccgccgtcgcgcccggcccccgcctcgcccaggggagggggaggaggaggggaatctggccggggaggagggtgggaagccgaccggttgaggggttgagaagaggttgagaagagataaggtagagagagagaggtgggagccggttgagaagagataaggtagagagccggttaggtgggagtggttgagggagaataaaagggaaaaaggaggagagagataggaaaaaattgaagtgggtgagagggaaaggagggaggaatatcccgtgcggttgggataggacgtccgcacgggaaaatcgatttttcccatgcggacgacaccccagcgccggttccctatttttccgtgtggttccacttacagaccgcatggaaaaaaaagggggggcgtccaggaaaatcaatcgtgtagtagtgtactaacaaattagataaattatgctataggtcatcgtgactttatggttttagctatagggcaccacgcggagtgactttggggaagatactcttaaaagttagatattcgctggtagacaccgcacccattaaaataataatttttagtttaagagaagagagaaatcacgtgaaaactctgaaatgcccttgggcccatatgtcagatctgtaatctctctatctctatctctttctcatgtgcctctatctctttctcaagcacacgcgcatgagaagaggaagaagaaggggaaaacgaggcctcgtgtgcttgagaaagagatgatatagagagattacaaatctgacatgcgggcccaagagcatttcagaactttcacgcgatttccctctactctttaacgggaaattattattttaataggtgcagtgtccaccggtaaatatccaacttttgagagtgctcccccaaaagtcacttcgcgcgttgtcctatagctaaaaccacaaagtcacgatgtactgtagcaaaatttgccaacaaattaataaggtgatacgatactttgctactggttcttgcttggttgctatgtaccatttttgtgaaaatagtcaacttttaacttccttaaatatatttttgatctgtatatttttgatctggtttatatcttagatggtgtttagtaaggctccaattcctggatttaactcaagagctgagaataaagtggagttatgaagcaacctaaacacaactccacttctttaatttattttgcaagagcacttcaaccaactatacttttattttgggtggagatgaaactgtttggctggactccaactccaaaaaaccagatataacgactattctaacttttaaaaccggtgcaaaccggatataacgacaaggaataagttcactggaggtcccttaatttaacagcgagattttttaaggccccttaaccacaaaaccagaaatcttcacccctaaactatacaaaaccgttcatcggaggtccctcggcagtatttttgcccggttttactaacgtggcatcctagtcagcaatttttttttaaaagtacttgggcccacatgtcagctgcatattctcttttctcttctcttctttggagaggcgggcagatgcgggtgcggcgaccggcggcggtgcgggcgtggcggggcgtgggaaagaagcaggagaagaggagaggaggcgggcccggagcgggcgcggtaggcggcgagcggcgcggagcgagctgcgagttgccactcaggtcgagcttgagtagctgcgtgaggtcgccaatcggccaatggcggatggaaccacgacggagctcaacatcacgtcggcgaacatgttgccgttgaggaatatctcagccaaggtgttgcagttggtcaggttgtccaagaactcccaggcgccgccatcatcggtcggcgtacggctccgacgagatggacgccccgctcctgtgaagcctcccctccctggggcgggggctcctctcatcgtctcccacgcccgcgcggatgctctccgcggcaacgtccgacgccctcgtcaagatcaagccaggcgagataagcatggtctccggcatccccaaggagcacctccgccgcaaagtgcttctttggacttactctgatttatgtagtgtcgatagattcgctagccctcgcagatccgtgtgggaatcgctcgagatgtcttggtttggtgggttcctttggttgttactcgggttagggatagagcctggaggtgtcgagtcgtgaacttgttggaattaatagatgggctaaggctcattcgaagattaattctttggaaaatcacaaaagcccacctcatgggatggcatgcatgtggagtttagtaccaccttgcttattctaggagagggggacctccttaaaagggaggatgccctcctagccacttaaagcatgtgtggtggagagaagaggggaaacacacgcgcgcgctcgctggcctggcctggcagggcaggcggcgcacgtgcacgacgtacgcgtcgaatggtccgcaaaattggctcctcacccttgtgcagatgcagcctccttttgcagttttgttttgctgcgggattcggatttgttttgttttggaaacattccaaaaaatccggtgtgtgaaaacggcatggaatccggataggttacgcgtgacttatccggttcggtttacgcggacgccctgatcaggcgatctatctctatataaaccgagccgctgccttcacgcaacacacgcgaaatcaatctagggtttgcctcctactctgtactgcgccgtcgctcgtagactactccatcccgctcgccggcgtgcaccggcaatcgggagagcaggtctccggaacctctgccttcgatgtcctgcaccgggagaaggtagcaataaggtttttgggaagcgcttcgcgcgactgctccctgttcgttcgcgacggctcgtcttcctcttcgctcgcgtgcttcgcgccttcgtagacgctcgcaactgcgagtagttcctgccgagcaaccggtctttccgccacctcggtatgtgttcaacatgttgcgcatatttgatctgttcaggttttactgcttagtttacatgtgtagatctaatgatgcgttcaatctagtttacatctgcaatgtcatgatttatttatggaataaattaaatcattatgtgcttataatttcaacaatccaaaaaccttattataggcgctgtgattttactatggctggttttgccgatgcactgaggccggataaattcaccggtgtgcactttaagagatggtagatcagggtcactctgtggctgacggctatgaaatgcttctgggtgagtattggcaaacctgaaggaattcttactgctgatcagcagaagcaattcgaggaagccactctttgtgggatgcattcttagcgttcttgacgatcgtctggtcgaggtgtatatgcatatgaccgacgctaaggagttgtgggatgcactgaatactaaattcggtgctactgatgctagcaatgatctgtatatcatggagcagtttcatgactacaagatggctgacaaccgttctgtagttgaacaggctcatgagatacaaaccatggctaaggaacttgaactccttaagtgtgtcttacccgacaaatttgtggctgggtgcattattgcgaaactacctccatcatggagaagtttcggtactgcactcaaacacaagagataggaatactccgttgaggggttgatagcgtctcttgatgttgaggagaaagctcgggaaaaagacgccgcgtctaagggcgatggtgggcagtctagtgccaatgttgtgcataaggcccagaacaagagcaaggggaaatacaaagctcaacagaccaccaacttcaagaagcagaagaagaacaacaatcctaaccaggatgagaggacttgctttgtgtgtgggcaacctggtcatctggctaggaagtgtccacagtgcaaggggatgaaggcacctgcagggcagacttctaagtctgctaatgtgaccattggcaacactggagatgggagcgggtatggtaatttacctactgttttttcagttaatcagtctactaattggtgggttgatactggggccaatgtacatgtttgtgctgacatctcattgttttcttcttattaggtcgcacggggttccaccgtcctaatggggaatgggtcacatgcttctgttcatggtgttggcacggtagatctgaagtttacttcgggaaagatcgtgcagctgaagaacgtgcagcatgtcccttctatcgacaggaatcttgttagtggctcccgtctaactagagacaaatttaagttggtttttgagtctaataaagtagtcgtgtctaaacatggatattttaatggtaaaggttatgagtgtggaggcctgttccgcttttccctttctgatttctgcaataagtctgtgaaccatatttgtggcagtgtggatgatgaggctaatgtttggcactcacgtttatgtcatattaattttggcttgatgtctcggctttccagcatgtgtttaattcctaagttttccattgtcaaaggttctaagtgccataggtgtgtgcaatcgaagcaacctcgcaagcctcacaaggctgccgaggagagaaacttggcaccaatagaactcctacattcagatctttgtgaaatgaatggggtgttgacgaagggtgaaaaacgatatttcatgacgttgattgatgatgctactagattttgctatgtgtacttgttgaaaacgaaagacgaggctctagactattttaaaatttataaggcagaagttgaaaatcaacttgacagaaagataaaaaggcttaggtctgatcgtggtggagagtttttctcgaatgagtttgacttattttgtgaggaacatggcatcatacatgagaggacgcctccctattctcccgagtctaatgggattgctgaaaagaagaaccgcacactgactgacttggtgaatgccatgttggacaccgcgggactacctaaggcatggtggagggaggcattgttgacctcaaatcatgtgttaaacagagttcctaacagaaataaggacaaaacaccatatgagatatggattgggagaaaaccatcactttcttatttgcgtacatgggggtgcttggcgaaagtcaatgtactaataacgaagaagtgcaaacttggacctaagattgtggactgtgtctttctgggatatgctcatcatagcattgcctatagatttttaatagttaaatccgaggtaccggacatgcatgttggtacaattatggagtctcgtgatgctaccttctttgagagctttttcccaatgaaggatacacatagtggttcgaggcaaccctctgaaataattcccagttcaatcacaccaccagaacaaactgaacatacacatgaacatgtctctgaggaggatgtcagtgaagctcctcgaaggagtaagagacaaaggacggctaagtcatttggtgatgatttcactgtgtacctcgtggatgacactcctaagtcaatttcagaagcatatgcatctcctgatgcagactactcgaaggaggctgtccatagtgaaatggattccattatcgctaacgggacttgggaggtgacagagcgaccctataggtgtaaacctgtggggtgcaagtgggtgttcaagaagaagcttaggcttgacggtactattgaaaagtataaggctcggcttgttgctaagggctatactcaaaaagaaggcgaagatttctttgacacttactcacctgttgctagattgaccacaattcgtgtgctactttccctagcagcctcacatggtcttctcgttcatcaaatggacttctcgttcatcaaatggacgttaagacagcttttcttaatggagagctggatgaggagatctatatggatcaatctgatgggtttgtagttgaaggtcaagaaggcaaagtgtgcaaattgttgaagtctttgtatggtctgaaacaagctcctaagcaatggcatgagaaatttgacaaaacattgacatctgcaggctttgcagtcaatgaggcagataaatgtgtgtactatcgccatggtgggggtgagggagttattttgtgcttgtatgttgacgacatactgatatttggaacaaaccttgaggtgataaatgaggttaaatcattcttgtctcaaaattttgatatgaaggatttgggagtagctgatgttatcttaaacattaagctaattagaggtgagaatgggattacactcttgcagtctccggaacctctgccttcgacgtcctgcaccgggagaaggcggcaataaggtttttgggaagcgcttcgcgcgactgctccctgttcgttcgcgacggctcgccttcctcttcgctcgcatgcttcgcgccttcgtcgacgctcgcaaccgcgagtagttcctgccgagcaaccggtctttccgtcacctcggtacgtgttcaacatattgcgcatatttgatctgttcatgttttactgcttaatttacatgtgtagatctaatgatgcgttcaatctagtttacatctgcaatgtcatgatttatttatagaataaattaaattattatgtgcttataatttcaacagaactcgtggtacagactaaagtgctatcgctagttgacgttcgaatcgtggagtagatagaaatgcgaattcggtgatgaagttttacacttgtatggtttgaactgcgtttagaacttgggaggaatgtgctggtccacgtgcgcccacgtcgatcggctgggagctccccacagaacacgttgttcgcgagtgcgagaccttgcaacgacgtcatgttgaagaaactcggcgggatctctccggtgaggctgttctgcgacaaggctaacatgcggagcgccgggaggtgtgacaagccgtcggggatggaacttcccagaaggttctggtcgaactcgagctgcacgatcttcgtgaggttcgccagcgatggcgggaagtggccggagagcgagttgtggctgagctggagcaccgtgagattcggcaacgcgtcaagccaccgtggaatgccgccgacgatcgaggttgttgtttttgaggtacgcgacgtcgagggcggtgcaattgtggagcgcgtcaggtatctcgccggcgaacgcgttgtcgcataggctgagtgtaacgcctcgattttcgttcgggtttaaaaaatcatttaataatgcattttctagaaattaaataaaagttaaaccaatttaatcaagtggaattatggagggaattaaaatttcctttaaaaatcattggccgggaatattctgtaatattctttgtgccctaatgtactctctagaattttccgtgagttttcggagctcaagaaataattttaaaagcaccaagttcattttaaccaactaaataaaaagaaaaacaattaaaatcccccttcctctctttgggccattttcggcccaactcttccttctctcccgcggcccgcgcgccccttttctctccctctcgggccggcctcctccctcggcccgctcggctctctctccctgaagtctgctttacctccctcacccgttttcccatctctctctccccaacaggtgggacccgaggccccacctgtcatcttcttccccaacctcccgtcgccccaactgccgccatggccgccggtttcaccccacgacgccgcggctcccgcgctccaccccgccccacgagcgcgtgaaatcgatcccctccacctcctccacctttccccccactctccccgcgaaaatcggcgccggttaacccctccaccactccacgtcggcgccccacttcgccggccgattccgccacgtccggcctcgatcccgccttcctgagcccacaaaaagcacccccgtgctcccctcgtccatttccccttgtttcccgggcccggcactctctccctcgctctccccacgccgctcccgcgcgccgccacactccggcgaactccggccgccgtttcccgtcgctagggtcgccgccgcactgctccgccgccagcgctggctttgccacctcaagggcacgctcagccgccgtttcttcctccccttccaccacgcgaaccacctctccaccgtgctccctctctccatcggtccccggcgtgctccggccacctctagccgccgccctagccactgccgcgccgcgccgtttgcgccgccggcttctccgtgcctcgccgcaccccggcctccgctccgtttccctatttaatcgccgcaaccacccttccacagtgcatcccaagccacctccaccctacgccgccgggccgccgttccgccttcgtcccgaggagcgccgacgccgagctcccccgcttttccccgcccctcgtcgtcgcgtccttggtgagctcctcctctccctccttgcctccctcctctgtctcccgtgcgtgctgccgcgccggtggccgccgccggcgaccaccgggccgtgcgtcgccgccgttaggtcggccggccggcttgtcgccgccccgctcgcctaggccgcccggatccccttgccgcgccgcgccgccgctttcccgcgtgcgtcggccgtcgccgcaggaggccgcgccgccgtgagccgttgctcggccgggccggcctaagctgtgcccgtgctcagccgcgccaccccgtggccgcccgatcagctcgggctgatctgggccgtcggttcccgtggaccggcagtggaccaccccgtggtcccagttcacggtggaccactcccttgcccgctgtcatgtggggcccgcttgtcggcgccgctgccctttgatgacgccagcaggagccttttcctttgataaaataattaacaattgcacaataattcgttaataattctagaaattcatttaaatggctcaaaacttctaaaattcatatctaattcattcaaactccgaattgagccattcaacttgcaaaattcatctaaaattgagctctacatgtttgtttactttttatgtactgtttccttggtttttattagagtttttcctcgttttgcgtgcctgcgtgtagaatccgtcatttcggaagatcacggtcgcaaggataagagttcggaagattgtttgaagaagcaaggcaagtcacacattccccttgagcatgttgattccaatttataaatgttttactgtttgcaaataaatatgcatattttgctaattacatggggtcagggttttacctatctgctcgcttgtgccatatttacttgatatatgtcctttgtcaacattgggtaataaatcgactagctcatgttacttatgtgacctagctagaactatatgcttagccatgcttaattaccactagctcagttgatgggataattaccgtattagaccttttagtatcagaatgagctgcgtgctcgagacatctggccatgcttcatggtcgtaattatccaactaaaatgcgactgaatggtgggctgtgggtgcatggttttgctggtcgcacccatggcagttaaggacggctgggcaacggctgggcttgtagtgtagctttcctctagtcgacgcatccaggcaagggtgggcgtgatggagcggggcgggccctgcgacggcctctgtcgcttccggattcacctaggcacgagaggggactgcccgttgcccgatggggatgggggtgaaacctgaggtgtggtgtgcttggctagagtgggttatgcgaagggtcctgtcacggcctctttccggtatgtcgtggtggcatgtcggcgcacggaaacgtgtcgtggggctgtgtcatgtgggtacagttgtacacctctgatcagagtaaagttattcgaatagccgtgcccgcggttatgggcggtcgaccagattcaccgtgattagtcccatcttaataaatcgacccaatacactgtagttcaggtgggttggttgggcctgttcaacgtggtgtagcgttgatcagtggagatttaatgttactttaattactcaacagttttactgttttgctcaataaaatgttttacaaccgcctttatgcaaatagccacaaaccatccttgtatccccttgcacatctgcatcgttagtgtggcttgctgagtacggtggttatactcagtcttgcttttattctcccttttcagaagtgttgtgtttctgagctgaagatggagttagaggaccaagtctcagaccccagttgagttttgcctgtggagtggagctgaagccccgctaggatcgcctttttccgctgctgtcgttctgtttcggtgtgaggactaagtgcctcttccgtaagtattttacgctttatttacatttagaactgtatattacttgtcgttttgtgtaccctggctggtcctggacagggatttaatacgaaaaatagtctgaaaatttgggttaaatttctgggcgtgacactgagataccacatccgccggagccagccgaggccatcggcgatgctcccggagaaggcgttggaggtgaggttgatgagtagctcgagctacgtgaggttggcgacggccggtgagagctcaccggcgaggcggctcatggacacgtccagcgacgtgacacgccccgctgcccacttctctgcccgcggccgcgctcgcgcccgcctccactccgctgccgcgctcgccctccactgctccgcctgccgccgcctccctcgctgaagaaaaggagagaggagagaaaagagaagagaagaaaaagaaaaagagaagaaaaaaatgtacagctgacatgtaggctccacatactttttaaaaatttatttgctgactaggatgccacgtcagcgaaaccacccatatatactgcttagggaccttgagtgaacggttttgtatagtttaggggtggagatttctggttttgtggttaagggacctcaaaaatctcgctgttaagtggagggacctccggtgaacttattcctcacgacaatgatagtactgagagtgatatttgctaggtccaaaggccagaagcagcgtagctagctatagtacttggtagcttgggcccatgtatgtaacttgggcctggacttctttcgtcccgagccttctaatccagcccaagagtaaatgacagtaagcaacggcagcaaaaagtacactacctgagtaaacggataaggaaaacaatgtacctgcacgcctccgcgattccggcggccggcgcgtagctgttgtgcgcgccggaggcggcggcggcgacgacggcgcccgtggccgccggcgccgcgcggaagcacgcgaacgcggcggggtcgccgtgtccgagcggcgccacggaccgcgcgtcgcccctgtcgaggcaggcgtacacccggtacaccagcgcgcggatgctctgcgacctcgccgcctccatcgccgggttcgccgccccgaaccgccacgccgccgccgacgcgtcgccgccgccgttctccatgagcacacctacagcgagcgatgcgtgctgcttgtgagagtagtgcgagtgtttggctaaggaatgggaggtgtggcagcgaccaaagccgtgtgcaatgcggacagggagccgtgtcgctacagcttgatggatgatttgatttgatcgcgtcgcatcagcgtgcggtgacagtgagtattcttggaagtatctgctttgttatgttatgacaatgatctgtaccaaattcaacagtcaagattagtaatcgtgctgctcctacaatacctaggacgcaccaacgatttttctctttctcgtaccgtgaaaagaacactgtcgggtacagaaagtactgtcacagacgctacttcatctctttcatataaaatctgacacatcataatactataaattataagtgcaagtaggtcacctgtgaacccacttatagcttaaaataagcgagttcacgtgttagtttagcctataagtgagttttcacagatagccgcttgcacccttactatgaatctagacatatctttggccctgtttagttccatgggctaatgtttagccctcacctttagcctcaaattagccctcaaggatccaaacaagtaggctaattttgagctaatgtgaattagccccttcaagaggtgctaagagcatatccaacagcctctctatcccactctcagccaaattctagccattctagccaaaaagggtactccaacagcctctccaaccggatggctaagccatccggctggccaaaaccctctctccactagccaaatttagccactctatttggctggccaatggtgggtcccacacagccaaactcttccatagctccatccccacacgggcaaccagggagaggcacgggaggagcacgaacagaggacgagcacggcgaccgccggccttcgatcgccaccgcatggcccgccagccgcctccgctcgccgtctccgcgcggcggcgccacccgccgcctccgctcgacgcggccgccggtctccgcgcggttccggtgccgcccgccgccccgcgcggcgccgcgcgccgcctcggctcgccgcggccgccggcctccgcgcggcgccgccgcccgccgcctccgccctccgtggcctccggcctccgcgcggcgccgccgcccgccacctctgcgtgccgcggcggccggcctccgcgcggctccgtgcagcaccatgcccgccgcctccgcccgctgcggccgccggcctccgcacgacgctgcccgccgcggcccctgaggctcggcgtcgtcgcccctgaggctcggcgccgtcgccgctcgttgttctccgccggagaggatgcagtacagctggagggaggaagtagtactagagaatgggttggaagaggaggaagaatagtaatagagactgacatgtgggtcccatttgtaatagacttgtaatagagagggtagatggagaggctgttgaagtgaacaactagtttgactagccaaatcagatagagagttggctatgcgggtgtttggagagttcgatttggagaggctgttggagatgctctaatggggctaattttgtgtggggaccattaaaaagcagccctctctcaccttctctctcctctctctccatcttttagccttaaattagcccatggatccaaacatgccattctaggctaatgtttagcctactaattcatgactaaacattagctcttaaaattagccctgggctaatcttccaaacatggcctttgtctagattcatgatactagtgtcacagttagtacagttagtactagttttgttttctctaagacgtaggaagtacaaaaagtgcaaagcacttctagggacaagattcagaggggtagaatatcgcctataaggcatcaccacttatctctatcaactcacaaataaacgctcattggctcattgctatagtacctatagggcctatttggggagtttaaaattctgagaaacaggtggttggtagccagcttttaagaatctgaaaaagctgggttttcgagcttatggcttctagttcattttctgtactctacaactgcagcagctagaagctcccctaaacatgcccataatgcaggtagtaagattttatgaagtgctacggatgtccaaaagtataataaggagttttagaattgaacacgtatgagtattaagaaaattggtggaattaaataggagaagattgtgattggttgagaagagcaggtaggtaaggaatttgaatagcttaatgttgtgattggttgataagagaatgtagatggagaggttgttatatttgtttgaatatgtgccgaatatactagtcctatttagttacagttggacttgaagttgtaataggtggtagggggtggagttagagtcggactctgtaacccaaatctctcttaaatggagggggggcaccataatctaaccatggcgactacaatgtagcgtagacacgtagggagatgatgacggcgaggccatggactcgtagcagctaggagctatgttggttgggaggagcggccataatcagagccccggggatgtaggcttcggctgaacctcgttaacaaatatcgtgtgttcttatgtcgtcatctggatgccttgggtgatcatatgactgaaacgatcgggatggttagtcgttgttccgctatatcgactaacttttataacaatagtttggaacaaatattaagactaaaaattattatattttagaacaggggagtaaaagacactcctacgttagggaatgtgaaatagcacggtcggttgttggctacaagcttatgtgcactgtaaattggcggcccgggtactaaatccataacgaaaagatatcgtcaaacaaaggagtaaattttaatttgtattgtgtatatagactaacgttacgtacaaatagacctaggctttaggctgtgttgttttgaggttaggaacacgtaaaatggagcgatgaattggagcataattaattaaggattagttaaagaatttaaaataaattaatacgatatttaaaatcaactttttatataacttttttttaaaaaaatataatttagcagttaaaaagtatgcacgtgaaatataaggaagtaaaagttaggagtatgtagtataaaacgcaccattaagccacttttcaacttaatgtcacgtattttataattttagaagtatccactcctgtttatgcatcttctatccatccatattagaagaattatccataagtacaatgtactcgttaaaataaaatagtgcatgactaatgactactggggttatatagtagtagtagaacacaatatatgtatagatggttgaccgaggaagcttaccaaccgtcaatgattataatttgttcaaacttagaatgggctatgggcatttgaggtggcttgacaatgttttctttacgaagtataaaaatgaaatcttcactgaacatgtgtttacattgtcgtcgtgggctatgggcatttgaggtggctttaatgatcatcgaacacttatcaaagacaacagtaacaagctcgttctagctagatcattggaggaggatgtgaaatctacaaaacaacatgagaatgttaaaacatagtaaaatgtattaaaatggattaaaccctaaaatttagggctctatatggtcgaacacatcacacctgcccatgtatatgttccatgcatgtcatctaaaagtggtgtaattgttactccctctatccataaaatttcaaaccctagcttcccaaggtaaaattaaggaggaagacaaacgaccaaactatccctaattaataaaaaagttgtattgatgggtatgtgaggggtatttaaaagataaaatttttcttgatttgcgaaccgatggtaggttagtactccctccgtcccaaaaaagataaaccctgggtttccgtgtccaacgtttgactgtctgttttatatgaaatttttttataatcagtatttttattgatgttatgtgataaaacatgattaatactttatgtatgacttatctttttaatttttttcataattttttcaaataagatggacggtcaaaagttggacacggaaacccagggtttgtctttttttgggacggagggagtagatagaagttggtttattttggaatataataatttaaacctataatttgatttacagaaaacttagacaacggtatcctgttggaacaggatacccttctatgagacattacttgatacctgatacctgttgtggtatcagttgcatggtactcgatacttgtgatacctgttacccagtacctgtgatacctaggacctgatacctgtgatactcgtgcaagagaatagttaatatatctatcccgttgcaacgtgatcccgttttgtagcagccctcttttatttattttgaaacagagggagtagagtataaacagacactcaatgggaaggtgaacccatgatttgcacgtaagggctcatttgaatcgtaggattgagaaaacgtaggaataggaaaacgtaggattttaatcgtagtgtaaaacagaggattacaaaacgcaggacaaaacacaggaatgaccgttcgattgaaccgcagtaattggattggatgagagatatagactcaaaagaaagttaccaagaggttgaagctcttgctaaattttctccaaaatccctataggattgttcattccatagaaatttcaaaggattagatatgattcaatcttttgtttcaaagggcttcataggaaattttcctataggattgaaatactaaaaaattcccatgtttttcctccaaattaaaggggccctaaacaagatcaagagctttattactccacctgtggctccgtcccaaattatagggcgccccctttttaaggaaaatcaaatttggtatcttttgactaataaccatactacctatatatatactaagtataatgcatgttatatcattatattcatattttgaagtaatttcatgtgatgctaattttatatttgttgggattatagaatgaaataaaatactggtcaaaatatattatatattattgaagaccacataaaaatatagcgcttataatttggaatagacagtattttttaacatcacatctagccactgttgccatcgcctcaacaccctagcacgcttcccctggcttaggccaggcctgccacaccggacacttccccctcccctctcctcttcctcctcaagcttgttgccatgttgttttcccaatctctaataacttccgtagcgctggagacaccatcatcaccgacaccgacaccatcatcacctttgacccctctcatttcccttgccttcgcctccgacaccggactaacatggtcctccatctccgtggcttcagctacagcgctgccatttcacaatcaacccattcatgtttaccacttaccactaattatgtccatctctttgaagcttagaaggtgtttggatcctttagttgtaggactaaaattagtcctaggactaaatccatacctgtttgaatgtagagactaaaaaaactaaaggtcaataattgcactatataaagaccatgttaacccctaacaccatgtaaagagaggattgtgcatggggcagtgagtagaaagaagcaactttaatccctataagctcctttcatagggactaatggactaatgcacttttaatcccttttagtcatccatgtttaagactttagggactaaaggggattaaagtgaaggggctaaagttttagtccctccaaccaaacaggctcttagggaaaccaaagtcccatcgaatatcatcgtttaccaacttaaaaaaaaagcattagagcaagtttaagattgagttcaatggtgccttttcccaagctcaccttacttgtttttcgcgcgtatgcttccaaaatattaaatggtgcattttttttattttttaagttgctttaaaacaatcttagagcatctacaacaacatggctatttttgcctctccaaatatcctatttagcaaattgccaaaaaattagagagccaaaattgagtttcactccaacggtctctccagttcaatctccaatttaacggtgggtcccatatgtcagtcacactttttctttgtgatctttttcatccacttctttctcgtcttctcctcttttctctgcattgcaatggcgcggggggtggagacgatggacgccggcggtagcagtgcgagtggcggaggccgaccggaacggtggggcggtggagacagtctctctcttcccttcttttattttctttcctcttctcattttcttcccctcctctcactcttgattcccctttctccttctctcctaccgactccgggagggagccggcgctaggcggcgatgggcgcggcgatggcggctggatcagggcggcggtcagcgcggcgacggtggagggcggtgaggtggaggaggcacagagcgagggggcgccggaaggagttgatgtgggccgacggttggcggaggcggccatggcacgacgacggcgacggcgtggtggcgacccggccggacggggacagagtgaggaggcagcttccggggcctgcgattggtgctagggagggaggcggcctcgtgggcggcgctcggcctggtgcggcggcggcccggagtaggatgaagtcggcgtcgacgacagcttcggtggccttcggccaagggaaggcggaggcggtgggtggcgaagaccggagagagcggagcggcggaccggaggaccggcggtgccgctgtgagtgatgacgactgacggtgcggcggcaccaccagatcccccgaggccgatgcaaaaggagaaggggatgtggcggcggcggtggaggagatggcggtggacgacggaagggacggcggcaggcggcaacagggatggcgccggcgccagtggcgcgctcgcgagtgtagagagagaatataagaggagatggggaaaaatgcgtggggcccacgatttggaaaggcaactctggctagccaaagttggccagcgtagggaggagtttagccagtcagatggcttggccagccgtttagcaagtctgttggagccccttttttttcctcaaaattgccaaaatttaacttggagagtgagattgccactatgttggagatgctcttaccaatccatttttaaagcttttaagctaatacttaattaatcatgtgccaatgagctagttcgttttccgtgtcagaggggaccttcgcaatcgaacacaacctaataatatagccaactacaaactaaaaaaaatgacacatatactgtcatctaataacctacttatacagaaatatatactacattattaatatctagcccacctcttatacatacaaatacttcctccatccaaatacttcctccatcccacagtaggtattttgaccggatgagatatatctgtaatatgaatgtacacaacccataccagaatatatcttattcgatcaaaatcctttatattttgggataaaatgagtatataatgtattggagctcgtggcagcccttttttcctctctaataacatactctcagttccaaaataaagtacggacatgacatatcttagtaatacgatttggacaaccattcacatacatataggatataggatatatataggatgtggtatatcctagtactgtacatgaatatgagcggtatatttagattgatagtatataatatatcacatttcatacttccttcgtcccaatatataggaatctagtatcggatttgacatattataggattatgaatctggacagtttcatgtccagattcgtagttttaggatatatcaaatccgattctaaattgctactccctccgtcccataatataagggattttgactttttacttgcactgtttgaccattcatattattaaaaaaaatttggaattattatttattttatttgtgacttactttattatccaaattattttaagtacaaattttcgttttttatatttacgcaaattttggaacaagacgagtggtcaaatagtgtaagcaaaaaatcaaaatcctttatattataggacggagggagtatatattacgacggaggagtattagatttattcggcagtacaggatgagaactaatccctcctgcaagcaaaatagagcggtctattagcacatgattaattaaatattagtatttattttttttaaaaagaatcaatataattttttacagcaactttcatatagaaattattttgaaaaacactagtttaaaaaacgtgcgcgtgaaaagtaagcgccaaactcagcctattgcagtcggaagaggtaaagtcgtcactgatgtacgggccccacttccgttcattgcaagtcgctcccagcgcacgaccgtcctgtcgtctcctaccctcgttccggtcaggggaatccccattctctgcacaggctcccgaccacgaaaagatcgctgaccccgaccttgacccgcgccgtcgcgtcgccttcggaatccaagaacgatgctcgccgccgtcccggatcgacctccattgatccgcaaacgccgcgtccgccccccgccctccaagctcgagcctcgcagccatcgacctcgatccgcttcgcgctctgtcggaggcgcatcttggttcttccatggcgaccccccatcggccatacatggcggcaagctagctcccgtctcaatccgtagctttcccctccttgagcctggactactcctttgattcttttgttcttttttgcttcactagctaattgtctgattgtacttctcttcttgcacaggcgtggatttgcagatgtcgcggttcacagggcaattctgctggttatcctacaagtaatcatctactcttctcttcttgatgatttctgcaataaacaatagtctgattctagaagacagacagagctatcctgttgccgtcgagacttttaactctgattattgacttgcggttctcttcacctcttgtttactttgctggattaaattactaggttactctatatgtttgagaaaattgcgtggatgacacgtggaagctgagtgtgatccactgggactgaccacttcatttgttgataaactaaccccttgatagtaatggcattgactaataatacactagtttactctgacttgtagttttctttcttgtttaaggtttgctggctagcaaggataaggttgagcggaacagaatatggtgttctactatgccctctacgtgtttgagaaaatgacagtatgatgaatgcaagtgtgaacaatccaaataacccactgatcccttgaaaaccaggaccatgaaaggagtaaattaagccaacgggtggatagtccattgataaaccgcctgcccaaggtaagtctgtcagacatggtgtcttcactgacattgtcacacaggccagctaggaggaagagttccagctcccttccagttccaggacgttgttccaggtatccatcatgtgcttcttgatctcataccaaactatttggatgcttcacgctgttcaggtcatcatgctgctaagtttctcttgttgaattgatcgattccggccattgcttaccaggaaaggggcatgccagcatggggctgctattagtttctatttgttttgcatggtgtgtggtgtttgtttagtcgatggggatgtgtagatatcatttatcaaaaagaaggctaactgtgttgttctacttgacagcactgttgaattacacctgagtgtaaagaagatcgacaaagatggcagttgtagcaggggcgatgactgccctcattgccaagttgactaccctgctgatggaccaatacaagctgcagaacagtgcgaggggcgacatcatatttattaaagccgagcttgagagcattcaggctgcccttgagaagttgtttgaggtgcaggtaactgatcgccaggttaagatttgggagagggatgtgagagagcagtcgtacgacatggaggatatcatcgacaatttcatggttcatgtcgaaacccatttgctagccaagccacatgaactcaaaggattcatgaagggaagtttgagcttgttgagaagagcaatggttcgctatcgtgttgctaccgacatcaaacgtatcaggaggcttgtcaatgagacgagtgcacgccgtgataggtataaggttggtactattgttgctgctgccaagactgagaccgcaattgatccccgtttaattggtatctatggagaggctactaaacttattggcataagtggacctaaggaagaattgaccaagctgctgatggattccaagggcaactcaaagaataaactgaaagtgatctccatcgttggagttggtggtttaggcaagacaactcttgctaatgtcatttatcaacagcttagaggacaattcgagtgtcatgcttttgtttcagtatccttaaagcctgatctaaagaaggtcctgagcagcatactccgtcaattcagtgaacaaggttatgcttggacagaaacatggtgtgctcaggaaatcatcaacaaaatcagagatgaaattaaggaaaagaggtataactaaccaaatacatgcttaagatcattgggaacatatcctgtgtacacaagccatcacgtgtacacactgtacaccaactaacaaatgtcaccaaaaaatctagaaaatttcatacatgtactttcaatagtattacacctacaagtacaaattcattatattttagccgtaaccaaaaaaatgtgacagttttaaggttataattctgtcagaattttgtttcttgttgttgctctctgtagaatgaatttgaagatgggactttacacgtaaatgtaatactattaaaagtacacatatgaattttcttagatttttctggtgatatttgttagttgttatgtacatgtgagtgcttgtgtacataagatatgctcccaggatcatcccatgctatgtgtaagcattttagcttgaagtacagctagaatttggagctagtagggatagtaaaatacatgcacagactgctaggtgaattaacaatgaaattaatccttttatctaataaaccaagttcaatgggctggcaaagtaatattctagcttagggtgctaggtgtgataacaacgggaagttcaaggggctatgaaagagaaatgtgaattcagggtgttcgataagacaggcaaaagcttagaggtctaaaatacagttcttttctttcggaaaactaaaaccaagatagcaaaattactagtttgatcaatttggattcaggcaacttctattctttgaacttctcacaaaactgcaaccctgtcatatcctaggaaatttttgcatgttggtccaaatattattgactctactctgtttgataccattaggctgctaatgggccgcgtcagcatcaaattggctgcaaatttttatttatttatttagaagtcattccctatcttcgaaaaagcaaatacatgctacataagttcaggaagtagtagccagacctaaaggttaggtaaataaaatgttcacatctaacatgattgaaactgagttcatgaaaccctatacttgtgggactgaactcatgagactgaacatgtagggaaactatagcttctggagatcctgtctttcctctccctcaccttctgtccaatgccagtactcgtggttctcagagcagagccttttgtgctgttgaatacttcatctgttacttgcctttgaaaggatccaattaattggttttcagtttcaatttaactcatgtcttgtgctaatgttatcacaaaaccacaggtacttgattgtaattgatgatatatgggagaaatcagcatgggaatgcatcgagtgtgctttaatagaaaatgaccgtggaagcagaataatcacaacaagcagagtgcttgatgctgccacgccatgctcttctgaggttgatcataccgtttacaagctgcagccactttctagtgataactcaaagaaattgttctacaaaaggatattctactgtgaagatggttgtccattggaactgaaggatatatctgaaaaaactttaagaaagtgtgagggagtcccgttagccataatcaccataggcagtttattggccatgagaccacaaaatttataccaatgggatagggtacacaatttaattggttctggacttgagaaaagccatcatgtggagaatatgcggcacatattgtctattagttattatgatttgccagcccatttaagagcttgcttcctatatctaagtatatatccagaggattacaatatacagaaagatcaactgatacgcagatggatttctgaagggtttatacttggagaagatatggatactttgcatgaaggaggtaaatacttcaatgagctaataaatagaagcatgattcaaccagcatacatcgacagtcatggaagggtgcatgcttgtcgtgttcatgatatggtgcttgatcttatcacatcattgtcaaatgaaacaaattttgtgacatcattaggtggtcagcagcccacatatcatccaaacagggctcgccggttatgccttcaaaacagcatatatgaccatacgatacgacaggagaaaatgaagtggccccgcgtgaggtcactaatcgtattccctcatgctaccaacttgttgccatccctttcgagattccgtattttgcgcgtactggatttagaaggttgtcaagacttgaagaatcaccaaattgagggtatcagtgatttgtttcatttgaggtctctagtactgaaggatacaaatattggtagtctccccaaaaagattggcaacctaagttgtttacatacactggacataaggcacactatcataactgaacttccatcaacagtcgttcatctaagaagactggtgcgcctactaattgatgcatcggtgaagttacctgatggaattgggaaaatggaatgcttacaggaaatatcactggttggtattagcaagtctccaaactttttgaaggagctagggagtttgacagaactaagaatactccagatttcagagagtactggtgcgtggcatgatagttatgagaatactttgattgattctttgtgcaacctgcacaaaatctgtgacctgtacatccatggctgtaaactgtccacagagttcatatcaaatataagatgctctccgcgatatctccgatatctttcatgtggccaattatccatattgccaaggtggatcaattcatccttattgtccctctccaccatagatttgatacttaatgtactccgacaggatgatcttcgtagtcttggtgccttacaatctctatgttgtctccgtcttaatgtgttcaaaattgaaccagaaaggttggttgttggcactgagcatgcaaagttccactggctagctgagttttcgtttaccactaatgccatggggcttatatttagccaatattctatgccaaggcttgaaaaccttgagctagcttttaatgttcgagagacaaagtattttgatattggcttggagcacctgtcctctcttaaggatgtcactgcaagaattgattgcagggattccagtatttttgaggtgcaaaatgcagatgctgccattcggaggattgcatatatgaactccaaccaacctaaggttcatgtgatcaggcattatgaacacatgttaatggatgaggtgaagatccagaaggaaacggaggaggaaaaggaggtactttctaaatgactaattaatggaaggcgtagtaacttgtaatacatgaagtttacatataaatttctgaatcatagggtcactttttaaattcatcgaaacaaaactgcaaaactttgtttttcttttttcttttttattatatctttatgtcttctttgcagatattggaaaataggattggtccatggggtggaaatggtggggtcacttgtgacatcaaggttgcacccaaacgcttggaaagcattactatttgtagcggcataatcatcgatgcacttgcattttcttacttggacaaagatggagagcgacacacgactagtttatggggtggtcttggtggtagtgttcaactggtgagttgatcattattattttttattttctttgcaaaacaaatatggcatttatttctttcttcctggatcgaatccagtaaaatgagcaacacaaatacaactcaattacattgcaagaattcagaggtaatggaccttaatttcctcgcagattgatcttgatgaaagagagtttcttatggaggttattggaactgtgggtccattcaatgtgttatctgaggctataacatcacttacacttgtgaccaatgtacgtagctatgggccttttggacaaccacagggtactcctttccgtactccacggaagaaaaacagttgtatcgtgggattctttgggcgttcaggaacatatcttgatgcagttggggtctattttcaccctatgtagatctcagcaaagcgcgaaatcctttaaccaaacttgtagtttatattcacattgtgtcgaatattttcttttgtttctttacatttcctgatattatggtcggactactcgtatttcaattcttgtgatctgttttcctttcacctgtttttttttctcagttgttcaaataacatcaaaagttgttttagcttcatatgtagtgcgctgcagtaaaatgatcacgtcattatggacagtgactcctgttttttttcttagttgttcaaataacatcaaaagttgttttagcttcatatgtagtgcgctgcagtaaaatgatcacgtcattatggacagtgactcctgtttttttttcttagttgttcaaataacatcaaaagttgttttagcttcatgtgtagtgcgctgcagtaaaatgatcacgtcagtatggacagtgactcctgtttttttttcttagttgttcaaataacatcaaaagttgttttagcttcatatgtagtgcgctgcagtaaaatgatcacgtcattatggacagtgactcctgctggaattctcaatatggttcaccatgtggaggtgtggttaggagtgtaaagaaaaaactcgggctcgtgaactcagctagaaagccaaacaagctgagccaagcatcctttttagctcttcgttgaaatgagctgtgcccgagctagcttgcgagccaattgtttggctcgtgaccctaggtcattatgtacttatatggattattttttagtggagttattatttgtcaacttgtaatttattatctagattttaaagaattgaatatatgaattagttttaagtacatgttgttgatttattctttgcttttcttaatgattacaaattatatatgaagagacgagccaaaccaagcctattatgttgtgagcctttgcaagcttggctcggctcatttccacccctaggcgtggtcaagaaagaggattttttgttttgattggtaccaatcaacaacatgatgtctatacaaagattagcttgaaaccgaaattccagcttatctctatcttaagatataaatgcacatctgcgaattgaacgaaccattttccgagcacaagtcatgtaagcttaacttttgttacagtagattgatgtaatatgtatttgaacaatccaacaaaataagaacaagtccaacaagttccacttagactaccagtagtccaaatgaaaactgaccatatcagtttgactccgcttgtactgttggtttgactgcaacatcctctgtactagaactatttgcagcaaggcttgcagttctccccaacgcccataagaatcatgaattagtttagggttttcggaagtggcttaccgtgcgagagatcgtcacctcatgcataggggcatttctcttcttttatatggcgccgtgggctgaaaatctccttcgtcgacattgccttgtgattggatatgtagtctatgtagcagtgccttcgaagatgctacactacttgctaaagactgcattttcacaaacatagtctgaaaccttgtttctagctagttaggctacaaccaatcccctggcagctgctcagcaattctatttcagattggtgggagtctttaacctccacactacaaggaaaagaaagaaacaaaatgatcggtgcccttctgactacatggtgtcagtggcggatctagaaatatttgtgagcccgggcaaatctaattaacaacgccaacggatatataataaatcccatataacttactatgtaccatacaacattttttttatcgtattgtaatttagaagaaaacgatggttgtgtttttgtaggctatgggacttagtaatttattatcttgaaaagcaaaaaaaaatataatgggtgctagaaaatttactttgccttcaggttgcatacgtctaatagcttgcactcaagtaatgggtaaaacgatctactagtaaacaatcatggtgcttttggttactctagatgattgtgtatgtaacatctattaacagattattataacatacttatattgcttcatgctggctgctgcatgctgtggctaagcaccgtgagttagaactaatctaatgatgcatgcgacgctggagcccgggcaattgcccgggcttgccgggccctagctccgccgctgcatggtgtgatgtttggctatagcgtaatcaaagaattttcaatcagaagtcgcaaagtgaaacccaagtagcattcctaataaaggaaaatatagacctaatagcacattctaggcccacctaatggctagcgcttccttaagttgtgttccttgctcccttgtaatcccctaaagagtcactctttagccggttgtcttttcttcttttgctgattgtaccaattggcaaactttatttcttctaatatatccagcaaatctcttgctgattgcagtttcaaaaataatggtgctgtgagactcgagggcgatacaacaacaataaaaaaactggagcacctatgatcatgacacgagtttgtcaagatgtatgtgtggccatgggtggacctcgtcaatggatgagttagtctcagttggcctgaaatcaacaaacaaaatcaaatagttttttttctagtataacggattcgagtcactcaattaattcttgcaatgacggaaaggggaaacatttcgaattcaatgtttggatttaattccaaccaggtttcaaaagataatctgttcattgcagctcatatgaatagtaattaaagaaagacatatctggagtactggagctcacattagacctatggagcattggatcaagaataaattttcagcaatgcttaattcttgaccttggcaaatctcagtaaaattattagtcaataataatagtatatccttccgcattccgctgtcaaaagaacaaaaaaaaaatcttccccacaagaataaaaacatatcaacctcaattttccagatcatgcaaaacatgatcaacaaaactcaaattattttcctgcaacagttcaacattatcatcaaaatatattaaattctacagaagaatttaaaccaacacccaacatgtcacaaagaagtatcaatacaagagtgcttctccaatttattttatttttagatgttcaaagcaacgaaagcataaagtgattcttttgcatgacctttccttattccctagctgcaattcacatgaggatagtttatcatttcagtgccttgtagcaaccaggttggtttaaaccctcggcatgtgaccttgaactggaggaggtagtcctcccatttttccactcctcactttgaccaacagttcttggagccattgctgcattgtagggtcatcctgcatttgtagtaaaacaaatttatattcagagttgattgcaattatcagcctagtctaatagtacttcagttggatgatacatactacctcaaaatataataaattctggttgtatatcttgtccatccaggtacatagctaaaaattattataatttggggatggaagtagtagtaatttttagtgaaaatgtatatctacaatacacaactcaccttagtaagattgttgaatgtcccatctataagtgtggtaggaaggcaagtctgcagtgcctccaagcccctggaacattgcagaggaggtagatcgaaatggcattgctggctttagaagtttgaaaaaatgaagataattctgcaaaatgaaagtgaggaaacaaacctaggattgtctgtgatcctaaggtaacagtggataatgtgcttcaacaaccttggggagggcttgtcatccattgaggtcaccatgcctgctaaggcagtccccacagcgaagaaccgatcagcagtagcgcaaatgtaaccaagcccagcgtcatccaagacaatcttttcaataataaaagttgccacctgcatatataggtgagtaaatcagtgaatggatgcaatttctaataagtttaccagaatggaatcaaagtgtatgtcactgaaaacacacatataaaaatgcaaatatatatatgatatacttaccatagatatatacatgattaatacataggtaacaaaaagaaaatggcaatatctagattgttagattggtacaattatatcaatcaatgaattgctacaaagtattccaaaacagcaagacccaaagtatacaaagaatcactatatatcaataaatgaattgctacaaattatactttgagctgatgctagctgaaaataaaaatgtgctcctatcaaactttacataggaaagaatactaaaagacaattaattaaaggtgatgttattttaggagaggattgatatggctggttacttacagtttttgaaagctcactgcctaccgccatggcatgcaggcagagaggaacaaattcatattgcagtagaaaattgatgacttctgtaccttcagcctgcatgtatcacaagtaaaag

SEQ ID NO: 7541 - DNA, 1349 bp, Oryza sativa
ttccccctcgtccggcagctccctccccctcccaatcctatataaaccttccccgtgcctcccttcaccgtttccgccactcgccgccctctctccccgtcggaatcgagctcgcgccgtcgctctctctctccgccgtcaccgccgagctccggtccgccgccgtcgtcgccccggaccacctcccgcctcggcgtcgccaccttcggcttcaccgcatccccggcgacctcgtccactcctccgttttgctcgccgaccgccggagcaccgtcgaccccgtccacccgagccgcgccgccgccttcctccgctccggtcgccgtttccgtcgtcgccgtcgacccggggtgagccgtggaccgccgcttcttttcccccttcccttcccctctctcggccgccgctccgccgtgcctatggccgccgccggcgaccataggggcgcgggcgcgccgcctcccgccgctgcgccggcgtggccgccttcgggcgcaccgtgcggctgccgcgtggggcccggctgtcagccgcccgcgtcctcgggtgcggctgacgcgtgggacccacggcgccggccggtgtaagcccgggtgcgcccggtccaccgtggaccgtggggctgccgcgtgggccccacccccgtggacccggtccgcgcgcccctcccctcggctgacgcaataaatccattttaaattaaaatttaaatgaagaaattcacaaatatccatttaaagagcatataaacttcaaatggccataacttggccatttgaactcggaattggaccgttcaagtctctaatttttccttaagaagccaagaacccatttttgtgctttgtttctgcttgttatatggagtttagtagagtaaaagccatttcttttccgttggtcgtgtagacgctgcagcttcggaagatccgctcttcgtggaggttgaagccggcgtttgggaaagcgagcaaggcaagtcacatcattaaaagcctaaaatgcgtaaataaattttagtggaattttcagagcacaaataataattaagaagaaataaacaaagttaaaaaggttttataaaaagaaaaaacctaaaaagtctttttccccctcctccccctcttgggccggctcggcccatctctctccctctctctcctctcccccgcggcccattcggcctcctccccgcgcgcgtgccgctgacgggcgggcccgcccgccacccccacccggcatccccttcctcccgccgctcccgccgcctcgcccgtgccctagcgccgccgccgccacgaatcccaccgcctcccgccgtccacgcgcgcaataaagcgggggggggg

SEQ ID NO: 7542 - DNA, 17189 bp, Oryza sativa
tttaaagattagattatggtgataaatgaagtagcaggacagagagagactagaggattttcacaaataaaaaaggatttttatttcgaaaatattgctaaggcttgggatctaaagctcgttctagggtcaagggggctctgataccaacttgtcacgaccagaaataacccaacgggcgttccttacgtgcgtgcattattccttgtcccaggaggcaaggtacaccaaaagttgatacaattcagagtttaacaagcggaagcgtaaatagttaatttattacatgggcggcgaaggcccagcacacaagaagacgaacgaaaaacagcggaagactagggcgacgaccacaggcgcttgacggcaggcacgagctagacaccaaagccttcatcttccaggggctcctcttctgggtttgggaaaaattgagcaagactgagtacaaccaccgtactcaacaagacacacccacaagtgcagaataaatgcaagagagtacaagggagccataatatagggggttagggtttgcagtaaatagcactaaaagacacttagttgctcaaagctattttgtaaacacggtcctagagctatacaatattattaatcaagaccgtaaacccacacgaacctgccttaacccaaggcctatgatgattcagaccgaactggcaacccgaccctgggtcccagctcatcccaatccaacccaggccaaccattccacattttagttgttaagcaggttttaagaattaaaaacactaacttgggtacattgctcagcttgcccataaccgagggcgcggctattcgaatagattatactctgatcagaggtgtacaactttacccacaagacacatcttcctcacgtgtaaccacatgccacataccaccatggtatacggacggaagacgtgacatagtttccaacccatcctagccatagacaagagtaccgacctaaccccacctacggccggaacccccgggacaggtaggcaggactgagcctctagcagtaggacaccggccctgtgccatgacatctcgactaccgggccgcagctcatgtagccttcatttgtcctagagatgtccatcgacccccgacttcgtccatctccatccgtgtacttttgtttataaccagactgagccacaaactaagccttacccactagacatgtggaagtacggtagtgctttgcaacagaggcccgaagaccggtccttatatggccgaggtgctactatcaaaaccatgcaccccgagcccagcctaaaaccattttgagggttttgaatagagaggaggtgtgaatccaattccacaatgatccaacaattccatagtgtccaggtgatgagaatattcccaaagtctagagttgtaaaaccacctaatgttgcctaattaaccagcgaagcatctacctaaaatcatactagtggtaccatgagtagagtgtccactagttggggtttggtttaatctagggtgaacaaggtaataataacaataacaataataaggtcataacaaaggtaaataggcatggctagataaaacagtgataacgcgggaatttaagtaaagcgataatgcaataatttaaatcaaaataattttataaactgggattcaatatgctcaaggatgatgtgacttgccttgctcagagacaacggccttccgaaccttcggcgacgaccgcgaaccacgcttcgggaacctcaggaacgacagaagctacgcgaagcacacaagcaaagctacaaacctataaagaagcaataacaatacataaaaagaaagcacagggttctttaggttataacaaacgttaagagacttgaacgggtcgattcggagcttgtatgaccaagacatggttatccgaaatttaatgctgttatatggtgatttgcggattattgtaattatgttttacaactataaaacatgagcaagcgctagcctggaaaagacaggaaggctgcgccgttgacatgcggaccccacatgtcaacctaaaggaccacggtagaccgagtacacagagacggtccacgggtcgacggaagcggaccccgtgtgtcaactgaggcgagtggccgacaaacggactccactagacaccacgagggctgcacacgagcaaaccacgcggctaccgagcgcgcacacaaacacggtcaccacacgcacaagcgaacgactaccgacaccggtacacgggtaccggggtcgacaaccacacaacgggtacggggcgacaccgaaaggacgaggacggggcagcgagagaagagattcttaccaccacccgacgaggcgagggaacgacaacaacgaacgggcgcggcggagacggccgggaacgacggagacgaaaggcgaggggacgacttcggcggcgatccttggacgaaggcgagacgcggccggcccaacgcttgacgacgcggagccgaggacgaagacgacgacggggctgcagcggctcacttgacagaatgcggacgatgaacgcgaacggcttgacggagggacgaacgccacgacgatgaggatgacgaccgggaccggcgaggaggcaacgagggcagccggcggcagcttcatggagacgaggatggcgcggaacacgccgctgcgatgacgacgatggtggcggcgcagcgagacgacgagccggcgaggacgaacgaccgaccggaggagtcgtcgacgaggacgaacggagacgacgataacgaacaccggcggggttcggatggaggggaggcgaggccgagggcaaccttgacgctgtgatgccggaggtggagatggcgacgtcggccggcgcacgggcacagcggaagaggctgccgaaggcgacgtcgacaaggaggaaggagaggccggcgcgggcgacggcggtctccggacgaatcagagggtaggccggggtggaggtcgacgcggcgacgctgagggaggagacggcgcggccgacccacacctgagcggcacggcaggggcggctagaggcagtgggtggcggcaatgccaccggttgccggcggggacacgcctccggtggtttccccgtgaaacggaggtctgaccgggggagaggaggcggctgcgaggccgaacgcggcgacggcgcgaccggacggtgctcgggcgaggagggagaggcggctggaggccggttggcgccggagcgagagaaggagaaggcggggaaaggtggagaggccacgggagagcgcgggagggggctaagacgatagaacggagcgaggagattccgttttataggggaggagagggagccggccacgggagaggcggggaacggcggcggaattcatggccggcggccatggaaggtggccggggttggcgcgggcgttcccgacgattgggggctcgaatcaagggggaaattggggggaattgaagaggaaggaaaggggattaattccccctaattaatttggaatgagccggcttgaatggggcggatttggaggaggaacgtctctaggtttgcacgggagagagaagaggccgtgcgggaggaaggagacgaccgaggtgggacccacgcggcaaggcgcgcggtcagcgcgcgtgcggcgctcgtgcgcacgcggctagggcaggagggcgctgcggctcgggcaggggcattgcttgggccaggcggccggcccaggaggagaggagggagtggcggcctgggagagagagggaggaggagggagctgggccgagggggggaggggaagggcggcccaagagagagggagggaggctttgggccagacttggcccaaagggaggagggggatttatttttagtttttctttttagtaaactttgttaattgttgttgttgcttaagaaatattttcggtgctctgaaaattcaagtaaaatttgagggctcattttagaccaaggagaatttaacgaaaattctctaggccacattcgaatttttcttgtacgtattttagtgtttgccaatttcttttcgaattttaattaattatattattccttttagaaaatgatttttatttggggatgaatttattaggacgtgacataccacaaccatgagtacacaccgatccatcaaacaataaagtccatggcactatttcaaccgagccgactaagtcatcacgatgttccacaataaaatcagctattgcttgtccttaatcgccttcggcgactcatacagaagatcaaactcggttaaggaaaatatccactttccaacccttccttttaatttttgagccgatagcatgtacttgacaacgtcggccttgcatataacactacactcgttggacagtagataatgcctcaaccttggacacgaaaaatacaaacacacgcataacttctccacaggggaatatctagtttcagcatctaagagccgacgactgagatagaatacaacgcgttccttcccttccaacgcctgaatcaaagactgagccgattgacttctcaccggccgataaattcaacctaaacggtattcctttctgtggaggaatcaaaacaggaggagagctaagatattccttaatattatccaaagccttttgctgctctgccccccaagtaaactgctgatcggctttcaatctcaacaatggtgtaaaaggttctaaccttctagacaaattagaaataaaccttctaacaaaatttatcttgccgatcatctcttgtaattctgtcttattctctggaggctgaatcttcttaatcgcattaacactcctttgagttacctcgatccccctctcatgaacaagaaatcccaaaaactggccagtcgatacaccaaaagcacattttgtcaaattcatcttcaggccatattttctggttctctcgaaaaccttcctcaaattagctatatggtcctctatttctttagacttaacaaccacatcattaatgtagacttcaaccaaccagccgattagatcatgatatatgtaattcatggctctttgatatgtagctccagcactcttcaagccgtaagtcatgacaacccattcaaataagccgattgcaccaggacacctaaaagctgtcttatgaatgtcttcttcggctataaaaatttgattgtatcctgcgtttccgtacataaaactcaaaatcttatgtcccgaagcagcatccactagttgatcggctattggcattgggtattcatctttcggggtggccttattcaaatttcggaaatcaatgcataccctgaccttgccgtttttcttgataacaggaactatactagaaacccactcagcatatcggcaaggacgaataaaaccagcatcatataatcttttaatctcagccttgaccggttcaagcatgtcggccttgcatctcctcggaggttgttgatgtggcctgacccttggtttgataggtagccgatgttcaacaatcgatcggctgaatccaggcatctcataatattcccaagcgaagcaatctctaaactcttttaagagctctatcagcttggttctaaacactggagataagttcttactaataaatgtcggccttagccgatcgcctggacctatgtctacttcttccaaatcatcggccgacatgaaaccttgatcttgcttgttatcgagatcatctaccgtgttcttagtgtagagatttgaaccctccacgatgccctcaaaataatagcttgggttctccatcttcaattggctgtatatcagaatcggacacttttagaaaatccccatcccagacttttccagatatacaatcaaggccatccatctcccaaagagctaaatcggcactggcaacattaactgacctgtcggctggcacgatctctattttgtcgccttgccactgaatcaaacattgatgcatagttgaaggaatgcaacaattggcgtgaatccaatcccttccaagcaacaagctgtaagaacctttcccatcgatgacaaaaaatatggcaggaatagtcttactgccgactgtcagctccacatttagaacacctttggttttggatagattgccaccaaaatctttgagcaccatgtttgtcttgatgagatcctcggcatttctacccaacttcctgaatgtagcatagggcatcaaatttaccgtggccccaccattaaccatcatttagacatcggcttcccattgacgtagccatttatatacaatggtttaagatgccgattctctgtcccctcgggtttctcgaacactgcctgttctggtgacagaaccaacttagccgattcctcttccacctcatcgacatcagcttgatcgatcccgaatttggctggcagggtaaagaccatgttaaccggtgccgtcacaacactcttcccttttgccaacctctttgcctcatcggctgcaacatcatcagctacaggaacttgattcttaacacgccactcctgccttggctttgctttctttagccgatgattaatttcttgttcaaccccctaaaggcgctccctgttcctcaatctttgaacccttctcttctgattcttcgtgaaaataccagaaggacaccattgattcttcctaatcacattgtccttgtcgatatgcttagtggccatgatcttgattaattggacccaatctttgatgaacagaaactctcatctgccttagccgattgctcctattatatgatcggccggagttctcgatgatatcactgcacccagggcagttttcaatagatgacaacctcataccttcattccagcagaatctaaagaactcacaaccccaatgaggatcaaaaccatcatcgtatttctcatgatgcttctcctgctgcttgtcatacttcttccgatatttcttgaaaatcttagccgaattcacctgaaaaccccttgcatgggccctatcggctgcttggccagctgtatgcaccatattaacaggaaaagggttaccatcgaccttcatcggctttttggaatcatcaaacctaatcttgcctccctcaatgaccacctgaatctgctgtctaaaaaccttgcaatcgttagtagaatgggacctagaattatgccatttgcaatacctctgtttgcctaattcctcagccgatggggttgtatgaccagcagtgtcacgaccggaaataacccaacgggcgttccttatgtgcgtgcattattccttgtcccaggaggcaaggtacaccaaaagttgatacaattcagagtttaacaagctgaagcgtaattaattaatttattacatgggcggcgaagacccagcacacaagaagacaaacgaaaaacagcagaagactagggcgacgaccacaggcgcttgacggcaggcacgagctagacaccaaagccttcatcatccaggggctcctcttctgggtttgggaaaaattgagcaagactgagtacaaccaccgtacttaacaagatacacccacaagtgcagaataaatgcaagggagtacaagggagccataatatagggggttagggtttgcagtaaacagcattaaaagtcactttgtaaacacggtcctagagctatacaatattattaaccaaggccgtaaacccacacgaacctgccttaacccaaggcctacgatgattcagaccgaactggcaacccgaccctgggtcctagctcgtcccaagccaacccaggctaaccattccacattttagctgttaggcaggttttaagaattaaaacactaacttgggtacattgctcagcttgcccataaccgagggcgcggctattcaaataggttatactctgataagaggtgtacatctttacccacaagacacatcttcctcacgtgtaaccacgtgccacataccaccacggtatacagacggaagacaggacatagtttccaacccatcctagccataaacaagagtaccgacccaaccccacctacggccggaacccccgggacaggtaggcaggactgagcccctagcagcaggacaccggccctgtgccatgacatctcgactaccgggccgcagctcgtgtagccttcatttgccctagagatgtccattgacccccgacttcgtccatctccatccgtgtacttttgtttataaccagactgagccacaaactaagccttacccactagacatgtggaactacgatagtgctttgcaacagaggcctgaagaccggtccttatatggccgaggtgctactatcaaaaccatgcaccccaagcccagcctaaaaccattttgagggttttgaatagagagggaggtgtaaatccaattccacaataatccaaccattccatagtgtccaggtgataagagtattcccaaagtctagagttgtaaaaccacctaatgttgccgaattaaccagtgaagcatctacctaaaatcatactagtgttaccataagtagagtgtccactagttggggttttgtttattctagggtgaacaaggaaataataacaataacaataataaggtcataacaaaagtgaataggcatggctagataaaacagtgataacgcgggaatttaaataaagcgataatgcaataatttaaatcaaaataattttataaactgggattcaatatgttcaaggatgatgtgacttgccttgctcactttcccaaacgtcggcttcaacctccacgaagagcggatcttccaaagctgcaacgtctacacgaccaacggaaaataaaagggcttttactctaataaactccatataacaagcaggaaaaaagcacaaaaatgggttcttgacttcttaaggaaaaaaaagagacttgaacggtccaattccgagttcaaatggccaagttatggccatttgaagtttatatgctctttaaatgaatatttgcgaatttcttcatttaaattttaatttaaaaagggtttatttcgtcagccgaggggaggggacgcgcggaccgggtccacgggcgtggggcccacgcggcagcctcacggtccacggtggatcgggcgcacccgggctcgcaccggccggcgccatgggccccacgcgtcagccgcacccgagggcacgggcggctgacggccgggccccacgcggcggccactcggcgcgcccgaaggcggccactcggcgcggccggcgggaggcggcgcccgcgcccctatggtcgccggcggcggccgagagaggggaagggaagggggaaaagaggcggcggtccacggctcactctaggtcgacggcaacgacaaaaaaggtggccggagcggaggaaggcggcggcgcggctcgggtcgacggggtcgacggcgttccggcggtcggcggactcggcgagggggtggacggggttgacggcggtgcggcgaagccggttgaggcgacgccggggcgggagacggtcccggcgagcggagaaggccagccggaggtcgtcggcgacggaggtcccggcgagagggcgacggcacgagctcgattccggcggggagtgggtgcggcaaggggcggaaacgggcgagggaggcacggggagggtttaaatagggttggaagggggagagagcggccggaggggaaggaaaccggcgcgggaggtccggccgccatcaatggcgccggcgagatttgcgggggcaaatctgcccgtttgaacacgagagagagagggaaaaatggggcgaaagggagaggggatcacagggagtatttccccccactttattgcacgcagggacggcgcgatgcggcggatttggcggcagcggcggcgcttggcgcgggcggagcggcgggagcggcgggagtggcgggaggacggggatgacgggtgggccccacccgtcagcgagggtggcgggcgggcccgcccgtcagcggcgcgcgcgcggggagggaggctgaataggccgcggggaagaggagacagagagggggggtggatagggagatgggccgagccagcccaagggagggaagggggacttttagggtttttctttttataaaacctttttaactttgtttattttttaataattattatttgtgctctgaaaattccactaaaatttatttacgcattttaggcttttaggaaatttacaaaaatcctctaagccttatttggcttttaactttgcacaatttaattcttggaggctttcacacggattttaattattctaggcaacatttaagggatatattttagagtcgttttgggacgtgacaaacctaccccccttaaacggaacctcgaccccgagattcggaagaactggcgaagagatcgggatgggctgccttcagctcgtcttcacgctcccaagtagcttcttcctcggcgtggttgctccattggaccttgcaaaaacgaattacccggttcctggtcctgcgctccatggcgtccaggattttcaccggtctctccacgtaggtcaagtcttcgcgaacttcaatctgctctgagtcggcctgctcggacggcactcgaaggcatttcttgagttgcgacacaaggaacacatcatgcacgttgcccaaggaggcgggcagctccaactggtaagcgacttctccgcgtcgagcaatgatacggaaaggacccacaaaccgaggtgcgagcttccctttcgtctgaaaccggtgtatgcctcgcaacggtgcgacccggagatacacaaagtcatccactgcgaattccaggtcacggcgtcggttgtctgcataactcttctgccgagactgggccacctttagattctcccgaatggtcctgaccttcgcttcagcttctctcaagatatcggtcccgaacacttggctttccccaacttggtcccacaatagtggtgtccggcatttgcggccatacaatgcttcgtacggtgccatctgtatgttggcttggtagctgttattgtaggagaactcggcgtaagggagactcttatcccatgtcttcccaaaatctaggacacatgtgtgaagcatatcttctaggatctaatttagacgctcggtctgtccatttgtctgcgggtgatacgcggtgctgaaatttaagcgggtacccaactcttcttggagcttcttccagaaatgagaggtgaactggcgtccccgatcagatatactttttttaggaacgccatggagactcacgatcctagcgaagtagagttcgggtagtttgttccctccataggtggttttcacaggaataaaccgagctaccttggttagtcggtccacaacaacccatatagaatcatatcctccttgggtttttggaagtccgatgatgaaatccatcccaatttcatcccatttccattctggtacttggagaggttggagaagtccggccggtcgctggtgctctgccttgacacactggcacacatcacaaagggccacgaactctgcaatttcccgcttcatactaacccaccagtatttcccttttaagtctaagtacatcttcgtactgccagggtggatggaataaggactttcgtgagcttcctgaagtatcagctgtttaagttccttgtcgtccggaacgcatacaccatttccgttccatagggttccatgttcatcttctgtgaaaccagcggctttaccttgtttcatattcttgaggatcccatgcatatctggatcattcttttgagcctcgcagatttgatcgagcaaggtgggcttggcttccagcgtagccaagaatccacgaccaactatgcttaggttcagggcttccatctgttgatgaagttccggtggaatgccacggacgctaagagtgttgcaacggctttttcgactcagcgcgtctgcgaccacgttggccttaccagggtgatagtggatccccacatcataatccttgatgagctctaaccatcttctctgccaaagattcagatccgactgggtgaagatgtatttcaaactcttatgatcggtatatatttcgtagcgattcccaatgagataatgccgccagatttttagagcataaaccacagcggccaactccaaatcatgggtagggtagttgccttcatgaggccgtagctggcgtgaggcataggctaccacatgaccttcctgcatgagcacgcaccccaatccttggcgcgaagcgtcacagtacaccatgaagtccttgcgagtatccggtaagattaaaactggcgaggaaaccagattttccttgagagtttggaacgccttctcgcattgcgggctccacacaaatttttcttctttcttgaacaactgtgtcatgggtcgagcgattttggagaagttctcgatgaacctccggtagtatcctgccaaacccaaaaagctgcgaacctgagtaactgtcttgggttgcttccaatcagtgacggcggtcactgtttcggggtccacagcaactcctttagcagatatcacgtgccctaagaatttgacttcggataaccagaactcacacttgctgagcttggcatacaattgatgttcccgcaactttcccaacaccagacagagatgctgttgatggtcttcctctgattgtgagtataccaggatgtcgtcgatgaagacaacaacaaacttatccaagtattccacgaacactttgttcattaagttcatgaagaaggcaggagcattggtcagcccgaacgacatcaccgtgaattcatacagtccataacacgtggtgaatgcggtcttcgggatatcttcttcacggatacgcaattggtgatatccggagagaagatcaatcttggagaataccgtggcacctttaagctgatcgaacagatcatcaatccggggaagagggtacttgtttttgatagtaacttcattgagagctctgtaatcaacgcacatcctctttgtcttgtctttcttctccacaaaaatcacaggagcaccccagggggaagtgctcggccgtatgtaccccttttcttttaactcttccaacagtttcttgacttcggccagttcatttgctaccatacggtagggtcggttgtacagaggagtggttcctacagcaagatctatccggaactcaatctctcgcttgggcagcataccgggtagttcttccggaaacacatctccgaactcactgactatggggatttctgacagtcctatctgatgaagttctaaactaccgacagaggttgggggtgcaaagaaaacaaccggttgttccggccctcggtacagagtgacagtgcgtcttgcgcaatccactactccttggaattgagccaaccaattcatcccaaggatcacatgcaagttcttggtgtctagaagaatcagatccgaaggaaaaggaattccctggatttctataggaacggcagggctataatactttgctgtcataacccctccaggggtggtgatgagcagagggttcctaagcctttctacccccaactgatttctccccacgaatggcacagatataaacgagtgggaagctccagagtcgaacaaaatggtaccagggatggaatgaatgaggaacgtacccacgatgacgtctggagttgtcagcacatcctcggcagtcacgtggttcacatgaccccgaatgacatccttaccactgttgttggggcggggaggcgcttggccttgctggcgcctcggctttgggcatttatccgcaaagtgcaataatttaaaacagtgataacgcgggaatttaaataaagcgataatgcaataatttaaatcaaaataattttataaactgggattcaatatgttcaaggatgatgtgacttgccttgctcactttcccaaatgtcggcttcaacctccacgaagagcggatcttccgaagctgcaacgtctacacgaccaacagaaaataaaagggcttttactctaataaactccatataacaagcaggaacaaagcaccaaaatgggttcttgacttcttaacgaaaaaaaagagacttgaacggtccaattccgagttcaaatggccaagttatggccatttgaagtttatatgctctttaaatgaatatttgcgaatttcttcatttaaattttaatttaaaaaaggggtttattgcgtcagccgagggggagggggcgcgcggaccgggtccacgggggtggggcccacgcggcagcctcacggtccacggtggaccggttgcacccgggctcacaccggccggcgccgtgggccccacacgtcagccacacctgagggcacgagcggctgacggccgggccccacgcggcaaccactcggcgcgcccgagggcgaccacgctggcgcggtcagcgggaggcggcgcgcccgcgccccgatggtcgccgccggtgaccaccggcgcggtggagcggcggccgagagaggggagggaagggggaaaggaggcgacggtccacggctcaccccagggcgacggcggcgacggaggaggcagccggagcggagggaggcggtggcgcggctcgggtcgacgggtacggcggcgctccggcggtcggcgaccgaaacggagaggtggacgaggtcggcgaggatgcggcgaagccgaaggaggcggcgccgaggtgggagacggaccggagctcggcggcgacggcggagagagagagcaacgtcgcgagctcaaatccggcgaggaggaagggcgccgagaggcggaaacggacggaggaggtgcggggagggttcaaatagggttggaaggaaaccggcgcggcgctctcgggctccatcaatggcgccggcgggattaggggagggtttccaaacgagtccaagggagagtgggatggaaaattggggggaaagggagaggggatcacggggagtgattccccccactttattgcacgcggggacggcgggaggcggcgggattcgcggcggcggcggcgctagggcgcgggggaggcggcgggagcggcgggaggaaggggatgacgggtgggccctacccgtcagggagggtggcgggcgggcccgcccgtcagcggcgcgcactgggagggaggccgaatgggccgcgggggagaggagagagagagggggagggagatgggccgaattcggcccattagagagaaggagggattttagggtttttctttttataaaatcattttaactttgtttatttcttaataattattatttgtgctctgaaaattccactaaaatttatttacacattttaggcttttaggaaatatacaaaaatcctctaagccttatttgacttttaactttgcacattttaattgttggaggctttcacacggattttaattattctaggcataatttagaggatatattttagggtcgttttgggacgtgacacatattcctaatgcttataatgatgtttctaggggatatcctcccgatacaagacaaggccaatataatcatattgcgccacaaacacaacctattaggccaccaaacccaccgccaaatcaacaagggcctaataacatggaggatatgattagtgatattatgaggaatagattcgggattgaaactagaaatcgtgctagaacttacaaaaagtcatatcctgattattatgataatgtgctgtttcctcgaaattatagagttcccaaatttgccaagtatagtggtgaggatggtaagaccacatgggagcatgtaggtcaatttttggcgcaatgtggtgaggctaatagtgatacttttaaattgcgcttgttttctttatctttatccggtaatgctttcacatggtttacttctttaccagcaaattctattcatacttgggctcaattagaagaacaatttcatgattatttctatactagagaaactgagcttaggttatgtgatttgacatcggttatgcaaaagtataatgaatctgtcattgattatattaagagatttagagatgttagaaaccgatgttatactttgaatataactgatagagatttggctggtcttgcttttaatggtttagttgctcctcttagagaaagactagatggccaacaatttcttgatgttagtcaactcatgcaaagggctctggctcaagaaagccgggttaaggataatagaaaacttgctagaccatttgataaaaagcctaatgttaatgtggttgattacccttaagctaatgatagtgaggaagagggtgatcatgatatttatgttgccgaatggtcatggactaacaaaaataaaacttttgtttgttctaacctaatcccgactcctcgcaaagatcggcaaagtgaggttaaatatagttttgatgtggccaagtgtgataagattttttattatcttttgcaagagaaacaaattagattacctaaaggccatgtcataccttctcaagaagagttgaaatgtcgagcatattgtaagtggcatgattctcattctcactctactaatgattgcaatgtgtttcgacgacaggttcaatcggccatagatgaaggacgattgaagttcaccgatggctccaagatgaagcttgatcatgatcattttccggtgaatacaattaatttcaatgataagaaggtgttgattcggccggagcaagccgaatctactaaggggaaggaagtggtcattggtgaaccaaggtccaagatgatagtgctaaagaagccggaggttggcgtttggaaagagaataggagtggagcttcaacttctaaagcccctaggaagaccaaggtgacttttaatatgcttttggagaaatatgaaaagcaaggtggtgagaaaattcgcaacaaagggaaaagaccaagatcaccttctaaggagcgatttggtcattcaccaagacggtcgcgttcaccttcgtatcattatccacaagatatgtcatggggttcctatccaatgccgccgtgggttatccttatccttgcttcatgccatggggccgacgccgccaatgttcaatcatatgcctcctatgcaattcaaccaagggaggggaggaccacggaggccaatt

SEQ ID NO: 7543 - DNA, 3267 bp, Oryza sativa
aacttcatcaacagatggaagccctgaacctaagcatagttggtcgtggattcttggctacgctggaagccaagcccaccttgctcgatcaaatctgcgaggctcaaaagaatgatccagatatgcatgggatcctcaagaatatgaaacaaggtaaagccgctggtttcacagaagatgaacatggaaccctatggaacggaaatggtgtatgcgttccggacgacaaggaacttaaacagctgatacttcaggaagctcacgaaagtccttattccatccaccctggcagtacgaagatgtacttagacttaaaagggaaatactggtgggttagtatgaagcgggaaattgcagagttcgtggccctttgtgatgtgtgccagcgtgtcaaggcagagcatcaacggccggccggacttctccaacctctacaagtaccagaatggaaatgggatgaaattgggatggatttcatcatcggacttccaaaaacccaaggcggttatgactctatatgggtagtcgtggaccgactaaccaaggtagctcggttcattcccgtgaagaccacctatggagggaacaaactagctgaactctacttcgctaggatcgtaagtctccatggcgttcctaaaaaaagtatatctgatcggggacgccagttcacctctcatttctggaagaaagctccagaagagttgggtacccgattaaatttcagcaccgcgtatcacccgcagacagatggacagaccgagcgtctaaataagatcctagaagatatgctccgtgcttgtgttctagatttcgggaagacctgggataagagtctcccctatgccgagttctcctacaataacagctaccaagccagcatacaaatggcaccctatgaagcgttgtatggacgcaaatgctggacaccgctattgtgggaccaagttggggaaagccaagtgttcgggactgataacttgagagaagctgaagcgaaagtcagaaccattcgggagaatctaaagttggcccagtctcggtagaagagttatgcagacaaccgacgccgtgacctggaattcgcagtggatgactttgtctatcttcgggtcacgccgttgcgaggcgtacgtcggtttcagacgaaagggaagctcgcacctcggttcgtgggtcctttccgtatcattgctcgacgcggagaagtcgcttaccagttggagctgcccgcatcattgggcaacgtgcatgatgtgttccatgtgtcgcaactcaagaaatgtcttcgagtgccatccgagcaggccgactcagagcaaattgaagttcgcgaagacttgacctacgtggagagaccagtgaaaatcttggacaccatggagcgcaggaccaagaaccgggtaatccgtttttgcaaggtccaatggagcaaccacgccaaggaagaagctacttgggaacgtgaagacgagctaaagtcagcccatcccgatctcttcgccagttcttccgaatctcggggtcgagattccgtttaacgggggtaggtttgtcacgtcccaaaacgtgtaaataaatttcctaaaagtcaattaaggcttagaggatttttgtatatttcctaaaagcctaaaatgtgtaaataaattttagtggaattctcagagcacaaataataattattaagaaataaacaaagttaaaatgattttataaaaagaaaaaccctaatgggccgaattcggcccatctccctccccctctctctcctctccccgcggcccactcggcctctccctgcgcgcgcgccgctgacgggcaggcccgcccgccaccctcgctgacgggtggggcccacccgtcatcccctttctcccaccgctcccgccgcctcccccgcaccctagcgccgccgccgccgcgaatcccgccgcctcccgccgtccccgcgtgcaataaagtggggggaatcactccccgtgatcccctctcccattccacccaattttgcatccctctctcccttggattcgtttggaaaccctcccctaatcccgccggcgccattgatggagcccgagagcgccacgccggtttccttcccctccggccactctctccctcttccaaccctatttaaaccctccccgcacctccttcgtccgtttctgcctctcgccgcccttcctcctcgccggatttgagctcgcgacgtcactctctctctccgccgtcgccgccgagcttcggtccgccgccgtcgtcgccccggaccgcctcccacctcggcgccgcctccttcgggttcaccgcatcctcgccaacctcgtccacctctccgtttcggtcgccaaccaccggagcgccgccgacgccatcgacccgagccgcgccgccgcctccctccactccggccgcctcctccgtcgccgccgtcgacctagggtgagccgtggaccgtcgcctcctttcccccttccctcccctctctcggccgccgctccgccgtgccggtggtcgccggcggcgaccatcggggcgcgggcgcgccgcctcccgccgaccgcgccagcgtggccgccctcgtgcgcgccgagtggctgccgcgtggggcccggccgtcagccgcccgcgcccttgggtgcggctgacacgtgggacccacggcgccggctggtgcgagcccaggtgcgcccggtccactgtgggccgtgaggctgccgcgtgggccccactcccgtggacccggtccgcgcgtcccctcccccttggctgacgcaataaacccctttttaaattaaaatttaaatgaagaaattcgcaaatattcatttaaagagcatataaacttcaaatggccataacttggccatttgaactcggaattggaccgttcaagtctctaatttttccttaagaagtcaagaacccatttttgtgctttgttcctgcttgttatatggagtttattagagtaaaagccttttctttttcgttggtcgtgtagatgctgcagcttcggaagatccgctcttcgtggaggttgaagccgacgtttgggaaagcgagcaaggcaagtcacatcatccttgagcatattgaatcctagtttataaaattattttgatttaaattattgcattatcgctttacttaaattcacgcgttatcactgttttatctagccatgcctatttacctttgttatgaccttattattgttattgttattattaccttgttcaccctagattaaaccaaacc

SEQ ID NO: 7544 - DNA, 1433 bp, Oryza sativa
gcccgccaccctcgctgacggggggggcccaccggtcatccccttcctccagctgctcccgccgcctcgcccgtgccctagcgccgccgccgccgcgaatcccgccgcctcccgcagtccccgcgcgcaataaagagagggaaatcactccccgtgattccctccctctttccccccacttttccctctctctctccctcggattcgttcggaaagtttccccctaacttcgccggcgcatcaatggcggccggaccttccgtggccgattccccctcatccggccgttctctccccctcccaacactatataaacactccccgtgcctccctccaccgtttccgccactcgccgctctctgtccccttcggaatcgagctcgcgccgtcgttctctctctctgccgtcgccgccgagctccggtccgccgccgtcgttgccccggaccctctcccgtttcggcgtcgccttcttcgggttcaccgcaacctcgccgacctcgtccacccctccgtttcgcccgccgaccgccggaactccgccgtcctcgtcgacccgagccgcgccgccgccttcctccgctccggtcgccgttcccgtcgtcgccgtcgacccggggtgagccgtggaccgccgtttcacttcccccttccctcccctctctcgggcgctgctccgccgctccggtggtcgccggcggcgaccatcggggcgcgggtgcgccgcctcccgtcggctgtgccggcgtggccgccttcgggcgcgccccgcggctgccatgtggggcccggccgtcagccgcccgcgccctcgggtgcggctgacgcgtgggacccacggcgccggccggcgtaagccgcgtgcacccggtccaccgtggaccgtgaggctgccgcgtgggccccactcccgtggacccggtccgcgcgcccctcccctcggctgacgcaataaatccgattttaaattaaaatttaaatgaagaaattcataaatatccatttaaagagcatataaacttcaaatggccataacttggccatttgaactcggaattggaccgttcaagtctctaatttttccttaagaagccaagaacccatttttgtgctttgtttctgcttgttatatggagtttagtagagtaaaagccatttcttttccgttggtcgtgtagacgctgcagcttcggaagatccgctcttcgtggaggttgaagccggcgtttgggaaagcgagcaaggcaagtcacatcattaaaagcctaaaatgcgtaaataaattttagtggaattttcagagcacaaataataattaagaagaaataaacaaagttaaaaaggttttataaaaagaaaaaacctaaaaagtctttttccccctcctccccctcttgggccggctcggcccatctctctccctctctctcctc

SEQ ID NO: 7545 - DNA, 2522 bp, Oryza sativa
caacccaggccaaccattccacattttagttgttaagcaggttttaagaattaaaacactaacttgggtacattgctcggcttgcccataaccgagggcgcggctattcgaatagattatactctgatcagaggtgtacatctttacccacaagacacatcttcctcacgtgtaaccacgtgccacataccaccacggtatacagacggaagacgtgacatagtttccaacccatcctagccatagacaagagtaccgacccaatcccacctacggccggaacccccgggacaggcaggcaggactgagcccctagcagcaggacaccggccctgtgccatgacatctcgactaccgggccgcagctcgtgtagccttcatttgccctggagatgtccatcgacccccgacttcttccatctccatccgtgtacttttgtttataactagactgagccacaaactaagccttacccactagacatgtggaagtacggtagtgctttgcaacagaggcccgaagaccggtccttatatggccgaggtgctactatcaaaaccatgcaccccgagcccagcctaaaaccatttttggggattttgaatagaaggagcggtgtgaagccaattccacaataaccaaaccattccatagtgtccaggtgatatgaatattcccaaagtctagagttgtaaaaccgcctaatgttacctaattaaaagcgaagcatctacctaaaattatactaggggtaccatgagtagagggtccactagttggggttttgtttattctagggtgaacaaggtaataataacaataacaataataataaggtcataacaaaggtaaataggcatggctaaataaaacagtgataacgcgggaatttaaataaagcgataatgcaataagttaaatcaacataattttacaaactgggattcaatatgttcaaagatgatgtgacttgccttgctcgctttcccaaacgccggcttcaacctccacgaagagcggatcttccgaagctgcagcgtctacacgaccaacggaaaagaaacggcttttactctactaaactctatataacaagcagaaacaaagcacaaaaatgggttcttggcttcttaaggaaaaattagagacttgaacggtccaattccgagttcaaatggccaagttatggccatttgaagtttatatgctctttaaatggatatttacgaatttcttcatttaaattttaatttaaaatcggatttattgcgtcagccgaggggaggggcgcgcggaccgggtccacgggagtggggcccacgcggcagcctcacggtccacggtggactgggtgcacgcggcttacgccggccggcgccgtgggtcccacgcgtcagccgcacccgagggcgcgggcggctgacggccgggccccacatggcagccgcggggcgcgcccgaaggcggccacgccggcacagccgacgggaggcggcgcacccgcgccccgatggtcgccgccggcgaccaccggcgcggcggagcagcgcccgagagaggggagggaagggggaagtgaaacggcggtccacggctcaccccgggtcgacggcgacgacgggaacggcgaccggagcggaggaaggcggcggcgcggctcgggtcgacgaggacggcggagttccggcggtcggcgggcgaaacggaggggtggacgaggtcggcgaggttgcggtgaacccgaagaaggcgacgccgaaacgggagagggtccggggcgacgacggcggcggaccggagctcggcggcgacggcggagagagagaacgacggcgcgagctcgattccgacggggagagagagcggcgagtggcggaaacggtggagggaggcacggggagtgtttatatagtgttgggagggggagagaacggccggatgagggggaaacgggcgcggaagatccggtcgccattgatggcgccggcgaggttaggggagaggtttccaaacgaatccgagggagagagggagggaaaaatggggggaaagagggagggaatcacgggaaatatttcccccccccccactttattgcgcgcgtggacggcgggaggcggtgggattcgtggcggcggcggcgctagggcacgggcgaggcggcgggagcggcgggaggaaggggatgacgggtgggggtggcgggcgggcccgcccgtcagcggcacgcgcgcggggaggaggccgaatgggccgcgggggagaggagagagagggagagagatgggccgagccggcccaagagggggaggagggggaaaaagactttttaggttttttctttttataaaacctttttaactttgtttatttcttcttaattattatttgtgctctgaaaattccactaaaatttatttacgcattttaggcttttaatgatgtgacttgccttgctcgctttcccaaacgccggcttcaacctccacgaagagcggatcttccgaagctgcagcgtcta

SEQ ID NO: 7546 - DNA, 15961 bp, Oryza sativa
cagccctagcatgccactgacccaccacccttctcttcctcttcccctagcttcactttcctccgaacagtagtagagtgcccctgcaccttcttccccgtccttaacgattcgccctaaccactctagatcccacgtccccgccaacacaagtccaccgaccttctctcccactgtcgaggctactggtaccaccgccttgccactccaccatggccaccagcccaccatcccttactctcatcatcacctcttatccctctaagtcgggaacacctcctacttcctcttccaagttcatttttttgtcgggcccggtcaagatagaccaaccaaatttatttaagattgaggaatatgtacaaaatttgccaagttcatcactcgtcggagctcaacagatagaggacgtacaatgaatctagaagcataatggaaggtagggaattcgtgtgatttgcccccttaaaatgtgtagaatgatgtattaccataactgtatttttaactcagccatcaccgaccatcagaatttcattttgttttgttttattttcgtgaaaaatgagtgttcaatgtgaaaactggcccatgccaagtctggtccagctgctccttctacatcataagaaaatttctggattcgctacaaaccacacaactaccttgcatttgtgccaaacaaaagaaaaaaaggccaattttttaaaaaatgtatttttttaattttgtcaagattgttgttcctacttattcaagcaacagtgataaggtgtctgcaacaccgatcaccaggttcttttatcgggcggaagggcatgtgacctgagtagcacctcaaggctctgagttcaaatctttatatgagcgaattttatattgggttgtttgataggctaagttcctaatgtaaaaatgttatctgaattcaaatctccatatgagtaaatttcagattgagttgttttgaggggttaagtttccaatttaaaaaggctcacatgcatccgattggatgtagaggccaggtaaaatataaccttgtaaaaaaagttcatttatccgtgtttgggtcggacttgggagagagtagagttgttcggcaagattatgggaaatggagaggtcgaacaaatctagctccgatgacaatacatatttgaatcctcatcgcagctgccatcattaaatctccatatttaattatcttagagtatccctttaattttctttggagcatgtttcatatatttctccaaacatttgttccaaaaactcaatcactcaccagaaccatcgatcgtatgtactacatttcattgcgtgtcgtgtgtcgcagaaacagatgagatcattgtcaatatggccgctggccgacgatgttgcccggcgggtagtagtcgcagacggcgacggtgtcgacgccgttgcggcaggtgcggcgcgcgcagccgagctgcgtcgtggcgcgccacaccacctgcgtgtacgcgccgcaggtccggccgggcggcgccgcgcaccggccggcgtcgcggtcgtaccaccgccggccgtccgcccagaacgccgccacctccgcgccggtgtggcgccggccgtacgccttgaacaggttccggccgtagacggcggcgccgtcgccggtgccccgcgccgcggtgggcggcggcggccgcaggctgcattccgtccggagctcgccggcgtaccgcgccgcatccagctgcagcgtcccgttccacgacagcggcggcacgcccaccgccgcgcgtgcctcgttgtgcacccgcaggaactgcaccggcgtcggctcgacgggggtctgcacggcggagacggagatggatgccgccgccaccggcgatgcggaggcccgcgggaggcacaggacggcgacgagacagcagtagagtggagacatggtggtttcggggtgaagttgtggtgaactcgcgattgtatatatatagcgggggttcttattaattaatggctgccgttttgtgagtcctttggcttttaatttgtacttttaactcatggttttttactaggggagttatgctacaccgactgtgaaagtgtgaatagctttcatatgcaatggttgacggtcttgcagttattatattttgaatgttgcatctctctggaacatcttatgaagcaaattgaaacaattttttataagtgataaagcatcaattaattattttcattaaaatatagttatgttagatcttgttgtaaagatttaattaaaaaaatacaactatgcaatcatattgcattatttgtatatgggattaataatttaagagaaaaaataatttaaacatgttaagaaaagctagatatgcatcgataggggaaagtgagggtagtattggatattgcatgtagctgagatgtaggcataggaagcaagtagctggcatgcagcattcatgcaatgaatgtgtagaggggagcgcacaggagggggacccgatttttctctcaaaaatccgacgcccgattcgtagttgcctcgcaaagatatagtaataaaagaggagaaaataaaattaatgtcgggacctagggatggaattccggaatatccgaagagtttaggcacgatgattcgctagtacacgtatcacaaccttattatcacatccacacaacatacacatacgtagaagcaataagattttcataacttattaagcacatgtggccgaccgaccaaataaaagatataaaatgcagtgaaatattttttttcctttaattgatttcctccgtaatttcctaattcctcccatgcatttaatataaacaagcatatagaagcaagaaactgaatcgatgtattgcagcactaggcagcgagcaaaaaggtaacaaagcaatgtactatcatcatacaagcaagcttgatactctgataaaagcagaatcaggatggatcaggaaaagccagggccggccctggggctatgtagccgaggcgatcgctgggggcccatgatggtggggggccaacacctaatactagtagtctagtatctgcctatggcctacctagaagcagaaatgcccgagagacgagaggagttgcagcgtcataggcaactcgacaaacgacatcgcattgcacagggcacaaccgtacaggcgcacagaagtgcagatccgataaaacagccctcacctagatgtggagacgttgcctttgctttagtgcaggtggaggaggcgtagcggaagagtaggtagagtgcgtatctaccaagcacccatggcggcactgctagatatggcgggtaatataatgctagcactggtcatttccagtggattaaactcgaggaattagaactatgaagtacttgagactatctattattatggttaaatgatttttcgtaagtgatgtctgaaacacccatctgtaaaaaagttctcaaaagtgaatgtcttcaataaccacctacgaaaactcttttcataggtagatgtgtcagagcgtcacctgtataaatcggtgggccccggtttgtttttaaatagttcaaaatatttaaactagcggactagttgtccgtaaaaaagaattttgcagacggttatctgtagaagccgtccacaataataatttccaaagttttgaaaattttatctgagatgttgtcgctgttgttatcctcctaactagttttcatgctctgcagatggagtggtgaaaccctgtatggctagagtgaatggggaggaggtcatgaggcgcagtaagtgagagcacaagtgggtggcgataaaactcccattgtcctcagtcccctatttattagaataaaaatatgtggcatgggagatagagaggcgagccatggtagtggaggacgtgatcggcgtatagcggttcatcttccgaggaggaagtgaccagcatggcagcgtccacgcaaaaaccgattgttttgaatgtcgttgagaacattaagtagtggcgtgaggaatacgaaccgtaacaatcatttcattaaaaacgtccacgcttgtactgtgctttaataatatataaaaaaacagggagtagagttcttcaacaattagaacgtgcttctcagttttttgacggctttatatgtagtattaatttgtcaaacatttgttccaatgcaagaacaaaaacgttcttgaaagttgatcacgcacgtgttattacaccacaacattttatgagctcgcacgtgcatgtgctacatatatataccgcggcatatatatgcgttagtaagggcgctggccggcgatgttgcccggcgggtagtactcgcagacggcgacggtgtccaacacgagagggcacgtgtcgcccaggcagcggcacaaccagcgcgcgcacccgatctgcgtcgtggcgcgccacaccatctgcgtgtactcgccgcagcaccgccccggcggcgccgcgcacgagtcgccgtcgcggtcgtaccaccgcgcgccctccgcccagtgcgccgacgcgtccgcgcccgcgcgcacccgcgggccgctccccctgtacaggttccgcccgtacaagccgtcggtgccccacgcccacaccggccgcgcctcgcagctcgcccggagctcgccggcgtaccgctgcgcgtccagcgcgatcgtcgcgttccacgccagcggcggcacgcccaccgccgcgcgggcctcgttgtgagcccgcaggaactgctccgccggcaacaaactgttggccggaggctccgcggcggcggacaccgagatggacgccgcggccggcgacgccgacgccagcgacaggacggcggcgaggcagcagtagaagggagacatggtgtgttggttgattaatttgtttgtggagaagttgtggtgaactcggggttattatatactgcggtgattgattaattaattgctgctgttaattttgtgggggtttggcttttgaattttactttgtatagttaactcatgggatttattaccggggttatgcaagggggagtgttaatttcgattgattaatgactgttaataagttgtttattacttggattgatcgctcgtggttacgagcaaactagactcgaaagtcgaaactgttgagacgaacaagttcgtaatgacaataatgcggacattcttaataggatttcagcgccatctctaaaaacggcatattcttttctttatgttatatttctcgtaaatggtggaagtattgtttcacgatttctccgattattaggggattttacgaaaaaaacatgtgtgcgtgtcctacatgcatgccctcaccgcccatatccagttgacagaaccggacacgaggggatcaccatgcacaagggaaacaatgccatggtcgctggaacggcgtgccaccggttccccttgcccaactccaaaaaaactatatgacaaccaatccgagaagccaaaataaattcatgtaactgtgaaaagagtgagggtaggggagttatgagctgttgatattatttcctttcaggtctcaaagttgtatgaagttgtgcctccaatcctccatgagataggcaaggtaaatgttctaccaggtttataatgatatatcctctaatttcatgtttgtggttgttatggtcatcatgttctggctttgtatcttcaggtcaaaaatccatggcccaatgatgatgctcacaaacaaccttacccacatgctgacataacataagcaatcacagactaatagacaccaatacaaaataatacaaaataaaaaactcattctatttatgaatctccattcgaatacacgtaacatcttgtatttgtccttggcatctctttgagttttgtgtcgtggcctcgtggggcaacgctaggtctgtgcataccccaggttgcgtcgaggcacagccatgtctgacaccaccgctctcgctggtgcaaacaaatatgctagtctgtctgattgcctctaatttacttcatcctgtcgtgtaaacgtatcgttttgaacatttacaaagccttcagtatagcaataatatccatagatatacattcttcacaaaacctgatgataaaattatactgtttcatgcctattctaaacataaattgtcatgtatatatctagtctaaagtatttaaaatatatattgatattctatgctttgaatattgtttggttcgttgtttttcagaaaaatgaatacgagagcataatcttcacaatttagctcaagacattacagatcaaattgtactaattcaaaattaaattatatttgaagaaaatatatataatgcacaagcattagagcacaacggcttattgggcagaatagtaattcactcgcatgcacaacgacctacactctctgtcccataaaaaaaataacttgtaaagatgaacacatacatatattggttcaaatttgtccgtataaattgattttttttaggacggagtgagtatgtgattattctccggggcacggcactatatgtataacacgatcagtatggtcggccggtgccgtagttccccggcgggaagtagtcgcagacgagcagcgagtcgccggagtcgcacacgatgcggccgcacccgacctgcgtcgtgttccgccacaccacctgcgtgtaccgcgtgcacggcgacgacgacccggacgacgcggccgccgccgcgccggcgcacgtgttgctgccgtagtcgtaccgccgccggccctcgtccacccacgccgccgccagcgccggcgcgttccaccgccgccccttcccgacgaacgcgttctcgccgaagttgaacagcggcgagcgccgcggcgcgcagtcgccgcgccgcgacgctgcgtaccccttcgcgtaccgggcgatgcccgcgctccacgccagtggcgccacgcccaccgcgcgccgcgcctcgttgtgcaccgccaggatccccgccaccgtctgcgcggcacgcgcgcggcgtccggcgtccgcgcccgagacgccattgccggcgccggtggtggcagcgaagcactgggaagccattgccaggattacaacgacagcgacatgggacacgtaggtgttagacattttcgtctctttcttgtctgcgacttctgattgttttttagaagggagagcaatgcaaagcatgcgatgatggaatgttttgggttcagattttgatgcgaatttatagacgattttgcgtgagaatattttaaattattgcgatttctgaattcgcgctgtggatgatccagtacgtggatatagctttgaacgctcgcatggcggctagctagctacataattaattatgtgtgtgatctagcttgttcttgcataacttcttggtacctaagtaacaagagaatctcacacattgtttgatggtgattgtgtgattgaccagataaccgatatgaagaacatgcatgcatgatttgtatatttatttgttgagtgtagagtaggcatgcatggttgctggttttaggggctgatgatgtgtgtgtgttcctgtcattgatcacagctgagagcgaagattaagcactacgccagaaccctacatctatgacggcacattagtgacgggtttataaattggtcacagatgaccgtcacctttgacgggtcgttaggtttaccgtcattggtgaggcatctagccgtggcccgtcacaggtatcacctcacctgtgacgggccagaattttaagccgtcacaggtaagacagtgacaagtttgacttccaacccgtcactggtatgacctcatttgtgatgggccagggagttacaacccgtcacaggtgatgggccgtcacctgtgacggatatgacttctggcccgtcattgattttaagtttgcacccgtcaaaggtgatcaattttgacatataaaaaaggaacccccaccccccacccatggggcccaccgccacctgctcagtctctctcctcctcctctcagtctctcttctcttcttcccaccgaccgccggcctccttcgcccacctccaaaggtcgccgcctccttcgccctccgccccatggtcgccgccgccgtctctccgccaccccgtcatcggctccttcgcctaccgcctccgggtcgctgcctccttcgcccaccacccacggtcgccgcctccttcccgcctccaccacgccagatccaggtcatatcgagccaaagacgaagacaacgccggtgccaggaccatcggccaatggggcaccacgcggctgcccaacgccatcgacaagcccctccgtccatcgtcgcttatctccggtcgacgacgagcttctacatcccccagcctccccctgacggtcccagcaaccatgaactcgggggctccagatccggacaccctgaactcacaggtcgcggatccaaccatcccgagtttgggtgctccagatcctgcggtcctagcttcagcgataccagatccgttcgtgaggtaagcggtccgccgtccacaccacaccacgtcgtcgaggtcaacctgccgtggggagagcaggcgtcggctgtccccttccaccccatcctcggtagtcaccgtcgcctcatctattttactcagtttagtgctaagcagaagtcaccctttccttctcttgcatccagatctgagcttgcagtcaaccaattccggcgtctcctgtggttcctgtggctaaatccttgtccaaggatgcatctagctttaaccccatcaaaaatcatgagctattggatcattagttagatgctctttgtgtactagtattttgtttggatagtgggcatgcatgttgtttcgctttgttttcttgttctatttaagttgatgcatcactaaatctgtttttattttccttgttagacctcttaccagaagtttcttttggttgtgttcttgcatactctacaaatcccccaatttctatactaggggggattctttgctaataatcagtcaattggcaggagagtatggatgcaagaatgatacattgatagtttattatgagaagtgccacgaactaatgaaagagtttcggctggttactttaaagcatgtctctcgagaacaaaatgttgaagctaatgatttagctcaaggggcgtcggggtataagccgatgatcaaagatgttaaagttgaaattgcagcgatgacagccgatgattggaggtatgatgtgcatcaatatttgaataatccatctcaatcggcttctaggaaattaagatataagccattaaagtatacactgttggatgatgaggtttattattggacgattgatggagtgttacttaagtgcttgagtgccgatcaggctaaagttgcaatcggcgaagttcatgaaggaatttgtggtactcatcaattggctcataagatgaagtggttactttggtgtgcagggtatttttggccgacaatgctggaggattgtttcagatattataaggggtgtcaagattgtcagaagtttggagcaattcagcgagcgccgacgtcggctatgaatcctattattaagccatggccattcggaggttggggaattgatatgatcggtatgataaacccaccatcgagtaaaggacataaatttatattggtggcaactgattatttcaccaagtgggtgcaggcgattgctttgaagaaagttgattctggggatgccattcaattagttcaagaacatataatctaccgatttggtattccttaaactattactacagatcagggttcaatcttcgtgtccgatgagtttgttcagtttgccgatagcatgggtatcaaattgttgaattcttcaccttattatgcacaaactaatgggcaagccgaggcgtctaataaaattttgatcaaattgattaagcggaaaatttctgattatcctcggcaatggcatgctcggttggccgaagcgttgtggtcttctaggatggcttgtcatggatccatccaagtccctccttacaaacttgtttatgggcatgaggctgttttgccgtgggaggttagaatcggctctcgaagaacggagttccaaaacgatttaacagtcgatgagtattacaaccttatggccgatgagagggaggatctggttcagtcacgattgcgagcccttgcaaaggttaccaaggataaggaacgtgttgctcggcattataataagaaagtggtacctaaagatttttcggaaggagaacttgtatggaagttggttttgccgattggtactcgtgatagtaaatttggcaagtggtcgccgaattgggaaggaccgttccaaatttataaagttgtgtctaagggagcatatatgctgtaagggcttgatggtgaagtctatgggcgagcgctcaatggcaaatatttgaagcaatattacccaagtgtttgggttaacgcatgatcgtctagcattgccgatgcatgacagccgatgtgtttacatcgccttgagacggccgatatggttatatcgcccttagttgtttttcatggtgtaatcggttgtggtttgccgatgtacagtggctgatattgttatatcgcccttagttgttttataattttaccagtgcttttgacactgtaaaattaggggggcacatatatatatcaaaatgcaatgcaaatttttgagcgaatttcaaagtcatattaaaaatcatattaatcggcacaaaggattgtcaagacagtaaagtattagaacgtcttagccgattacaaaatttctaagtcctattacacaaaagttattgagacaagtatcgctggatagccaaaatagccctttgcctaatttgttctacttcttcaatagcttgggcatcttgagcatcagttccagggatgacttttagggacttggtcaagttcgcaacattcttgatagccgatttcagccttgttttttgttcttcaattgattttgggagatcgactagttttttgtgttccatatctagcgcggcattgcattcttcaagttgcaccaagagctcaatcttgcgagcttcaagctgatcaatattggatttgatcggaccttcagatagctgatcaagtttggttttttcctcatgcacaagctgccgattagcttggattgtgacctcaatctctttgcgctcacggcgttcggctagtcttagcttggctttttccagcttgaactgatgttgctcgagataagcggctggagttaggacatcggccaaatcttcgggaatcagagcctgaatttcatgcagccgtgacctaattgatccacagtcaactaccaagctatctaaagaagaggcttctagccgatgagagatgtcttcaagtgtttttcttacatcatcggataggggagctagggctttgcttgaagtgtcttcgtctgcctcatcaaggtaatctctgatatcaaaagagaagatatcggctagaacctgcagagacaatttccgaaaaagtaagagttgggtaaattatagccgatctaattgttgagacacaaggaaaacttactgggatagcaggagcagctggttgttcttcctccttgatgtgatgactccccacagccgatggagtctggtcacttgacgattgctatacaggaggagaagcaagaggaggctgtagaatagacaagtgttatatagagccggttgagtttgattaagtaaaagaattaaagtcatcttactggtggagccgacttggcaatcgttgctgctggctttttcttcacagcagttttctttttctgcaaccacaaagtctatgagtaattagccgaagagggaagtaattttagaagatgtcaaagagagatacttactcttgtaaaatgaatgggggcagaaggagttggaggcgtttgcttgggtgaagcccatggtgttctttctgtgtcactcatttcggctacagcctggtcaacatcttcaccaatttcctctgcatctaaagcttgttcaatagatgtatccaaggcgggtagatcatcagccgacttatcagtcggtttagttttcttgaatttggcctttttctttggagctaagaccaaggtactcatggccgatgatctggttttccttttcttgcgtgcatcggctagttccctggttaggccgtgaagaagagttgaagtcttgggggcatggtagctgataacagggggagatagtccacctccattcggaattagaccttgagcatattcaatgtccttgccactattactttgatgaggaggggaggactctgttgtctgcaaaataggagaaaaagattagtcaagtaatgaatcggctaactgattatgcaatttagtaatgacaaagtttacctggggtatgacgtcagggaatagatctgtcatatacattgaagccgattgatgaaatagatgcagcttccattcaccccaccatctgtcaaagtttttgcttctaaatcctgccaactcaatattatcaatgctgcccagagggggtcttggtaggttaagtagccgatccatcattagagtggatgtgatttgtcctcggcattgaatcttgtcggcaaagaataagccgattgggagttggcccaatccaagttgtctggccgagctcattgggtgataaaactcgtaggagacttggatgtttctcccttggtgaatgccgacggggaggatgcataggctgattgtagctataagaacttctctggatttttggaatttttcatgattaatgtcttcaaatctaaagtccgatggaagttcaaggtctgctgagtcttcatagggaaaccagattcgtgcatctttcttaaaaccttcataggagctgcagaaccaattcttaagtagctcagccgatagcttcgctccagcatcggttggtgtggatgcatattctccatatgacatgcatctgcgatgggtgcgctcttctccatcgtctcctgcaatcggctctggcagtgggaattcagcttctgtcatagagggccgattgacaaccttcatgactatcaggactaaccaggtttgcagcagccaccatggtccgcctgctccaactattgagccgacggctattttagccgatgcgttgttcaatgtttggtacagatagccgagatggattttgcccaaaggaaattctttctttgattctaaggcttcagctacaaattgcctgttggttgtagggccacaactagatccatagaaggggaacttttctaaccacatgagcaagaaagctacatgttcccgaggggtaacagacccttggcccatatatgctgccacatagccagactagccacctatgcttttggtcttgaagtcaaattggttcttggtgttcatactcatagggttagccaatgaagttacatctaatccagtaatcatggtgatgtcgattaaagttggagtcatcggcccttggttgaataagaaagcattgatggtgttggaccaaaagtaggtggcggtagccatcagaggttcatccttagcagaattggctatggtgagagcaagcgcttggccgattccaatctcatcccagtgaactttcttactagacgatacgcgttggtaccaggtggtccagcttttatcaggtgtgggtttttcgagagatggccaagacttgaaggtattcttccagtgacccaggttagggttggctagtctaaaggggatccggttggtttcaccaatgatgaaatcagtggggtcgaggttgccgattgggccaagaaaatagtggattttgtgcgaaaggctgggaatcgcgactaggttgaagagatgctacaaatccaaaacaacagagaaaaagagagcaatgtaagataagagaaaatcgatctgctgctaagaaaggggatcaagccgacgggaacttacctcagcatactcggctgaaggcgcatcagatgggttggtgcaggacgacatcgctgcaggcggaaatctcgccgaagatgaagtcacctggaagtcgcttttgcgtcggaggaatcgctggagagagagaagacaaagtttcgcttgagcggtgaaaacggaagtcacggtgtgagatttctcgagggtgacgtttaatatttaaagcatggcagtaacggtcggaaaacggcaaagtgcgaacttactcggggtcgatttacagcaaatccgaaacattaccaaatattccggacttggggggcatgtgttaacaaccaaatttggtaatatcggcatcgggaaagaatattagatcgaagcaaagtcggaggcggagattgagttcagaaacagagcaggaatcggctggagtccagatcggctacgattaggatcggctgggtctgagtcggactaggtaagctgatacaaccgattccgataatgcaacttgatgtatgatattgggttgaattaaggcgcttcaagatgattgccgcacatggatagagtcttgagaagtcaattgtatctattaattaggatattttatgtaatttccttagagatatgcttgggcaaaagtctgccgtaaagacttatggtatcttagagtttgttaaagatattagtcgtgtccgttatgggcatatcttgtaattctcgggtataaatagacccgagccctatgtaacttttaacacacacgttcaatacaatttcggcgcatcgccaccctttttgctttagttttatttcgacgagttcttgctttcgggttgagctgcatcggtttcgatcttcaacaaaaggtaaaacttgttatgacgacttgtgttctcgggattagtgcttccatctttgtgatactctgatctcgtttatgtaattcgtcgaactatcatatatcttacataatctctggcaataccactatctaatctacaatcggctaacatctgtcggtagaggacagccgattaggttagatttcgatgttgacgtagattatataagatatctaccactctatgaaacttccagcagcttgattgtctagatattgttcttcttttcatacttaatgctgtatcagttgagtttgatctattaagtcgtgcttaaaaaatcaacctctagcctgccttctagttgctgattagggtagcatcagagtttcagccgatcttatctgatttaactatatttactctatatgctttattgacatgttaaatctgccctttattttaagatcttattgcatttaagtatattaggcctttatttgatatattctacttgctttaatatcttagtatagagtggtatcggagtattagccgatacatgctagatctatatgatcggctatgctatgaacatatgtagtcccattattaatatatatttcgatttaagtgatttatactgtctcggcatggcgtccgatctatcccaatcacttgatttaagtatatatcgatacaaggagtatatattgtgaatacctacagccgatcgagtagatttagttccttcttgtttattcatgactgccgatcgatacatatatgacatcggctcaaagataaatgatatgtcatcggcacctagccgatcgactatcatttatagatttaaccgcggtttctttgcttctattttttgttgattacaggatcaaatcaactggcacgctcatacattcgaaggcgagctttggacctgcactagagttaagcagatctcccaggtcacgtgttttctgtcaacacaccagcccttgaggtttgctgccaacccgtagaagtcactcatgctctccaccccgccacctcgcgaggagcaacacatctagcatcctggctcagaggagctcgttagcaccatccccaccaacttccacaccgtgcacggtcgaggaggat

SEQ ID NO: 7547 - DNA, 3258 bp, Oryza sativa
aagaatttgaggaaattggaagacatacccatagtctgcgagtatccagaagtgttccccgaagaccttactaccatgccacccaagagagagattgaattccgaattgacttggcaccgggaaccgctccaatttacaaaagaccgtacagaatggcggccaacgaactagcagaggtcaagaagcaggttgatgagcagctgcagaaagggtacattcgaccaagtacttcaccttggggtgctccggtcatttttgtggagaaaaaggataagacgaagaggatgtgcgttgattatcgcgcacttaacgaggtcacaatcaagaacaaatatcccttgccgcgaatcgatgatttgtttgatcaactgaaaggagctaaagtgttttctaagatagacctgcgatcaggctaccaccagttgaggattcgggaagaggatattccaaagacggccttcaccacccggtacgggctatatgagtgcacggttatgtctttcggacttaccaacgcacctgcattcttcatgaatctgatgaacaaagtgttcatggaatttctggacaagtttgttgtggtattcatcgacgacatacttatctattcaaagtccgaagaagaacatgagcaacatctccgtctggtactcgagaagttgaaggagcaccagctatatgccaagttcagcaagtgtgacttctggttgacggaagtcaaatttttgggccatgtcattacagctcagggtgtggcagttgacccatcgaacgtagagtcagttaccaaatggaccccaccgaagaccgtgtcgtagattcgaagttttcttggacttgcaggttattaccgccgattcatcgaaaacttctccaggatcgcccgacccatgactcaattgcttaagaaagatgagaagtttaaatggacagctgagtgcggtaagagttttgaggagctcaaaaagaagttagtatccgcaccagttttgattctgcccgaccagatgaaagacttccaagtctattgcgatgcatcccgccacggacttggatgtgtcctaatgcaggagggcagagtggttgcgtatgcctcgcggcagttgcgtccacacgaagggaattatccaactcatgacctggaattggcagcagtggttcatgctttgaagatctggaggcactatctgattggcaaccgctgcgaagtatatacggaccataagagtctgaaatacatcttcacccaaccggacctaaatctccgacaacgaagatggttggaactaatcaaagactatgacatgagcattcactaccacccgggtgaagccaacgtggtggcagatgcattaagcaggaaaagttactgcactgccctatgcatcgagggcatgtgtgaggaattgcggcaggagtttgagcatctcaacgtaggaattgttgaacacaggttcgtagccgctttggaggcacggcctacgctcgtggatcaagttagagccgctcaagtgaatgatgccgaaatagcagagctaaaaaagaacatgagagtcggaaaggctcggaatttccttgaggatgaacacggcacaatctggttgggagaaagattgtgtgtacctgacgacaaggaactgaaggatctgatactcaccgaggctcatcagacccagtactccattcatccaggcagcaccaaaatgtatcaagacctcaaagaaaagttttggttggtcagcatgaggagagaaatagctgaattcgtcgcactctacgatgtttgccaacgagtgaaggcagggcaccaaagaccagcaggtctactccaacctcttcaaatcccggaatggaaatgggaggagattggaatggactttataacaggactgccccggacatcgtcgggtcatgattccatctgggtagtcgtggatcgacttactaaggttgctcacttcataccagtacataccacgtatacgggcaaaaggttggtggagctttacctttcgagaatcatgtgtctacatggagtacccaaaaagattgtatctgatcgagggagtcagttcacctcaaaattctggcagaagctgcaggaagaattggggacccatttaaattttagcacggcctatcacccgcaaactgatggtcagaccgagcgagtcaatcaaatcctggaagatatgttgagagcttgcgctctcgattttggtggagcttgggacaaaaacttgccatatgcggaattctcgtacaacaacagctaccaggccagtctacagatggcaccgtttgaagctttatacggccggaagtgccgcacacctctcttctgggatcagacaggcgagcgtcaactgttcgggacagaggtattaacggaagcggaagagaaagtcagaatcatcagggaaaggttgaggattgcccagtctcgacagaagagctacgcggataaccgccgaagggagctcacttttgaggcaggagattacgtgtatcttcgtgtcactccgctccggggagtacaccgttttcagacgaaaggcaagttggcaccatgcttcgtgggaccctacaaaatcttggaacgaaggggagaagttgcttatcagttagaacttccatccaatatgatcggcatccatgacgtgttccacgtgtcccaattaaagaagtgcttaagggtacttgaagaacaggctgattcggaacacattgatatccaggaggatctaacatatgtggagaagccggttcgtatacttgataccagcgaaagaagaaccagaaacaaggtcaccaggttttgccgagttcagtggagtcaccattcagaagaggaagcaacctgggaaagggaagatgagttgaaagccgcccatccgcacctcttcgccagctcctccgaatctcggggccgagattccgtataaggggggtaggtttgtcacaccccgaagttctcctcctaagccaaaaatttaatttataagcgaccctaagaaaataccagtgcaaagcaagagtaaacccttttaaatcaatgcgaataataatcggaattggcatgtggaatttttcttgagttctacatgtcgaaattcgctaacaggatttttagtggaatttttcagagccctagaaataattttaaccagttaaaattgagcaagcaatattttaattccaggaaatccttttctcctttttctttttctttttccctccctttttcgaatggggcg

SEQ ID NO: 7548 - DNA, 22638 bp, Oryza sativa
tctcccactggctggagggcccacgcgcatgcaggagaaaaggcggagccgtggcaatcggtaattggggcgcgcgatgtcgagattgatcccaaggcatgcgtgggtagtagcggcgcggatcatccgtggaaaaggtggacttgttgtggcggacatgttgtggctagctacatgtcagtgatatgaggctttttctttggagtggaggaacaacggatggcccagattttatctgagctagtgttttgccctaagagcatttgtgacattgtcttagttaggggatttcagccacattggacaataataaggggtggatgcttggtgagaggtctccctttgagtcgcctatacaccttggtgtgagagagccttcatagctttcgtgtgtgattttaaattcaaatccaatgtgaagatgtattttttagtgtgttagtctcacggcagcgactactcatacgtctactgtagacaatccgacaatagaggagaacctggtgaagcatcgagttcgacctaagcgtatcaagtgggccaatgtcagaatcgctaggccggaatggatcatgggctgatgtattcgcgcggctatataagcgcagtaggtggaagggaaaagaggtcgaatgaattgtattctgaactatctcctaaactgaatacttcttccccttccccaagtctgaatatctctctctctctctgtctggttcttcccctgttcgactctgttctatcttcttcctctcaaactttccagaaatcaacagagttcgtaacagttagctccactcttttgtaatgatatgatttgaatttattttatgtaatttaaattcctgtatttacttcatgcaatttaaattccgcatgagttttgcctctcctattaatttctgtggagtgtgtttctactctctctctccaattcttcgatctcgtattcctagcgaggaacgtagaggcaaccttatatagccctcgagctatttgagagggagttcaatttgagaggttgaactcctcatctgagtagggttctttgtagctttttttaacctcctcctagatctagctttccacataactatgatcttaaggaaatgtttgatagaaattttaaacgagtattatgggggaagaattttgggacaattttgttcttgccccaactttgattgccaatattgattttgcccctgttttttagggttttcgtttttaccctaattttttaaatgaatcaaccgtttgcccctgttccgttaattcttgctaacggtgttaaatgtggagggtaaaaagacaagtaaaccattagatattttcccgtacttttgatataatcaaaatacaaatctattgatgccatactatagcagtaatttaatttgtcaaaaaattgtgaaagtttgccaaaatttgggtcaaatttgaaagtggtgtacaaaagtaccggaaaatatctaagggtatacttatcctttctaccccgcaatgaacaccgttagcaagaattaacagaatagaggtaaacggctgtttcgtttaaaaaaaaagtagggataaaaacgaaaacctaaaatataggggcaaaatcaatattgaaaatcgaagtagagacaagaacgaaattgccccaacaatttttgtacgctttattcatgcccacactagagcgggtagaggtcctaaaaaacagccgactttttctggacttacatagttacatatggatggatgtgcggtagccttctgagcggtggaagatatctcagagaattaacccaagcctttcgagagtaataggtttttttatctacaagccaaggtgcatctaagagatcagctctacctaaatctgaaataacaagtatgtgtacctttggttgaggatttatattgctcctccttattactgtctctatttctaaatcactactataaaaaaacatttttgcaaacgggccaaagcgatttttccaggtggccatccactccgcatgaacttcaaagcatgcgaaaatacacgatttttgtaggcggacatttgtccctcctgcaaaaatgattttagcaggcggcatctccatattcgtaggcactatagccacctgcttgcgaaaatgttttcggagaaaaaaaaagccaccacccacccgctgctgccctctccccctctggccatgccaccgccttcgccccctccgccagatctgtgagggagacaaagagggagtgggggagggagggtaggggaatcgcaccaccgtcgacttccatgacgacgaagaagacgaccatgacgacgaggaagatgaccacacccgtcacctgatccgccgcacccgcacgtcgccatccaggaactgccaccccgcccgtcaccatctccagctgccgaggtagagtagagctgaggagaggagagggacgggagctacaccgcccctcccctccggccacgctgatcccctcccctcggttcgcgccaccaccgacgcccctccccttcggccgagccgccgctgacgccgctcctcgtcaccaataccaccacccacacctccccttcggccatgttgccgccattgcccctcctctccgcccgcgccgctgcaaacgcccctcccctctgcctgcgacaccgttgacgcccctcccgtccacccgagctgccaccgacgccgctcctcgttgccgataccccgactacccacaccgctcctcctcggagccaccgctgacgatgccgcccctgccctctgagccgtgcgtgagagagaagaaaggtcgagaggataaggataaggatggtggagagaaaagagtagtggatggtggaggaaaggataagatgggacgcaatattatttttggtgagctgcaggcacgattttcatagacggaggacaatctcagccccattgtcaatttcgtaggtggccatttacttccaagatgcctatccgcctagaaaaaatatatattatcgtctgaaaattggtttttctagtagtgaatatttgatattggttagttcaaaattgaaaatgtagggctgccacgataccctttgcaggaggactatgttcccgattatttcatttttcgtgatctacttttttgtttggagaaaaggtaatggaaacaaatctgatgtttatatacacagaagtgcttgtacaaaatcgaaagatacatcattaatacttaaactacagatctcataacaaagagaagaaaaacaaaaccaaaactacttgactaagcatcaaaactacattcgttctgtcctgctttcacaaaacaacactgaagtgatcttgatagattttccgaatggatccacatgtcctgacacatattaccttcgcccaccgacgctctctagcagaggcagagaagaagaggccctgccaataccatttgcgttccacgaatggatcctgcacaaacacctcatatcccgtggcacttaagcctccgatctaacatagttccttaaccattgtcaacacctccaaaaagcctttcgtccactcctcgccgtcctcacatgaacgctagctgtatctagccattagaccgaatccagtctccacggttgccgctagcaccgtcactgagcttattgttatcctaccaaagcccctccttgttgtcctaccagatctagcaatgatctggcagccagcacacctagggccctcgccgctgaccatcgtcaccgtcgtccacaccacaacgttgaaatgtacaggctgccacgttgaggaagccgcccctccaaccggagttgatgccgtcttccgccttcaattatctcgtgccacccctccagtcagaaccggtgccatagcccctgccaatgccgtctaaccaccgcctccatcgcagcctcaccaccctgccaaccaaagccgaacgcccgcctccaacgtcgttgtgcccccaccacttggagccaaggtaaagaatcaccactagcggctagcaaaggtgaatggcgagacaaaggggagagatgaccatccgtccaaccgcctgccaccataataaacaggtgctgccggccagcctatgtcggcgtgccaccaccaaactcaagcgtgtgtcatagtgaatgtggatctagaagagagagtgataaggacacggctatggtgcccggatttgtcccaatctttcacagtaaccaaaagatagcaaataatacagaccattgactagataaattgagcagcaattaattttcaaataaactagcagaaccaaatagccactccataaaatatagtgacaaaatagttgtgcaaatctcgcaaatatactccacccatgcggcaagggagtcacacgatcagagaacgaatacttctgtagaaatcaaagatgtgcccaagaaattgattcccgagcacactcctgttggttgattttgtggacttgtggcgataaaaattaggagatgggctaaaccaccggtttccttatcctaacaagaaacaaactaagagataaatctgttttgtgtgatcggtacaaaatagactcgaattttagattgagatagacccccgagccccaccagtgtcacctataaaaggaaagagaaggagggaggcaggtgacgacttatctcactctaacctcaaaccctaaattaatcacccgatcgatcaaggcactggaaggggttcatgaggtatctcacaacagaagaaacaatgaagaagaaagaagaagagcaatggcttcatctcaggtcagttagatcaattaattttcgcataagcagaaggtgaccatgtttaggctaagactcaattatttaattggaataaattccaacattgtggtatcagagcctaatcttagccttcttgttaacagtgaaatttggtaagcccggagtagtcatcgacttagagtcagcatcggcttcgaagtcttgagattagccgatgagagttgtcaagtcatcagttgtcggattcttgctatattcggttaaggaaattgatctactagatgaagcttatctagaagagaccgagttcaaagagaatgtggcatggcaagttatctattaattaggaatagtttgttagtttccttttatctttaggaaagtgtgtttagtgtcctataaggattttatcttttccttttatctttaggaaagtttctttcttgtccgatgaggacttgtatcaacccatgggtataaatatgtacacctaggatctgtgtaatttatcgctacgatcaatacaatttgacgcatcgccaccctttttacttctacttttgtttttacgttccggcggaacttggcacccgatgcagggctgcatcgtcttcgatctctggcgaagggataagtccaatgttccgccggcccaggcaattgtatcgtctacatcggcgtagttcaaggctgcatcagtacattcgacctcttggattgctttggtttggatgatatacttgcctacctatttatcatatgtctatgttaatctagtcttagcatatcaatttagctctatcggctgcttctcgttttagggtttctgccggtatcggctaaatctcatatgtctctgttaatcttgtcagttgcaggatcaaactgactggcacgcccgcatctcatcaatctttgaacctgcacaggagctaagcagatctcccaggccggtgtgttcgattttttcatcaacacttctttatcccatcatccctaagtgaagccattatgccaattaaaccctaatttctattcggcatgcatgatgcgattttgagttaattagattagattaatccctttgccttggttgcataagcgaagccctgttatactgctgatctcggccaactgctgatctcggccaacagtagaagaagcaaaattattgaagagtttaattttgttgatttttatgagaagaagaggattgggataaacaagattgaaattcccaattcaaacactaagaattcctagaccgatgctaaggtttcggctagcactcagcaaacaagaaaggggataaactagattgaaattccccattatcaagcaaaagggaataaacaagattgaaatttcccgaaatccccaataagccggatccaattggcctaaaatccccaaatgaggaagcctaatttttgggggaagaaccctaagtcacaaatatccgaattaaatgcaaattcaagtcaaaattaggtttgagtttgggttacttatcggatttagaccccctaagattgccggcgcacaccggcctcctcggggcagtgccggttgaccgccgtgcgcgcaccaccttggagctcgtctctccaccgtccctcgccggggacgggaaacgtcggcttggcagctgccttcgtgctcttgccccaccccgatgaggtccggccgcatcgccgccgcctcgccggactgccgacgccttggcacaacggcttggcgccgccctcgggggcgccccccagccggctgagatggagccgctgcggcacttgtcgccacacgcgtgcgccgcctcgtcggaccgccgtcgcaacatcgccgccgattcgctcgctcgctcgccggacgccgaatcgggaatagaaggggataagaatgagctagggttaggtctcacacccattcccccctggcgagcgatttcttcagtgcgggcgaaatcttggccgtccgtttgatcagatggccgccctcgctcccgcatcgggccgtcgccgtcatgggccaagctgatctgggccacgtccgccaaagcgccgagcgcgcacataaatgggccggtccattttgggccagcttttcgataagagtgggcctttattttttatttattaagcccatgattttaattcctcagaatgtgttatatctttattagctaaattttagcccgattttagccttttttttatgggccggcttaggaagtgatgagccgtattattattttaagcccgccatttatgttttatgtatttccagaaatttatttatgacctttcttagccattaaaaattgctggaaaattatggtcaattatttgatcactcagaaaattatttctagttaaatggaaccaacaggaagtttagctagaaagaaattaatgatatgatattatatttgaccaatgttaatatgatttcatgtcaatatttattaagattattatttccttaagccacttaatttattcctagttgaatagaaatttaactagaaagtatttatgatttcatgtcaacatcattatgatggtcagtgccttagtaacttaattatttatagtcgaatggaaccaacgagaaattcgagtagaaagcattaagatctgaagttatatttaacccacgtttttataattgcatgtcaattataatttttttattccttagttattttctaccaaatggtgatataattaaggaataaattttaagattattcataattatttatgaccaatggtgttttgactatgaaattctaagtttattttgcatatgattgactaagccaaggtgaattaattatatgcaattggcaatgtttattatttaagatcagttgcaatacttggtaaatatttctagattaatggaaccaacagaatgtttatctagaaagaaaaaatatttcattaagatagtaatttccttaattattttttgcccaacggtgatgtaattaagggaagaaatctaagtattgtcaatcgttattttaattttctctgtcattttggccttaacggtgattagacttagaattttatttatgccattagtgcattaattcctttgtcacttctaccttatggtgatgtgatcaaggatctaatctatcagtaagcttaattcctttaccatttctgcccaacggtgatatggctaaggattttaattttaattctatggcatcactaatggcgtcatttcctatatcatttctaccgtatggtgatttgatttgggattttaaattatttacattatcacttctaacctttggtgatgtgacttaagacattaatgtttattccctaatcagttctgcccaacggtgatttgatttttggattataagtaatttcatttaatgattctttcgccttgtctcttcccaacggtgagacaaagcgaaataaagattaagctatcgttattgtgtaagtgattgtaataatgtacatcatttgcacaagcaaccacaataatagtgccacttaatattttagcaataaataatgttgtttatcagttaaagtctatggaattattattatttttcctcattgacttaactgagcctaaggcctacttgagtatgacttggcattgacaaaggattccttatggctcccgtagctaatgtcactaatttttttttctaaactcaagaggcatctttagcctgggagtaggccaatataatgttatgtttcgcatatcactcataaacattaagattatcatccctgttggtgttaggggagaattttgagcatgactttgcaaaactgtatctagcaaacgttgagatgaacttttagaagtttgtgaaaactaatgcttagtacaattttagtgcctatgcacatttgccgccataatttaaaaggtagcacaagaaataaatcataaggcgtgcaaacttagtgggatggacatcgaacatttcatatgcgccacttgtccatttcatattatttttctcccattagactacggtcattttcagttatgtaatactaagacaaagtggaccataattgacttggttcatcattccccaaatcaataaaaaatatagaagattaagaggcaaaataagtaagatcctattaatcttgtcatttgatggcaaagatgaagctttactaaggggttgtagcaactctaaatttaataataataaagctcactttcctcgcaaggggaaataaaattgcctctatgtcctatgtatgctactcttgaaattttcttgtgtaagttctttgcaagtaatagggacatgcttaatgtcctgattcaacaaactagttaaataagaagattaaaggcattattttgggttgaatcattatgagacgttgtcgaaattatggccttatttttcggccacatttctaggggagaatatacgtctcattaaggtcgagacacttcacccttagaaatttttgacatctatcattacttagatgataattcgctaagtaaagctaaagtaaaatcaagtgattcaagttcataaggtattatgcttccattacataaataataagagaagattattctacctcatttatgactcatagctccattatgtggatgctagaattttgtatctcttaatttgtgacttgcacaattaaatatacataacatagcttgagggttttgttatggaaagaaaagtcacatatagggtgcagacttaagaaatccatttgtggacttaatcaagcattgatgatgatttaaattccgctgcatcattagtgaactaagcttaaataagaatcaggagaataactattctataatgatggaagtaagacgccattgggagtgtgtcattgtcgcttatgtcacataactaggggagtttggaacgtctcatgagatagagatattcttttccttagattttaatggcgttgtttagctttaagttaaaatttcactaagtcaagaaattagccaacaaatgatcatttaaggctaggtttacccataagcgacctccgatttcctttaagaaatttaagacactaatgctaaaatcaaatgaagttatgagatcggattatggtggtaaatactaaataaagtttgttcaccttataagacattaaaaataagcgttcatccaaatggttttcgaaccatgtaagaataaattgagatggatgaacaaaataagacattaaagtgttcatctaaatggttttcgaaccatataagaataattgagattgatgaacaaaataaagaatttagtagaagtttctgaatgagtcaaaatattcggccatttaagtgggttaataagattaagcctgactctaatggaaatttcgaacaattcaagtgaggtggacaggtgcatgaaaattaaaggtggaaaatttcattcaccggtactccatactaatgatattttattgttaagcaatgcatattgctgttagaaactaaggaaatttttccatgaattattttggtctgaaggagcactgggcttatatcagtaagtcatacattgacataaagaaataatttgagagaattcagttaaagttagtcaagttgaaattaaattataaagataatcatttatgattcagctgacagaagcttgagattagctcaaatctggatgcctacagatttggcaaacatttttactgggaatcttggcagtatttaattaaatccagagtagaccactggtattaagaatgttcacaaggcaatcttatgtaacatgctcatgtttctaaagtccaatgatctcagaagtttagagacatttggacacttattttgtgagatgtgtggatatttataaagattattcagattaagctatgtccacacataggggagcaatgaccatgtaaaagctccaaaaatagtctcttactgcatagtcgatgatgcagttagattttaaagcatgttatgattaatcatatatataagaatatttcccagaactaagagtggtaaatagcgctcataaaccactcaaaaggtgtaaaccactcaattatactgtgttatatgttgtgcactaattgaacacagttttctattttagtagcaacatgttgtgtgttttctgctaatacattgatatagttgtgaaacatatgtcctaggatcgaattattattaatctaagcttttgcttatggatgcatactctaaaggctcataaagttaagattaattaagatatgttctagccagtacatgtgtaaataagagcctcactaagatcctggatgagggggacttaatttttcaatcaacacccactaagttaagcttgagtttatttgagttctatagtgagatataggtcttgttgtctcggtgacgcataatgttgttgaagacacattgccttggggagctattttatttaatagactcataagtaagtctcgaaatcaaggggagaatgttggttgattttgtcgacttgtatcgataaagattaggagaggggctaaaccaccggtttccttatcctaacaagaaacaaactacgagataaatctgttttgtgtgatcaaaatagactcgaattttagattgagatagacccccgagccccaccagtgtcacctataaaaggaaagagaaggagggaggcaggtgacgacttatctctctctaacctcaaaccctaaattaatcgcccgatcgatcaaggcactggaaggggctcgtgaggtatctcacaatagaagaaacaatgaagaagaaagaagaagagcaatggcttcatctcagatcagttagattaattaattttcgcataagcagaaggtgatcatgtttaggctaagactcaattatttaattggaataaattccaacaactcctccaaaccagcacttggccggtggcttcaatagatcatggtcgatggattcaccattaaccagctcagcagggatgataaccctagatgcgaaaacttcgacaaaagatcaacctctccaaaaagttgtcttcggcttggtgaagtgtcacgcccggaatttctatccaaaattccaaactcttacatgtgtgtgaaccctcgtccaggaatcagccgaggcacacaataacaaattgataatagagtacaattattactctaattaataagcgaataaaatgtcattacagaggtagatagttcctatcaatcaataaaaatctaagcagcggaagaataagataaacggcgcagacgactccactccacaggcagcttgaccaaggctacacctaatcctccacaccatcagcatcactgtagaactcctcctctgatgaatgattgcaaggtgagtatatgacatactcagcaagccacgcagcaaatatgcaagtgcacaggataacaaaggatggcatagtagggtttcatttgcataaacaacatttaatgaacatttcagaatttaataaaacagttaagtaataattaaacaatattaatccaacgctatacaacataccttgttgcataggcccaaccattctgaacaaccatcccggctgcacagttctatctccaaaccaggaatatgccattccaaaccaggagctaatcaaattattaccagttatagcatcttttactatggtgagaggtgtgaaactaatcacgaaagacattgttagacccgcccataaccgcgggcacggctattcgaatagttttactctggccagaggtgtaccactgtacccacaagacacagccccacaacatgtcaccatgcgcctcaataccaccacggtacctcagaaaggagctgtgacagtacccctcgcacaacacaatccaccacagcgcaccgttcctggatcataatcacccccttataaacaaggcatggactccccagtgacccccgtgggcttatctccgccacttctcagtctggtgccccgcaatgaaccatgctatacaaaaggtaaagccgttgcccacgctggcttgtggttggcacggttaatgtttcacaaccgaaactcgtgaaccggtccttaatcatcatgagcacgaccatcaaaaccatgtgctcacaacccaccattatcaagttttagttggcaatttaattaattaaccaatcacgattgaccatcgtgaactatcattaagccatcattaaataatagtaatttataagttatcccaatagtgtgctaatgtttctaagcatggctaagcaatcatatctaatatctagctgaaccaatatataaagctcaactagtcaagttataataacccaaggtatcaaggaataaagtaatcaagaacaaaagggctataacaaacaataggttaattccacccaatgacattcgaaaataaatgcaatagttgaatagaaacaatagctttaaacgagatcaacatgctcaagggttgtttgggatctgtgtgacttgccttgctggccttggaactcttcaaattcttctcctgcaaaaacggactctctggaaacatcggaatctaaacagaaaggagcaaaacaccaaaacaacacataaacaagcatgaacagtacatgtggatatttttaacatgtagatctcaattttagaaaaaaatagagacttgaaccaactaaatccgagctaagatgaattagttatgaattttcaaagattaaatcggattaaaacacttatatggattttaattgaattatgacgcaataatcaattatttttgaaaaggaaaaaggggtttattgcgtcagcggctagggttcgcggtgaaccgggtgcacggcggcggctcacggaaacgaacggccgagatcgattcatccaaaacggacggccaagatccatcggtccacgaccgggccacgggaaacgacgacgatgacgtcagcgggaccaccggcggcggctcgggcgcgcaaggttgccggcgaacgacggcgcgacgacgcgaacggaggacaccaacacgtagagggcgacgcggcgaactcaccggtgaccaaagcaacggcggaagatcaacggatggtgacagcgtcgaggaagaagcggcggcgaccttcggcttgacgacggcgacggtgttccagcggcccacagtgacgacggaggggcagacgaggtcggcgacggcttggcgatcacgacggtggctttcccgagcggcaacgacaaccggagcgacggcgacgcacggttggagctgcggcggcgacggcggcgcgaagctacacggggctagggcgctacgggcggcgacggacgaagacgagggtggcgacgggtagcggcgggcttgggggtccttttataggggttggaaggcggcggcgaaggcccacggcgaccggcgacgagaaggaaagtttagggttcagaggagagagacgaatccgattcgagatcgaatccacggatttccaaacgaaattagccgacgattccaaaagagaaaagatagaggggatcccggggatcatttcccctctattaatttcaccggaaacggaaaggggcggctggatttggaaggagacgacggcggcgcggcgctagggttcggccgggcgatggcgcgaggaagacaacggccctgacaggtgggccccacctgtcagcgggcagacgcgcgcgcgcgagctcggctgcgggccggattgggccaggagagagagaaggttccaaaagagaactttaaaaccttttccaatttaaattattcatgaaatgcaattccatttattaaaaatacttccttagctcaaataaatcccagaaaaatctaggaattatagaattaagcaaagtatttaatgaaattttatctggccccattttatattgaaatttattaattaaaactagatcttctcttctaggcttttaaaataaattctaataattccaatttagacaacaatttaaatatttgggatttttagtgtgtgacatgaagtgactggaatagatatactggattgggacaccaccatttttaatttctggcctttctggtatatcctccttcttcctctcgtgccctgtagaaccaattataagtcccttgcattcaaccctatggttccgattcacttgaataggatttgttccaactaactaggctctaaaaaaaatatcttatatattagaaggcatcttggtcccatcactctatccacctcgaagcaaagccgtcctcggctttcatgtaattttggaaacctcttgttgagattataaacacataatgatttaatttattccataaataaatcataatattgcagatgcaaactagcatgaacgtatcattggatctacacatgtacactaggcagtaaaacataaacagatcaaatatacgtaccatattgaacacgtaccgaggttgccgaaaaatcggttgctcagcaggaattactcgtggttgtgggcgttgacgaaggcgtgcaacacgcgagcgaagaggaagacgagccgtcgtggacgaacagggagcagtcgtgcgaagcgctttcaaaaacattattgccgcctctcccggtgcagaaagtcgaaggcagaggttctggagaactgctctcccgatcgccggtgcacgccggcgagcaggatggagtagtatacgagcgacggcgcagcacagagtaggaggcaaaccctggatgatttcgcgtgtgttgcgtggaagcggcggctcggtttatatagagaaaggttgctttatcagggcgcccgcatgatctctactccgcgtcgcttaatcagggtgcccgcacgatctccactccgcgtaactgaaccagatacactccgcgtaaccgaaccagataagtcgcgcataacttatccagatgccacgccgtttttcacgcaatggatttttcggtatgtttccaaaacaaacaaatctgaatttcccacagcaaaacaaaactgcaaaaggaggctgcatctgcgacaattcgacacgtacgtcgtgcacgcgcatcgccggcctagcccggcgagcaagcgcgcgtctgtccccctcttctctccacctcacatgcttcaagtggctaggagggcatcctcccttttaaggaggtctccctctcttagaataactccccatgcatgtcatcctatgaggtggtcttttgtgattttccaaagaattaatctttaagtgggctaagacccatctattaattccaacacctctttctttttcttcatagcaacaaacacatcagcctcaatagcactcctcgtcatcagtttcagcacatgttgcaccgccttgtgcacaaaagaataattattggactgaccaccatgtgtagcatcaagatcaaactgccatagtctacccaacaataaatgacatgcactcaatggcgcgacgtcagagtccactttatccacatactttccgatagaaaattttactctcaccttgtgagtaattttcagtataccactctgattcatccattgaatataacatggtgttggaagcctccggattggcaaagcaccaaatctaaactaacaacatttgtaaaacttccaccatcaattttaatttgcataccttctcacgaataatacattgcgactgaaaaatattggagcgttgtcccttcacaccattaacagtatagcttctacttcttgagccatcatggataaaccgtttttactcacctgtaactattggcttatagttaggatatgcgtaggttacgatagcataaatcaaaattttctaccgtgtaaaccaggaaccacatgcaagtataagatcatagatcgttaccactcgacgcgctgcatagcggaagaaagcgctaagaaggcaaagccaccctcgcgatgtagcgcgtgccgatatagaggaagtgctcgattgcaccggctcgaccttctcctcctcgtgcgttctcctcgtcgtgctcccacgccgatcagcaccgcaaagcagcagcgcctctaccggtattcacacgtacaaggacggaacaccatgcatagatgtgctagcacccgcgcgcggctagggttttgctcgggagggaagtgacggctagggtttctcgcatgatgcaataactccgccggtcacacccctcataaatatataggatccacgactcaggcctccaaggcctataggactcctattcagatccctatctgaactaaggtcatattggatctccatccaatccccttattctggcccattaagcgtgccaccttgtaggttcatgtacactcggctgtaacccgaaaactcattttcggtccacgtgtcaacagcggcccctagcagaacttattgaccaaccggacatacataaagatcatatcggctgaacctctagtatatacttgtataaacccctttgcctcacgatatcgattaagctcgaggctagatatgtgccatcctataatagctcaatcattcactcgaacttgtgatagattataaaacctgtgattgactcctcaatcacctttagcatggccatgcactttcataatctataatatcgaggggcccaaatatctctccataggaggggcaaatcccatattcttgattaattattcatatcccactacatgtttcattgcatacccgaaaactgttttataactacccaattacgaagtagtgtttagcagtccctaagcaagctactacacatcatagcaatccaaaattaagctaaggctaatctacaccgcacactttactctggagtcctggactcttttgtagttccccgactccctctccctaatggcagttgcagcttgcagtgccatatccatgtccccctcctatattccgtgctcacctcaacattctcctgggagttatctcctagctcagcaggtggccgccctgctctctctctcccttcctctccagtgggtatgtcctctctatttccttagatttgtggattgggcgtcagccgctggactggtgccgcaggacctcttattgcaaagataactcgtccaaattgcatgttgtagaggaccggaggatggagccactaaaatcgtgtgttgcagaggattaaaaggtgttgctgacgaggtgtacatatatatgtatgcaagccggtgcatatatatatatatatatatatatatatatatatatatatatatatatatatatatatatatatatatatatatatgtaatcttgccttaaattttgctttgagattaatttgaaatattgccttgtgtacacaatgatggaactaatcttcgtttattcatgacaaatacatgctctacacgtgcctaatcttgcatgccatatgtgattagattttgctttgacattaattttgaatcttgcctcccatacacaattatatggaactaatcttcgttagttcacgtttcagaattagttcacggttggaactaacccatacactgcacatgcgggccctagggaattctcaactctctcgttgcaccacgtggcgagcgttttgagggagacatgtggcagactgagagcgtttttagaaagtttaatggaattttagtatataatagatagatagataatagataatagataatagatagatagatagatagataatgtgttatctatttcaaggaacaatgttagataattatgtaaacatagtatgtgatacaatcatctatacgattgcctctaggacatatcacctatagtaacattagtggatgagtcaccaagaggatcatcagagaaagctgtagttaccaatcctggtgcagaagaaacttcagcactgctagcattcatgcattccctttgcactagaggttgatttgacatgccgattaggagaagaaaagtttttactatggaccactttaaacttcccataattattcatagcagcaattcttttgttgttcaagtctgaatactgatctctagctgcaaaaacacatacctctttatttttctttctactaacatctttgcaggacttaacgataatttgcttcgtggcaatagaaagattttcagcaaacataaacctcttcccatcaagttgggtcgcacaaccatgtgcattcagtaactcatctctgataatagatgcactccacgaagaacgtatagcctgcttcttggaagccttaaaatcttcacctacaatagccaacttctcaattggtgaatcatgttgttgacgcagcagcactttcatccccttccacgtcgctgtagatttgttcttcctgtagatttgaccaccactgcaaaacacgaaaagaaaatcgccgctctgcaaaatccaacatctgggagtctttgtagcatcttaattagcggcataaacatagatttcctgctagatcgaggaatagtagctagatcgaggagtctttgtgcatagcaccttcccaatcatagtagctagatcgaggaatagtagctagattgaaaagaaatcctccaacgcacatcttcacaatcatagtagctagatcgagcagtctttgtgcataatagcggcataaacatagatttcttcccgagccaatattcatccatcattgaaaaacagtagaaaaatttctaaatgaagaatgatcaacccaaagctttgatatcaatgtttttttgagcacgatcaggatgctattcacttcttgttcactcaggtctccgccgagtgatatgattttggcggggtcagagtcatctatctgcaaccagacaaccttgccgtggggacgggtttcagcgtcggcctggttctttcttgccgttcgacttctaaggtatgaactcccctgtcgaaggaggccacctatagatggccataaggcccgaggcccgaaggcccggcccatggcacggctttttggcccggcccaagcaccgcacggcttgacttgggtcgggcccgtgccagcctggcccgaccgccgggccgtgtctgggcctcccctccggcacgctgggctggcccggcacggtcaggccggcctggcatgatgggccggcaggccaggcatgccacacaaagtatagggactaaaaataaacatataaatgtcactgtccaaagaatagggaccttaaatagacttattttagctattgatatcacaacccaaagaaaagggaggtaaaatagactttttttagctatatatatgtcacagcccaataggagggaggaaaattagacttattctgaggaaaagcactatgggccatcgtgccttcgggccggcccggcacggccccaggcgtgttgggccgtgcctaggccgtgagtgcggcacgtgggctggcacggcatggcccggtgcgtcggtcgggccgtgtcggctcgacaagccttggcccaggcacgaccgggcctgggccgtgccgtgccgggtggcccacatggcgatctataaggccaccatggtagccgaaggatgggaacccttgacaactaccacaccggctgggctaggcatcttgagcttgaggtagttgtgataagagactgcttcaaacttggtcaaagtgcctcagccgaagatggcgttgtaattgtatgggatgtcaacaatgtcgaagagtatctcttcttctctcttgttttcttgtgtgccgaaggtgactttgaggtgggcttgacccaaaacttgcactacttcgcctccaaaccccctgagcgaggttggtgcttgggacaatgccagtgtcggcaaacccatcttggcatatgttccggcgaagatgacatcagccgaactgcctccataaatcaagatatgccgaacttcaataccaaccatctctgcaccaaccgatcctggtgtgggaaaaggactccttcagcatccttcggtctgaaggatatctgttgcgtcaagtatcttgggaccccttcgcctgccgaaacaatactatgcactgctcgaagttgcatctttttttgtcgtttcgacacttgcgagggggggataagatcttgtgatgacctagatcactcttcactgtgcatcttggcgctgttcagcctgaggtgcttggttgaggaccgcttcgcgcgttgcctcttcagccctggcttgctgctgcctgagctcttgagtgttgccttgctgccgaatgttccggcattgctcggttgtgtgcgaagagtgtccatgaacggcgtagtataggtctttcctgatctttttgcgaaaaggttgttgctggccgcccgcttgctgagcgtcgaactccttgcgaagggcttgcacttcttctcctgccatcactgctttgccagctcgatcagttctaaatttttccatgtcatcggggcatggttcggccttaaaggctgcccttgattcaccggaggggttgagtgaatcagaacgggtgccgaactagtaacttgggcttgaatttgagcttgtgcgtgagcttgcgcggtggccgtctcggctgcggctgttttgtcatattcggcttgtatctcttgccgccgcttggtatctttttcgcctcatgcataaccatcgattatgcgaaagaggtgttcgagcatccttggttccttgcgggcgatcttcctagtgagttcgcccttaagtaggccggtcgaagtagcgttgatgacagaggcttctgttatgtcttgcacttggcaccgtgcttgcgagaagcggcgcacgtattcccttgtcgattctcctggcctctggctaatgccgagaagaccttattgtgttttcggctcctcataagtgcctcgaaagttaagaacaaagacattgcgcaattgctcccatgagtaaatgctactagtaggcaaattaatataccaagatcgagcaatgccatcaagagcgaggtgaattaccttcgcctttgtattctcgtcaccatgggcagcttcgattgtggactcatagatggagaggaactccttcggatccgtttctcccgaataccttgggacatgagggaacttgaactggggtgggatgggatgattcttgatcccccaactcaacggcaaacccttttcgccatccgacttgatcatgacgccttgctgagaaggccagcttagctgcgggtacgggggcgcaaatgaggttgagcagcagctgttgattgatgccccgtgccaaacaccattggctggttttgttggtcagtcggagcagcttgcatcaccatagctgggtcgaacacgacttggttccaaacttgatttggtagtgggaccgctccgtagccagagggcacggcttgtgcgaaggtcatgggtgcttggaccgcggtgcttgggtcgaattgcggcagttggctttgaggcgatgccccttgggcttgacttgtgttaacgaccaaatttcataatctgagtatcaaagatagagatcagatcgaagcagaatctaaatccaagatcttttaggaaacagagcaagaatcggcaagagtccgaatcggctttgatcaggattagtagagtccgagttggacagggttagccgattgagccgaatcctacaatatgacaaagaatacattgtcgggttgagttaataagcttcatgatgattgccacgcatggatagaatcctgagaagacaattgtatctattaattaggatattttacgtaatttccttacagatatgtttgggcaaaagtctgccgcaaagacttatggtatcatagagtttgttagagataagagtcgtgtccgatgtgtacatattttgtaaatctcgcgtataaatagaccccgagccccatgtaatcaaact

SEQ ID NO: 7549 - DNA, 12154 bp, Oryza sativa
ctgccaatgctctcatctatgaaggagtgtgtactgcctgagtcaatcaacataagaatctctgttccttgaacccatccccttaatctaatagatttggatgattctgtacccccacaaagcttgctgagatatagccatcaatcctccatcaattgcctctactgattcaatagggtctttagctgtcaggatgtcatcagaattacactcagagcgcattgcttccaataattcttggacaacatggagctggacagaagtagcacatttatggtctctcccccatctttcaccacagacaaaacaaagacccttagcccttctgtaagacttaagagaagcaaatttgtcctctctggacttagcagattccactccctttttgtcatcatgtgcactaacagctacagatctctgtcctggaggcactggcacataattgttgagttttggtactggcctgaacgcaatgtgattatcagaccttctgtgtgtagtagacttattactttccaggatttcttcttggagcaaggcaattgaacaagctgagtcaaggtcctggggtctctgtagcataactgcacccctgacatcatccctgagcccttcaatgaacttagtaacaaaatacacaggggtgagagcactgtcatatgccattagctggtgcatgatactgtcaaattgttcaacatattcagtgactgtgctgttctgttgcgcatggaaccattttctaattagtgcttcctgtatatctctagtgaatctagcacagatcaagtcacacagagtttgccaagtaatacccataatttgagaacggatcgactgaagccaaaatgctgcattaccactgaaattgagtgtggccaccttgacccaatgcataggattaataccatagatatcaaagtattgctcacaattgctcttccacatctgtgggttctcaccatcaaacttagggcaagtcataggaggaagactagtactcagatcggtgtgatgctagaagaagttggtgattgcacagtagaatccggagaaaatggactaggtgagatgggaggaggattccgcttaccatgcaaccatggagttccttgtgctgaagcatctgcagcggtttcttgtttgatcgcgccaccttccatcagctccaccttgtggcttagtgtctgcacggactcgctgagtttttccaccttctcctccatcttgggaagacaaatctccaccatcttcttcagatcagcgagatcatcccgagtcctcgcctccgcctccattctcttcttctcattctcctcaatagttctcaacaagacatcaagtttactctcctgcgacatcctggaatttgtgagcgaacccaactagatctagaatcccccgctccttcccgaactcagttaaccaagagaaggcaagttgccttattgtggaatctgttctaagaacaattccaatcctccccctggaattttacaaccgcgccaaggaattcttggagcgtagaggctctgataccaattgttaacgaacttgcacaggaaaagcaatccagaatgaacgcacggattagaacacgaaggaattggcaactctattactgagatatttctccgattccgacaggaatggagccaccgccgcctacgccaccatggtcgccaaagacagagttcacctcgtgttctctctctcttatcttcctcacctactcagttctttcccctctcgcacgaagaactattacaggaattagacttaattacacggcccagtcaggcccatagtacttcaggtttatcttgacgggccttgttgcacggcgcaccacttctccttcagctgcttcaagttcatcttccctccttccggaatcagcatcatctccagcgtcttctgcaactgacttagcgccctcggacagtggttgctccttgacacggacgtgactgggattcgacggcgctccgacgacgcggcgctctcccctccggcgaccgtctcctccgctggccaccttctcacttttgagtctctcttccttctcctctcttcttcctatcctacctagggtttggttcttggtccttgtttcttggtttatctccgtctccaactgcaagggctcctcctcatccaccatcaagaacaaggccttgaacatggtgctgcttgtcgattgcgtatgaagaacccaactgctggttgcggctatgcccagctcctcaaatcagatttgagccgattgtgaattggtgatggatttgggttcactgttatgccatttttttacacggtccacacggaagcgagctcaactcggaaatatatctgtctatccactatacatgatttctatatcttcttaaaattcaggcaactcaagattcacatctactatacaattgattctgaaactttgtgcattataatgttcattgcgttatgtctagtagaaggaaaaagaataattggatggtagtagttttgttttcttctctatttctgtgataggtaaactgatgtctactcactgattttccttgcagactccttgaaattgactggtagggatgttccatagaatttctttgatggtagcagtttcgtgatggtgtcatttatagactaattaactatccaatgaagggtattactgatgtgtcattttagggatgttgggagaagtttggattttgttgtgcatttagactaatcaatcatcgaagtcgccacagatggattcaacttgctcagtatcagtgtctactgatgtgtgtgctaaagaaaccagtggccactaattaaccatcgaatgaatgattaattttggataataacactatgcctccaactgaaaatagcttatttcttgatcaggtgtaattgttgacattgtgacatgtcagatcttcaacaatgcctgaatgcagttcattcagccatctttaacaacctttcaagcagttaaatggaatcagaacaatctttttattatatcatataattggaatattacaagcatttcctgtaattttggctggcactacattggcatcaactttcttgatccaggaagttgtaacatgcgtgtatattgttttctagttttctctgaaatggactaatggtacttttgatcttgctcctacgctgccgtcacagggtactagcactactggttttaggtaaatagtggtaaccaaatgtactaatagtagtaatacaagtccagatcataaagagagctagcaatacgctcctatattccctgccaatagctgctatagtccctgtcaaaacgaacacagagtttctaagagagggattggaagaaacaagggatttagtccccacagggtttgagtgaaattggggggattcactcaatccctccctggtttgcttccccttaggatttaatccctagcaaccgaacaaggcctgagggattagaatccatcttccgctttcagcgtgcggttctccaaattgttttatttgcgtactgcagagcttctgagtcagccgtgtcggggagggattatttcaactctaaaagttcattcattacaatgtttatatcctcagtcaaattgctgcagtcgtatgcgtaatgataacatatgcaaatctgacgacgcgaaatctaaaatgcgtgcggtttgaaaggcttgctcgaggtttatccttttgaatatggggagagcaaagtcatcgtctctcactcggtccaaaaccatgtcggacttctgagttctgacttctgtactgcttttatatgcgggctgcggtgagtccccccggctgtaattgtactttgttgtcgttgtttgttcttctcttctcggctgctccggtgctcccgttcccaaatatcattcgcgtattttgcttataaccatagaccatcggttaagagttactaataacttctcatttgcggatggaggagatagaaggtaatttgctggagtcctcgattggatggctggcggataccatagtggagaacctggacaacgacaagtttggcgcgtggattagccaggtcgggctcgccgatgacaccgaaaagctccggtctgaggtcgagagggtggaggtggtggtcggtgctgtcaaggggagggcgatcgcgaacaaaccgctggcccgatcactcggtcgtctaagggaggtgctgtacgacgccgacgacgcggtcgacgagctcgaatactacaggctccagcatcagctccaaggaggtaaagcgtgtacataaaaaatacattgttcttcccttcttcgtaacgcaggacgtcgtacgtactttctctgtttcatattataagaattttttatattacccatatgcctagaatctttaacatccatctatatgaactagcaaggtggcctacgcaattgcgcggatagtatccatacaaaattatttacatatgagtttacttaaaatttgttaaatagcttccttgtatattaggactttaaaagactaaccttatcatctctatttttctaattttatagttttttaaagtcacacttgccgctacctcttgctctttttcacccatttatttgcttgttcgatctactacggcatctattcgtcctcctttgaactttaaaatagaaccttataaattttagacttaatcaactcattggctttcatttttataatttttagaagtcccatcaaacgccgccactctactccacttatgcccgtccgtctccttctctctttatcgtcatttgggttttaaaattcaaatataatgatcgtcggtgttcacttttaactttgtagaagtcccaccaaaccgtcagcagcttagccattatactcctatatggcccgcccgatgtcttcccttttaattgtcattgtgattttaaaattcgaacatgattctcattatggtttatttttttactttcctgctaaccatcgtgtttgtgctgcttaacaggttacccgtcattgggattctatttgtggttttgtttattgtttttacccttgttgtcttccctctttaatatcattgaggtttatttttttactttctagaaatccagccaaccaccgtgatcgtactacttaacggcctatccgtcgtccctccttttgatcgccattgggattctatttgggttttgtttatagtttttagatgtcccatcaactgctgtcacttaattcctttacgactttgttgcttcttccctctttattgttattcgtcattgttgcgttttatagatggatggtgtttattgaaaatttcatattttttattccgatattatattatttataaattatatttatacttgaactcctataattatttttatattttcagaatttaatttgatttttatttcaaattttaattaaacttatgttatttttattttatattttattctgaattctaattaatattgtattaggttcttatatggactcttcatttaatattgcttatttttagtttcgaatttcaattatttttaatttgtattcctacttaaactcttatgtcctttatttttctaattttgggttttattttatttttattctaaattttaattaatatcgtattggattcttatatgtaatcttctttcaatattacttattgtttattccgaattttagttatttttaaaatgtattcctacttgcacgcctaatgttacgttcctggtccatttgctcatgcataatgatattcttacattgttttattccaactgtattggttatttgatttttttttatttctaccttgagttaacgtgtcctacactggttagatttgtactctgtatttgattacaggatctccatgcaaatatgtccgactcctaatcctaatcataaaggtttaattaacttgccatcactctatatagaatataggtcggtcccaattttctgtagtcgttttctagttggactccaatatttttcatgtgttaatctgcaccattgaaaaatctaaacagctataatctaacgatcaaaatagtttctctttttcttcgattaatgtggaaatttctagcccccacagcgaacgtggtgtcttcttttagagctattttaataatataatagatagaatagatagatgtggacaatgctagaaagtcttgtaacctgaaaagaggtagtacacttgattccaatttccgttgcacgttttaatcttggttcagattcatgcgcggatgaacatggagtagagcaagcagcgagaccgagttgcaacgctggcatagcgagtagcagtggtggcaaaaaacgatccaaggcttgggaggacttcgatatcacggaaaaggaaaacggaaaggcggtgaaggccagatgtatccactgtcacacggtggtcaagtgcggttccgacaaagggacgtcagttttacacaaccatctgaagagtgacaattgtaagaagaaacgtgaagcaattggtccgccaccagacccttccaggtatactaccaatctgtgaatgatagctaaaaagagacaccatactgcctttagatttctagaaattcccatatctatctatctatctatatatataaaaaaagacaacacgatagctatgaaggctagaaattcccatgttggctatgaaaaagaaaagaatagtacaaatagaaatacaatctaaaaaacaattgaaattcgaaattaaaaataagtaatattggaagaagaatccatataagaatccataaattaaatttcagaaaaaattctgaaattagaaaaagaaagaagaaagttcaagtaggaataaattttgaaataactaaaattcaaaataaaaaataaaaaaaaatcctaaatcagaaaaataaaaaagcgagtttttgtacgaatacaatttataaatgactaagattttgttcaagtaggaatacagtattaaaaataataattaaaattcggaattaaacataagcaatattggaataagagtccttataataatgcattaatactttattaattaaaattcggaataaaaattagaaaattatgaaaagaaaaataaaaaagagagttttagtaggaatataattttgaaataactaaaattcgaaatagaaaatagtgaaaaaaaacaatcaatctagaacccaacacgagtttaattaaaatttaaaataaaaaataaaataaattcttatattaggaaaagaaatgagagtttaagaggaatacaatttttaaataactaaaatttagtcaatgtaagaatacaatctaataaataactgaattaagaattaaaaataagcaatactgaaaaaagagtccatataagaacataatatgtgattaattaaaatccaaaatattttttctgggatttgaaaaggaaaaaaaaaagagtttgagtaggaatacaattttgaaatgactaaaattcgaaataaaagaatattattgaaataataatcgaacacaacacgagtttaattaaaattcaaaataaacaataaaataaattcctaaattagaaaaaaaattaagtagaaatacaatttataaataacttaaatttggaatagaaataacgaaagttgaaaaaaaacagtccttctaaagcccaactcgggattgaatttgttagggttacagataaggcatacctcatgtcctacgacttacgagatatatcgattaggtataccttcgcgtatatggattgttcctgtaaatgtcacatggaaactacttcaaattatagaaaatatctctacgggtcaagtgatttccaaaatcctactcggaaaggatagagtttctgttatactgtaccaggtccgatatcctcaagcttttcttggggggcaagatgatccacggtataaaagggacccctgggaggggttcagggaatcgtatctcatcttcaacacacctcccgaagtttatgaagccggagtacacggagccaactcagtgggagatctcgtcgaatctctcgactacgatctcgtcggtaccatctgtttcgactactctctttgtaatgtgttctcatcatcatcaattccatataaactggactagggctattacctgataagggccctgaaccagtataatctttgtcttttgtctgcttgatgtcgtactacatagaccctcgttccaatgtaccccaatactctacttatccggtctacgagtatcactcgtcgacagatttaaatttagaattaaaacaaaattaaattcaaaattagactagaaaaaatgcccatgcgttggaacgggtaaacaaaaattatatccaagataaaaatattatctgattagggtttagtttttcatgatatgagccctttaagaaaatatattctgaaataaagaaagaaagttctaaaaaaagaaaagaaaaatcgaaaggaaaaaaaaggccttgtcggacccccgccggcttgctagggtattcacgcacatagcccatgaagcgcgcgcggcccagcaatgctgcggtccaagggattttggactatttgccactttcccggatggcgtgttctcaaatgccactcttccaaagaactttgctttttttaccattggagagagatgatttctttctcattggccatttttgagctggtgaggcgctacgtcaccagatatgagggcaaaatgaccattttgcctttcttcttcctccagcttggggtctctctccttcaaccttcttcctgcgcatgagctggtgatgccatcaccaccaatgccaaaccatcaagccaaggccaggacgacgtgaagaggacctcgagcgtcccgctgccgaatggctatggaggagacgaacggcccctggctcttctaccacccaatgtgcaccctcacctcctgcatcgggcagcgaacaatgaggcaggggaagccctaaggctgggtctgacgcagccgtcgacgtcgggggagagtggagaagatccgagaggaggacgacgctctgtgctcagaggacaacgatgacatcgatgatggagtgaggcaccagcaatggcatcacattgccggacagccatgcccgctgatccttgatgacgttggcagtaggaatagaggaggggctggggatgtagggagtcgagtgagggagggaggagcacaaggcggggagctcgccggagcctaagcagctcactggcaaggaaaaggaaagatgtaaaagggactgaggaaggggaggagaaatgaattaagaagaaggacaagatagtcattttgcccttagatcaggtgacgtggcgtctgccaggctcaaaaatggcacacgagcaggagcccaccgctactcctcgcaaataaatatgcatatctatttctaatgtgatgctaattttatttcatatcatattttagggtctcaaatatcacaaatataaatatgcaacgctaatttaaatatacatatgtagaaatgaaaacaacacaatttagtttttttattttacaccattatattagatttattatttaaaaataaaaaaattatcgtatatacggatacatgagaaacatatagctattaaccagaaaaagtactccatacgtacatatgatttaaagaacaatgatgattacgtatcatttgccggaacaatagaaaacatacttataataaagccaaaaagattgggagtcctaaaaatagaattttgttcaatttaaagataaaatataataatcttgaaatttacacaaatataatataaaatgtccaatcaatgctttttaagtgttctatcttttaaattattttaaaattatatatccaatttgtgatcccgttgtattcctttaaatcaataaattgataatgtctatagcccaaaatacatcaaaacatatggaaccgacaagtaataattaacgctatgataataatttcacatcatatcttaggtgtaaaaaaacttgatgaatatacaatgctaatttaaatgtacatacgtattctccaaattactaaaggtgtctcatgtcgttagaaagaataggtgttgaaaagaaaccagacactgaactaacgtgcattacactatagatatctgtcaaaaatataatacggtactttggagattatcgtgctagtattttaaaaaattactttgtctcagttacatataaattattctattgttttagaataaaatttaactcctccgatttatgtgacagaggaagtataagtaatataaatcatctttggctagatgaagtagtatcattagctattgcccacattgatatagatgttaatgaatctagacacctatgtgtctagattgataggtgtctagattcattaacatttatataaatgtgggcaatgctagaaagtcttataatataaaatggatgaagtatatttttaatagaaaatatattttagaaatatataataaaattaaaatgctacttaaagtaatctatggcatacaaaataaaaaatgttatataagttcggaaactcgaaaaattttaaaaatagaatcacacataatacaaatagctacgaaccaactccattattgtgacacgtttgtttctaagaaatttaaggatatacagtttctagtagtaatacgaccaaaccagttattaacaaatacacgtttaaaatagattaaataaatatttcaaaaatatcatccacacataaatattcgtaataaaaattctaacaacattaaacaacatgtccgtgcgtatacacaggctacattcctagtaactataataagtccatttgccctttggtatggattaatagtcaactaatgcattaaagattttactatgaccactactaataaaaaaagggtgcgataagagtaatttgaggatgatgtaacccgctttaaaaattttatttctatataaggaacatctttttaagttatcgcatatgtagatgcgttttagcgcgtcagccattatgatgtagatcatggtaataaaagtcaaatataaaaacggagaattgaagctctgtaatcttcaatagaatgtttacgtagccacataaggcacgtacttcctccgttccacaatataagtcattctagcatttactatattcatattgatgttaatgaatctagatctagattcattaacatcaatatgaatgtgggaaatggtaaaatgacttacattatgaaacggagggagtagctcttaattccgctgagttaaccgtctgcgtttatctgcttaagatcgtgttatatcgctgactttgctaattgccgaaccacgatcacattcttttgcagtgccggtgagggtgcaccaaatgcacctggtaattcagttggcagaaaaaggatgaggatggatggcacttcaacactccacgaggcagttagcacgcatccttggaacaggggtgaactctccaacatgatccaacatatgactcatcagttacaagaggctgtaaatggggttatgaggctatgtgggtatgcaagtttaaatcagaggtgtgagagtacacccctggccccaaatgcaataacatcatcttatcctcttgagcccaaaatgtatgggagagatgcagagatggaatccatcaaaaatctaatcatgggaaataaatccaatgacataaccgtcctaccaattgtaggcataggagggatagggaaaaccactctgtcccaacatgtttataatgatccggaaatcggaaatcagtttgagatcaagatatgggtccatgtatctgataaatttgatgtggttaggatcacaagggagattttagggtgtgtctccaaccgaagttaccaaggaataagcaactttaacatgcttcagcaggatcttgagaaacacatgaaatctaagaagtttctgattgttttggatgatgtctgggatgtcactacagaagactgttggaacaaactactgggtcctttaagacctaatcatgtgaatgcatcagaagtgacaggtaatatgatcattgtgacaactcgaatactgactgtcgctcaaaggtgtggaacggcaggatcaataaattta

SEQ ID NO: 7550 - DNA, 15601 bp, Oryza sativa
ggtcctaccttcagtatgcagagttcactatactcactgaccacaagagcttgatgaatcttactgatcagcgcttgcatactccttggcaacaaaaggcctatacaaagttgctagggctgcagttcaaaatttgttacaagaaaggaatccacaatgaagcagctgatgcccggtccagatgtgaccataactcttctttggaggtggttgctatttcggtttgtaagcccacttggctggaagaggttgttaatgggtatttgaaggatgccaaggctacttagttactgtctgaattagccattcactctaaggctgactctccataccaacttaaggatggtcttattcgatacagaggacgaatctggttgggacagaatattgagttgcaatagaaaatttttagtgccttgcatgacagtagcatcggtgggcattccggatttcctgtgacttatcgaaggatcaaggccctttttgcttggcctggtatgaagaaacagatcaagctcaaggtgaaggagtgctctatttgtcagcaagcgaagccggatcgttctaagtaccccgggttattgcaacccttgccggttccattgggagcttggcaaattgtcacgatggattttatcgaagggcttccaacctccaggcgattcaactgtattatggtggtggttgataagctatctaggtatgcccattttttacggctagctcatccattatctgccgcagacgttgctcagttgtacatggaaggagtttttagactgcatggtttacccctggccatagtttctgatagagatcgcatctttactagccacttttggaagcagctgtttaacagtgtgggcactaaacttcatatgagtactgcataccaccctcagacggatggacagactgaacgtgtgaatcagtgcttggagacttatttgcgttgttttactcattcctgtccaactaaatggtccacctggctatatttgggctgagtattggtacaatactagctatcactccacactgaataaaacccctttcgaagtattgtatgggcatattcctaaccaattgggcattactgttaactcttgtgaacttccaaatgtccagcagttgttgaatgaatgagggttaatgatacaactcttgcagcaacatttgaacagagcacaacagtttatgaagagccaagctgacaagaaaagaagttttagagcttttgcagtgggagattgggtctatttgaagttacagccatatgtccaaacttcagtagcagccagggctaatcacaagctgagtttcaagttctttggtccttatgaaattcaagagaagattggtgttgtagcataccgtttagtccttccggcgagcagctctattcaccctgtttttcatgtctcgcagctcaaagcagctcaaggttttaaaggggatgcttctgttcatcttcctgttcagtcttctactaaacaagttcctgtggctattctggatactagggtgcgcaagtcaggtatgtctgttattcctcaggtgcttatacattggtctgatgatgtgatcgccaatgcaacttgggaagacttggaagatcttcgtactcgtttcccaagagcactggcttgggggcaatccagttttcaaggggggaacattgtcaaggctgcgttgggtgctgatgctgacattgccaaggaggagaagatcgaagggagaggtagtagacttaaaagggggaatgttcgtttaagtggaccagaatgggcattgtaagcctgagtggttatcggcccaagtgccagactgtaagcgtgtgtggggagtgagtgggagtgataaaactaaacacacaactcctgtaaacctttttatcgatttagaacttggtagtggcgattggcggcggcggaattcgttggaaatccccgtcgatatatcttgtgtgtctccagttctgaatcctactttacgcagctatcatgagggcgagagggtggcaccattccacgatggcagcagcacctctgcacgaaggcgacaaccaccacacatgggagaggaccgggattaaccactgatgaggacattgaggtggcagctatgttggaaactgggcaacgatgatattgtttgtgatctgcgaatataaccaaaatggttttctcacactagatgatgattagggaggaagaacgtgaaagcggcgcaggtgcttaccacgatagagaggtggcagcaatgccgggtggttgacaacaagttgatggcgatggtggatggcttgatggaagacggcgcaggaagtggggaagacgacagaggtggatggcataacagtgctgcgccattcgctggtaattgagagatctcccaacgatggtagcagtgctggaaatgagacgaccatcatgccggctcgatcttcccatggagcagctcgtgcttgcgatgacagcggcaacattggtgctcactcgatcggactgcaacacaaccgcgtctactcgatgtcccgaggcaggaacctaggccggattatagtgagcagcaatagcagcaagacatggtccggtggacgacgatggagagagaggcggcagtgcaagttcgcagcgaacggccggtggagggatgcaggcgtgtcgccggaggtgaggaagatgcatgggaggtggccttggccttggtgttgaccggcggcggcgacggcacggtgtggcaggaacggtggtctgcaaagggaaaaggagggggtgctggatctacttatagaggaggacagggagttgagcggccagccggaagatgtttattcatttttttagctgagacgatggaaattgaggtgactgactgatgatggttactcattttttggctttggtggagaaaattgatggaggggtttcgccggggatttggctggtgatgtgatggcacggccggggctagctgaagcgcgcaggcgggctggttcgaactgcatgcgaggaaatgagatatggggcttcggcctcctgctgatgggacttcggcctcctgctggccagaggaagaagatgaccgatcgagaaggaagaaagaaaagatgaacagccgggagacaagatccaactcatcaaaagagattcaattttcggcattcaacaagtgaaattgatgatggagaggaaaggattagggaatttctgttagcttcagctataatcatgtgtcgtattatcggttactgtaacgtgtctagtgttgtcgtttcttcagtttcgtcagactctgtttcggcgtctgtttctctgtttctttttcctgtaagccgagtcttccgggtcgtgcgtcgtgtgcgagtcatccggatttcagtgtcgtggtcgcatcgtcgtggatgatggcgtagtggtgtcagtttgagtctgtacatatttgctatatatatgagcatcagaaaacgtcgctggttggttcgcgacaccaaaaactctgttcgtgttcatcgtctttccaattcagagaattcgcgtgagagagagagtgaggattcacaatcttgggctttgctatcatttggtatcagagccatgtccgctcccgccagcggttcgtctcgcactcaccggcgaacaggccgccggctctcgccgtctccgccgcgcgtgagcgggcgacagctcgtcgtgcagcggattgttaaggaagatggctccgtctactatccaatactcagacgctcaaattactccgattgggcggtgttgatgcgagtcaatctccaggctcaaggtctgtgggatgctgtcgacaccggcgatgtcccgtatcaggaagattgccaggcgctttcagccatcttgcgagcggtgccggctgagatggtccggccgcttgccgagaaggacagcgccaaagacgcctgggatgcgctcaaatccatgcgagtaggcgcagatcgtgttaaggagtcccgagcacagaagctgcgccaaacttttgagtccatgcgattcaagaatggcgaacacctggaggatttcagccttcgtctccagtccttggagatgatctgtctgaagagaaggttgtttgaaaattgcttcgcgtcgttccccggaggtatcgccaaatggctctatcgattgaaaccttgattgatctcactgtttgatgaatttttataccaaaattcatagaaaaaataatatatcattgggcattaatttgcagcccaattttacgaaatacacgtgaaacatgtctctacgacatgtgggaccagaaaattcaaatatcatacaatgttcaaacatattcaaaattggactcgttttgttgtatgttttgattggaaaataatggttccaacagaattcatatttgatatatgattagggagatataaacatttgaaggagatcaaccagtgttaacctcgtatatccttaatttgtttgctgctcctcaccggttggtaattatccttatggcagtgtttggcaaatgtctaaaggaaatgatttcccactcatctttaaatcctaaccatttattctccctcatccatttaatcctaacccttcattcatttcctaatcccaatcccacccctcatttcccattatccaaacacaccctatgaggtgtgggatccaccgtcaattagccaagttaatcctcgtgattatctccagcacacacacgttctttttatctggagcacaaaattctttttatcacgcgcaggtcgttggattaacagacgcgctggcttatccagagaattaacgcttgatttcgctggcttgctgaaatctcggaagggattaggcgaggactccgtcgcctctactcttatataaggcgctgtccctcacgacgcaggaggtgggagaaaatccccggcgcagaggcggctggcagaggagaagacgtaggtaggcaactatgctgtgtgctctgatctgcttatagtttcacaaacccatatccaacatatacacaatttacacgtcgtcaccgagaagcacacatagacggcggaccgctgcgcggctcagcagcaatatgccttagagagccgccggcgctgatggcatctctgccggcgagtcgtccgtcctgaataacaagcagatcgatcttgtttttcgtcaagaaaatatcatcagtggtgtgcagacgagtccgatcctcgtggggttggaccgtctaagttatcaaatattggagttggatatttatttgtataaacttaggatgagtttgagccttattggcatcagaccaaccatgatttacacatatttatattctcgttcatgataaaaaatcggatgcgcatatttataaacttgggatgagtttgagccttattggcatcggaccaaccataatttatgcatattgatgttctcgctcatgataaaatatcggatgtgcatatttacttgtataaacttgggatgagtttgagtctaatcggcatcggaccaaccatgatttatacatatttatattcataccggaacaattatagatttgccttgtgcatgtcatgtgcgggagcaattccttctctctctaaattctaccagatggatgggagcaactctcaaaattcttgaagacaacaaaaacaatgctcgccaggagggcaaggcatgcagatttacaacacacgtggacatcatggccgagtgtcgacgagatgaaatggccaatttatcaatatttgtgctatgtccgagaccgacgagtccggataacatattggctaaagctgacaaggctgcagtcattaactcattccatttgtctatgaccgacgaggttagatgaaaccatggccgagtgtcgacaaggccaggtcactatactattaacacgtctaaaatggacgggaactggatataccgttgctgggcaccgacgaggcaaaagcaatcacaaaatccatgtttgatgaaggccggggcacatgagtgggcaccgatgaggcaaaggtcacccgcttcaccaaattccctccgtatactaacatgatgatagtgtattgtgactgggttttggcaaaacaaagccatcagttccacattcactatattcaccgttaaatctgaaccaacctcaaccttcggcgagcaaccaaattttgatgttgacgatcacaaagcgcagcttaatcggaggtgttccataggctcgctcctatagatgtaattaaccggccgcctcattgctagcgccgggaatcagcggactgcacggaatctcctgtcaagatacctctccattaagcattcctcacgaaggcaaaaggcgaactcctacaggagccctcatgtatttgtaaacattcatgttaatgaatcatgattaataaaaaggcaatacagggtttccctattttctgtgtgttcgttgttttgttttcatcaaacactgaccttgctttctattgaggatctgactggccggcttctcaccgtcgacgatcaccccgactctgatggcgaggacgcgggtcaggtgctcttcagcgaaaaggaggcccctgctcactcaaacaaggaagctgggcagaactcagccggggggagggcgtccagctcacggcaaccacaccgcagcaggcgcgagcgcgacggcaacggctccgacggcaagtcaggttcgtcccaagcggcaaaccgcaatgtgtccaaggacaaatgccggtactgtggcaaacttggtcactgggccaaggactgttgcaaggcgaagcgagaccgcgagaaactggctcaggcaaaccttctcatcaccgagcctgctcaagccgcggacgaaggggagccgacactgctgatggcgcaagtgtgcgagcttgcccctgctaccgatcctgtcattactgacggggaggtgacactgaaggaggaacgtgctcacgtttctcttcaggatgaaggaaagcccgttgatctagactggatccttgacacgggcgcttcaaatcacatgacgggctaccgtgatgtgttctccgagcttcacaccaccgtgcgcggcactgtcaagtttggtgatgcgtcgagagtctggattgaaggacgaggcatggtgctgttcgcttgcaagaatggtgaccactgcgcgctcactagcgtctactacatccccaagcttcggagcaacatggtcagccttggctagcttgatgaggcgcattgcaagacggtgatcgaggatggtgttctcactttgcatgatccacagcgacagctgctgtgtagggtgcgccaaggagttgggcgcctctacgttctccacgtcgagctggcgcaaccggtttcccttctcgcaaaggggaaggatcaagcctgggtctggcacgctagataccgtgtcacgcccagaaatttcgaatagaattccaagcagaatgtgcattaaaatccccgtccaggaccggccggggtacacaaacgacaaagttgacatacagatccacgtcttacaaacattataaaagttttacataaatgcagcggaaaaacaaaagataactggagctaagccttgacttgaactacagcgggaacaccactccacaggcatcctcgatggcacggacgaagcctactcctcggagaaaccaccatctgacgcatactcaaactctggggtttggggaaaatagagcaagactgagtactacccactgtactcagcaagtcataccggaatagggctatgatgcagggaattatcaagggatagctataatggttcatttgcataaaacgggcatttataaacagaagttgaaagcagtaaagcagttgtaacaattaatcaatattaatcatccactgtccaacgctataccatattgcaacaggcccaaccatccacctatactatccaatttcattagactaaactagggtgagactaatcacggtgaatctggttgatcgcccataaccatgggcacggctatttgaatagttttactctgattagaggtgtacaactgtacccacaagacacaaccccacgacacgttttcgtgcgccggcatgccaccacgacatactagaaagaggccgtgacaggacccttcgcataaccccctctaaccaagcacaccacacctcaggtttcacccccactcctcgcaaggccgtgggcagtcccctctcgtgcctagatgaatccggaagccgcataggccatcgcaggacccatccaaactccatcacgcccacccttgcctggatgcgtcaggtagaggaaagctacactacaagcccagccgttgcccacactggcttgtggtaagtatgataagttcttacagggcatcccgcgaaccggtccttaactgctatgggtgcgaccaacaaaaccatgcacccacagcccaccatgtgatttattttaattaaccaataccgaagcggtggcactaatccaacattaccattagaatctacagtctatacattaataggattttcccctttgtgtgctagttgaacaaagcatggctaagcaatccctagtccaatatctagtcatgttataacccaagctaacaaaggagcatggtaccaaaatagcatggctgtaacagtaggtaaacatcccatagtattattgtaaaacaatgcagtatttgaaggaaaacattagaacatttgcaatataggatcaacatgttcaagtgacaggcatgacttgccttgctctgctgctggaggaacctcggtgactatctcgaagtacaccggagcgttggaagagctggaatctaagcgacatacaaagcaaacaatacaaacaggctataagactactgaaacagagaacaaaaccatttttaatggattctacacatttttcttgatttactgagacttgaatgggcttaaacggagctcggatgaattagttatgaattttagaagattcactgtgtttttacaataaacagaaaaatccttaattgaattattgcacaataaatgcctagggctgacgtcatcaaagggagcgggcggcgccgacatgcttggcccgcatgtcagcggcgcaaggggagagggagggggcgccggcacgtgggccccacgggtcagcggcacaaagcggccggtccaccgtggaccgggaccacgcgggtggtccaccgccggtccacgggaccgatggtccggatcggcctcgggccgatcggacggcgcggggagcagccgccgggttcggctcggcttcaaagccggccggccggccatggctagaggcggcggcgtgcacgaccaccggcggcgaccggtggcggcggacggcgcaaaggcggcagcgcacagctggagcaacggcgcggccaaaagcgacggcgcacgcgggaaggggaaggaaaggaagggggagggagtcctcaccagagagggcggcggcgaccggcggcggaaaacgagggaggcggcgaagtccggcgatgccgaggtgcggacgagcgacggcgacacctaggggaggggaggagaggaattagggcggaggaaaaaaccccacggcggccgtccatgttggctggagttgaaggggagaggggactcaccggcgacgcgagggaaatggggtctcggtgggattccggtgacgcaaggcggcggttgggaaagatcttgtggcggcgaagctagtggtggcggcggcttagcgcggcggtggcacgcggctggagtgcggtggcaagcggcggcgctggcggagagcggcgcgagctcggtaggaagcacgggagggagcggcgagagcggaaagggaaagaggaggctcgggggagcgatttataggtgcgggacgggtggaaacggccgggaaagcctcctatttgaccggcgacgtggggtggagagagagataatggggggattcaaaatgcgaatcccgccccttgcgagcgcgcgcgggccgggagacgcgggggagagggcggcgacgtgggaaggacgcgggggcggcgcggcgtgggcgcgggaggagcggaggaggtgggcgcggcggtttcggcggcggttgccgacgtcgggcgggcggccgggggaaggggacgaccccgactggtgggacccacctgtcggcgtcccggagagagagggaggggcggcttgggccggcccacaaggaggaaaagggcgcgcgcggcggcgggcggactgggccgacggcccaagaagaggaaaaaggagggaaaagaaaaagaaaaggaagaaaggatttttcctggatttaaaattgcatgtgctcaattttaattggttaaaattatttctagggctctcaaaattccactaaaaatcttgttagcaaatttcgacatgtagaactcaagaaaaattctaatgccaattccgattattatttgcattggtttattagggtttactcttgcttttacaccgatattttcttgggaccatttataaattcaatttaggcttaggaggagaacttcagggtgtgacatacgggcacctcaacttcgacgctctccgctcactggcgagccgcggcatggtgcgcggcattcccactctggagcgggttaccaaggtctgcgacggctgcctaataagcaagcagcgacgagcgccgttcccaacggcggcattgcatcgcgccactatccatcttgatctggtgcacggggacatctgtggacccatcacatcgtcgacacatggcagtaaaaaatacttcctacttctgattgatgatctaactcgctacatgtggttgtttctgttaacatcaaaaagcgaggctcccgctaccatcaagcggttcaaggcaggagtggaggtggagaccggctgcaagctgcgcgttctccacactgatcgaggaggggaattcacctctgtcgagttcgggctatactgcacgaacgaaggcgtcgccaggcagctaacgacgccatactctccacagcaaaacagcgtcatcgagcaccgcaaccaaacggttgtggccatggccagatgcatgatgaaggccaagaacatgccgggggagttctagggcgaggcggtcaccactgccgtctacatcctcaaccgggcgccgacaaagagcgtccgcgacaagacaccgttcgagtcatggcacggtcaaacacctgttgtgcactactttcacacatttggctgcgtcgtctacgtcaaggaggtgaaaccacacatcaagaacttgatgatcggagcaaggtgatggtctttctcggctacgagccgggttcaaaggcatatcgtatatacgacccggtggccaagcgcatcgtcgtgagccgtgacgccgtgttcgatgaggcggcatcatggccatgggcgtcacccggggaggaggacgggggaacgtctcctcaggaaaccttcaccgtgcgctacgaggtagtggcggtggacgtgccgtcccgccactccgactccatgtcgtcgccggctcacatgggaacaccagtgccatcaatctctgcgtcaccgggtgtcctagcggtggagtttgtgtcgctgcctgcggaaacacctgatgtcgacgacgacagcacagggccacgtcgtttttggatggtggccaaaatccttgacactacctcgccaattgagctcgactccgacgagcttcatgtggctgctgccgaggaaccaagcaaccacgctgaggcggcacaggacgcactctggatgcgagcgatgcaggagtaactcaagtccatcgaggagaacaacacgtggactctcgctgatctccctgctgacaagcgtcccattggcctgaaatgggtgttcaagctcaagaaggacgagacgggcgcaattgtcaagcacaaggcccgcctggtcgctaagggttacgttcagcggcaggggattgatttcgacgaagtattcgcccctgtcgccagaatggaatccgtgcggctgctactcgccattgcagctcaccttgggtcgtctgtgcatcacatgaatgtgaagtcagccttcctgaacggagagctagaggaggaggtgtacgtcgcccagccactaggcttcatcgacgacaagcacccacatcaagtcctgcgcctaaacagagcactttatggtctgcgtcaagctcctcgtgcctggaacgcgaagctggatgttagtcttcatgaactcgggttcacacggggcatcacagaacatgctgtgtacacgcgcgggaccgggaacgcgcggctaattatcggcatatacgtcgacgatctcatcatcaccggcgctcactctaaaacaattcagagtttcaaggaggagatgcactccctattccggatgagtgatcttggattactcagctactacctcggcatcgaggttcatcaaggcaacgatgggatcacaataaaccaatccacttatgcgcagaagcttttgaagatgggtggcctggcggcttcagcttccgttccaatggaacccagattgaaactgacgaagaacagcgatcgaccaagtgttgattcaaccttttatcgcggcttagtggggagtttgcggtacctggtgcattcacggccagacattgctttcgcggtgggttacgtcagccgattcatggagtcaccgcgcaatgatcatctcacggcggtgaagcacattctgcgctatgttgcaggtactatgaactatggttgcaaatttgtaaattcaggagaagagggaatccatttgctaggattttctgacagtgatttggggggagatgcgcacgatcggaagagtacctgtggtgctctcttcttcctcggctcaagcccgattgtatggcagtcccagaagcagaaagtggtcgctctttcctccagtaaagctgaatatatcgccgccactggagcagcgtgtctcggcatatggctggctcgattgctagctgaggtgctgggaagtgatccagggaaggctctcctcaaggtcgacaacaagtcggcgatctccctgtgcaagaatccggttttccatgaccggagtaaacacatcgatacaaggtaccactttatcaggcaatgcattgaggagaaaaagttgaggtggagttcgttccttcggacgaataggttgccgacattctcacgaagccactcggacgaatcaagtttcaagagtttcgcagtcaggcgggcgtcgtgcatattgtcacccggcgacaggattagggggagtttgttagcttcagctataatcctgtgccgtattatcggttactgtaacgcgtctagtgttgctgtttcttcagtttcgttagactctgtttcggcgtctgtttctctgtttctttttcctgtaagccgagtcttccgggtcgtgtgtcgtgtgcgagtcatccggatttcagcatcgtggtcgcatcgtcgtggatgatggcgtagtggtgtcagtttgagtctgtacatatttgctatatatatgagcatcagaaaacgtcgctggtttgttcgcgacaccaaaaactctattcgtgttcatcgtctttccaattcagagaattcgcgtgagagagagatagtgaggattcacaatcttgggctttgctatcaatttcgacgaagaagcagaaaagaagcatgtgcaacgaggggccacgaccacgacacaagatggaaaaatggatcaagctcatcaggaatgtttaacttttggtattgaagagagaaactgatggagcagaagaagaagaagaagaagaagaagaagaagggatcagtgaggagattggaagagacgttgctgcttaatttcatgcagcaggagaaacgttccttcattgcagaccaaacagaaacgacgtcgccgtgtccctgccgtggcgaggatggcggcatgggctggcctggaaccagggacaggtagcgtgtgctgctgggtgcaaagaagagaaagagagatcgatagagagagagagatacagaaaaattgaacttggaggcatcgggaacaacaagaaaagcaaaaaagaaaagaaaataataaaaagagaggaaaaaggtaaggagaaatgaggaacaagaaggataatagggttctcaatctagaaaaattcctcaagaatcccaatcctgtaaattatttggatttgttcaggagttttttggatagagaataattcacataattgagctccacttccaaacttaaataaaaatcaaataactccaattaatgaacgataaaataaaatgtataattagtttatttagtcaaattaaacactttttaattttcagaattttcattaagccatttcagacgaataaacacgaatgtgaatttttgaaattaggcaaattaagaaatacgaaaaatgggacgtaacacggcagcttccactcaggatgggaatggttaagtttggcccatttaaccactgaacctatccacaaatatgttttattgggcctttaggttgattcaaaactctaaatggggcaaatggtttgaacccttgaaacctaggaaacatcggattgatccagaccaccatcaacatcttgttctcgaggacctcgggtcctccttggcatggcggcagcgctccagcaccgtcttgttctcaagtcctcatcctccttggcgtggcggtgacgctccggcgacaagtaggtagtgctagtcctcaagagcgatggggaagaaagggaagtgggagagagaggaggaagaagagttgatcgttgacatgtgggatccatatgggtctcactcgtcacgctagcttgaattagacactataatgtcttgggacctcgagtataccggttttgcaagataaaaatgcattatatatggtactgcggtcgaaggacgtaattcaaacttggcgtcaagataaaggaccacaagtgaacttagtccactcagtaaataagcatgcatagcatacgctgggccaaaccggggcaaccatccatctgatcagtaagcatgcaatattggctactgggccgggcccaaaaaactcatcctattaattagtagtaatatatttcgatcaattttgctatatatttgtcgacaaattttctcctaaaaatttgacagatgtaattacagtacaatcacagtgtaattacactgtaacttgcatgtaattacactgtaactatagtgtaacttgtatgtaactttcaaaaatctctctgtaatatgttatttcggtaaaatagaggttgtgggaacaaatccttacacatatatatgcgctgtgatttttttcttcctcaccaaaacaaatcttgtaatagatttaactgttcaaaattacatgaaacttatatacaagtaacattgtagttacatgcaagctacaatgtaaatacatataagttacagtgtaattacactacgattgtaatataattacatttgttaaatttttaggagaaaatttgtcgacaaatgttactaagaaaatctgactaaagtgctccactaataataaaaaaataataaaatttattggtagttaggtaagtggtgttgaaaacgggagtacaagtttt

SEQ ID NO: 7551 - DNA, 8534 bp, Oryza sativa
gattcattcggaaagtttccccctaacttcgccggcgcatcaatggcggccggatcttccgcgggcgattccccctcatccggccgttctctccccctcccaacactatataaacactccccgtgcctccctccaccgtttccgccactcgccgctctctctccccgtcggaatcgagctcgcgccgtcgttctctctctccgccgtcgccgccgagctccggtccccgccgtcgtcgccccggaccctctcccgtttcggcgtcgccttcttcgggttcgccgcaacctcgccgacctcgtccacccctctgtttcgcccgccgaccgccggaacgccgccgtcctcgtcgacccgagccgcgccgccgccttcctccgctccggtcgccgtcccgtcgtcgccgtcgacccggggtgagccgcggaccgccgttccacttcccccttccctcccctctctcgggcgctgctccgccgcgccggtggtcgccggcggcgaccatcggggcgcgggtgcgccgcctcccgtcggctgtgccggcgtggccgccttcgggcgcgccccgcggctgccatgtggggcccggccgtcagccgcccgcgccctcgggtgcggctgacgcgtgggacccacggcgccggccggtgtgagcccgggtgcacccagtccaccgtggaccgtggggctgccgcgtgggccccacccccgtggacccggtccgcgcgcccctcccctcggctgacgcaataaatccgattttaaattaaaatttaaatgaagaaattcgtaaatatccatttaaagagcatataaacttcaaatggccataacttggccatttgaactcggaattggaccgttcaagtctctaatttttccttaagaagccaagaacccatttttgtgctttgtttctgcttgttatatagagtttagtagagtaaaagccgtttcttttccgttggtcgtgtagacgctgcagcttcggaagatccgctcttcgtggaggttgaagccggcgtttgggaaagcgagcaaggcaagtcacatcatctttgaacatattgaatcccagtttgtaaaattatgttgatttaacttattgcattatcgctttatttaaattcccgcgttatcactgttttatttagccatgcctatttacctttgttatgaccttattattattgttattgttattattaccttgttcaccctagaataaacaaaaccccaactagtggaccctctactcatggtacccctagtataattttaggtagatgcttcgcttttaattaggtaacattaggcggttttacaactctagactttgggaatattcatatcacctggacactatggaatggtttggttattgtggaattggcttcacaccgctccttctattcaaaatccccaaaaatggttttaggctgggctcggggtgcatggttttgatagtagcacctcggccatataaggaccggtcttcgggcctctgttgcaaagcactaccgtacttccacatgtctagtgggtaaggcttagtttgtggctcagtctagttataaacaaaagtacacggatggagatggaagaagtcgggggtcgatggacatctccagggcaaatgaaggctacacgagctgcggcccggtagtcgagatgtcatggcacagggccggtgtcctgctgctaggggctcagtcctgcctgcctgtcccgggggttccggccgtaggtgggattgggtcggtactcttgtctatggctaggatgggttggaaactatgtcacgtcttccgtctgtataccgtggtggtatgtggcacgtggttacacgtgaggaagatgtgtcttgtgggtaaagatgtacacctctgatcagagtataatctattcgaatagccgcgccctcggttatgtccaagccgagcaatgtacccaagttagtgttttaattcttaaaatctgcttaacaactaaaatgtggaatggttggcctgggttggcttgggacgagctgggacccagggtcgggttgccagttcggtctgaatcatcgtaggccttgggttaaggcaggttcgtgtgggttcacggccttgataaataatattgcatagtactagaatcgtgtttgcaaaatagccctgagcaactaatgtctttaaatgctgtttactgcaaccctaaccctttatagtataactcctttgtactcccttgcatttattctgcacttgtgggtgtgtcttgttgagtacggtggttgtactcagtcttgctcaatttttcccaaacccagaagaggagttcctggaggatgaaggcttcggtgtctagctcgtgcctgccgtcaagtgcctgtggtcgtcgccctagtcttccgctgtttctcgtttgtctttgtgtgtgctgggccttcgctgcccatgtaatagattaactatttacgcttccgcttgttaaactctgaattgtatcaacttttggtgtaccttgcctcctgggacaaggattaatgcacgcacgtaaggaacgcccgttgggttatttccggtcgtgacaagttggtatcagagcccccttgaccctaggacgagccgtagatcccaagcctttgcagtattttcgaaataaaaatcctctgttatttgtgaaaaccctctagtctttctctgtcttgctgcttcatttatcgccaaaatctgatttttttttaaatgttgcttttctttttgtttttgtttgtagatggccggtagcgtcacccgtcgtggtttggacatgactggtttcgtcttggagctgcggggcatgtgcgttgtcctggggtatccacatggagtggactaccagggcaggccgcttccggagcaggagggtgacgaagcagagccccacgctgcttgggaggtcactgcagtgatcctcgccggctctcccgagcggacttcgctggcagtcaccgcgggtggagattctttccccgccgcttgctagagcgccgctctcctcgccatcggcactcttcaccagcgctacccggacgagttgcagcactcgccctaccgctaccaccctcgccgcggaggagcccgcgactacgccaccttccgggatgctagctcggaggatgacgctaccatcatgcacctagcgcgcatggtggaggcgtacgacgcggctcgtatcgacttccatcagatggtgcgccgtgggatggtcgagaacaacatgaagatcctggagctgcgtcaagagaacctgcagctcaagaaggacctagacgcggtggaggcgcagctgcatcagctcaagatcgcccagggagaggtctgtcgccccaagcgtcgccgcgtctgccgcagccagaagatcaccgcccgcaagagcacctccaggcccgagcttgttcgtcagtccctggcgtggacctgcttcgtcgagacccctcgtgccgagtccgcgcccgtggttccccaggagggggaagcctccggcgttggtagcacggaggatgcgctgttgctcaccttccgtcctggcccgtcgcagcggtagacgagcagttagtaggcttgcgcgtgtgttctttctcgtttgtcttcttgttgggttgtgtggggcatggttatgccggtgtgtggcataactgtgtcggagcctgcctttattttatttgcctaagcaacttgaactttaatgaaccaatttaatagcagtaataaattcaagaattatggtagtcgtgggtggttagctttaattgccagctctctctatttgctggttctgtgtggggttttcagatggtgacgaccaggagaagtgctaataccggtgatggcaaccaacctgaaggcagcaaccatcaccaccagggcagcccacctccacctcctcctccgcctccaccaccaccaccagacaccaacgccattctcacccaaatcctcgcccagcaggccaacatgatgactgctttcctccaccacctccaaaattcgccacaacataatactccaccaccacccccacaacactctaaactcgccgagttcctacgcatccgcccacctaccttctctagctccaacaaccccgtggatgcgttggattggttgcatgccgtggggaaaaagctagacactgtgcagtgcagcgatgaggagaaagtcatcttcgccgcccaccagctgcaggggcccgcatctctatggtgggaccatttccaggctacgcagccagaggggcaacctattacttgggcccgtttcaccgccgctttccggagaacccatgtgcccgccggagtcgtggcccttaagaaaagggaattccgagagttaaagcaaggcaaccgctccgtgatggagtatttgcatgagttcaacaacctggcccgttatgccccggaggatgtgcgggaagatgaggagaagcaagagaagttcttggcaggaatggaccctgagctgtccgtccgtctagtctccggggactatccggatttccaacgtctggtggacaaaagcatccgcttggaagccaagcacaaggaactggagtcgcacaagcgccgcttggcgaatttccgcaatcaacagggtgctaaccaaagggtccgctacaccaatccctatccagggggatcctcctcgcagcagcaacaacagcagcagcaacctcgctccgcgcctcgacctcaattcatggtgcgcgtcccacagccgcagcagtagcagaatcaacaagggactcgtgcgccccgtcctcctacgccaactgtgcagcctggtcaaggccgcagggacgctcaaggtccgcagcgtctgtgcttcaactgcttcgagcccgggcactttgcggataagtgcccaaagccgaggcgtcagcaaggccaagcgcctccccgctccaacaacggtggtaaggatgtcattcggggtcgtgtgaaccatgtgacggccgaggacgtgctgacaactccagacgtcatcattggtatgttcctcattcattccatccctgctaccattctgttcgactctggagcttcccactcgtttatatctgtgccattcgtggggagaaatcagttgggggtagaaaggcttaggaaccctctgctcatcaccacccctggaggggttatgacagcaaagtattatagccctgccgtccccatagaaattcaggggattccttttccctcggatctgattctgctagacaccaagaacttggatgtgatccttgggatgaattggttggctcaattccaaggagtggtggattgtgcgagacgcactgtcactctgtaccgagagccggaacaaccggttgttttctttgcacccccaacctctgtcagtagttcagaactccatcagataggactgtcagaaatccccatcgtcagagagttcggagacgtgtttccggaagaactacccggtatgccgcccaagcgagagattgagttccggatagatcttgctccaggaaccactcctctgtacaagcgaccctaccgtatggcagcaaatgaattggccgaagtcaagaaatagttggaagagttgaaagaaaaggggtatatacgtccgagtacttccccctggggtgctcctgtgatttttgtggagaagaaagacaagacgaagaggatgtgcgttgactacagagctctcaatgaagtcaccatcaagaacaagtaccctcttccccggatcgatgatctgttcgatcagcttaaaggtgccactgtattctccaagattgatcttcgttccggatatcaccagttgcgcattagggaagaagatattccgaagaccgcattcaccacgcgatacggactgtatgaattcacggtgatgtcattcggtttaaccaatgcacctgcctttttcatgaacttaatgaacaaagtgttcatggaatacttggataagtttgttgtggttttcattgatgacattctgatatactcacaatccgaggaagaccatcagcaccatctccgtctggtattgggaaagttgcgggaacatcaattgtatgccaaacttagcaagtgtgagttctggttgtccgaagtcaaattcttagggcacgtgatatctgctaaaggagttgctgtggaccccgaaacagtgaccgccgttaccgattggaagcaacccaagagagtcactcaagtccgcagtttcttaggtttggcaggatactaccggaggttcatcgagaacttctccaaaatcgctcgacccatgacacagttgttgaagaaagaagagaaatttgtgtggagcccgcaatgcgagaaggcgttcaaaactctcaaagaaaagctggtttcctcgctagtgttaatcttgccggatactcgcaaggatttcatggtgtattgtgacgcttcgcgccaaggattggggtgcgtgctcatgcaggatggtcatgtggtggcctatgcctcacgccagctacggcctcatgaaggcaactaccccacccatgatttggagttagctgcggtggttcatgctctaaaaatctggcggcactatctcattgggaatcgctgtgaaatatataccgatcataagagtttgaaatacatcttcactcagtcggacctgaatcttcggcaaaggagatggttagaactcatcaaggattatgatgtgggaatttactatcatcctggtaaggccaacgtggttgccgacgctctaagtcgaaaaagccattgcaacactcttaatgtccgtggcattccactcgaacttagtcaacagatggaagccctgaacctaagcatagttggtcgcggattcttggctgcgttggaagccaagcccaccttgctcgatcaaatccgcgaggctcagaagaacgacccggacatgcatggactcctcaagaatatgaaacagggtaaagccgctggtttcacagaggatgaacacggaaccctatggaacggaaatcgggtatgcgttccagataacagagaacttaaacagctgatacttcaggaagctcacgaaagtccttaatccatccaccctggcagtacgaagatgtacttagacttgaaggagaaatactggtgggttagtatgaagcgggaaattgcagagttcgtggccctttgtgatgtgtgccagcgtgtcaagtcagagcaccaacgaccggccggactcctccaatctctccaagtacctgaatggaaatgggatgaaattgggatggatttcatcaccggacttccaaagacccaaggtggatatgattccatatgggtagtggtggatcgattaaccaaggtagctcgatttattcctatgaagaccacctatggagggaacaaactagccgagctctacttcgctaggatcgtgagtctccatggcgttcccaagaaaatcgtatctgataggggaagccaattcacctctcacttttggaagaagctccaagaagagctgggtacccgattaaacttcagcaccgcataccacccgcagacagatgggtagaccgagcatctaaatcagatcctagaagatatgcttcgcgcatgtgtcctggatttcgggaagacctgggataagagtctcccctatgccgagttctcctacaataacagataccaagctagcatacaaatggcaccctatgaagcgttgtatggacgcaaatgccggacaccgctcttgtgggatcaagttggggaaagccaagtgttcgggactgatatcctgagagaagctgaagctaaagtcagaaccattcgggataatctaaaggtggcacagtcccggcagaaaagttatgcagataaccgtcgccgtgacctggaattcgcagtggacgattttgtataccttcgggtcacgccattgcggggtgtacacaggtttcggacaaaagggaagctcgcacctcggtatgtgggtccttttcgtatcgttgcccgacgcggagaagtcgcttaccagttggagctgcccgcctccttgggcaacgtgcatgatgtgttccatgtgtcgcaactcaagaaatgccttcgagtgccatccgagcaggccgacttagagcaaattgaagttcgcgaagacttgacctacgtggagaggccagtgaaaatcctggacaccatggagggcaggaccaggaaccgggtaatccgtttttgcaaggtccagtggagcaaccacgccgaagaggaagctacctgggagcgtgaagacgagctgaaggcagcccatcctgatctcttcgccagttcttccgaatctcggggtcgagattccgtttaaggggggtaggtttgtcgcgtccaaaaacgactctaaaatacatcctcaaaattgtgcatagaataagtaaaatccatgtgaaagcctccaacaattaaaatgtgcaaagttaaaagtcgaataaggcttggaggatttttgtatatttcctaaaagcctaaaatgcgtaaataaattttagtggaattttca

SEQ ID NO: 7552 - DNA, 22088 bp, Oryza sativa
tattgcgcaataaattatttaaggatttttgttatagtaataaacacagtgaatcttctaaaattcataactaattcatccgagctccgtttaatcccattcaagtctcattaaatcaagaaaaatgtgtagaatccattaaaaatggttttgttccctgtttcagtagtcttatagcctgtttgcaatgtttgccttgtatgtcgctagattccggcaattccgacgctccggtgtacttcgagatagtcgccgaggttccttcagcagcagagcaaggcaagtcatgcttgtcacttgatcatattgatcctatattgcaaatgtcctaatgttttctttcaaataccgcatttgttttgcaatattactatgggatggttacctattgttacagccatgctattttgataccatgctcctttgttagcttgggttataacatgattagagttaggactagggtttgcttagccatgcttagttcaactagcacacaatggggagatctcatttaaaacctagactataggtttatgtgataatgttggattagtgacaccgcttgggtgttggttaattaaaatgaatcacatggtgggctgtgggtgcatggttctgctggtcgcacccatggcagttaaggaccggttcgcgggatgccctggaagaattcatcgtacttaccacaagccagcgtgggcaacggctgggcttgtagtgtggctttcctctagccgacgcatccaggcaagggtgggcgtgatggagtttggatgggccctgcgacggcctatgcggcttccggattcacctaggcacgagaggggactgcccgctgccttgcgaggagtgggggtgaaacctgaggtgtggtgtgcttggttagagggggttatgcgaatggtcctgtcacggcctctttccgggatgtcgtggtggcatgtcggcgcacggaaacgtgtcgtggggctgtgtcttgtgggtacagttgtacacctctgatcagagtaaaactattcgaatagccgtgcccgcggttatgggcggtcaaccagattcaccgtgattagtttcaccctagttagcttttggaactgattagttcaggtggtggtttgggcctgttgcaacgtggtgtaacgttggacagtgattggttaatatggattaattactacaactgttttactgctttcaactactgctttgaaatgccggctttatgcaaaagaacctttagcctcccttggatatatcttgcatcatacctcctcttccggtgtgacttgctgagtacagtgggtagtactcagtcttgctctcttttcccccacaccagagttgaagtcctttccagttgaagatgtctcgaagaggttggtttcgtcgctgctgtcaaggatgcctgtggaatggagtcgcccgctgcaggagtcaagtcttcaggcttagctcgcttttatctttttccgctgcatttgtaatcttttatatttttgtaagacgtggatctgtatgtcaacaattgtcgtttgtgtaccctggctggtcctggacaggggtttaatgcacattcagcttagaaattctggttcgtgaatttctgggcgtgacaccaagcaacctggtaacgacatcgatgtgtacctaagaccactggtcgaagatcttaaactattgtggaagaaggaaggtgtccccgtgtgggacgaggacaaacaggaggagtttaacctacgggtgctgctgttcgtaaccatcaatgattggcctgcacttagcaacctatctggacagtccaacaaggggtacaaggcttgcactcactgtatggatgaaatagaaagtatgtgtatcttaagcactgtaggaaggttgtatacatgggtcatcgtcgattccttgcagcaaaccacccggtacggaagaaaggcaagcacttcgaacataaggccgaccaccgtacgaagcctaaacatcgcagcgagaaaacagtgtttgctatggttaaagatcttaaagtagtgttcggaaaggggcctggaagccagcctatagagagcgaagatggtcacgcggcgatgtggaaaaagaactctatattttgggagttaccatattatgaattcttggacgtacgccacgcaatcgacgtgatgcacctcactaagaacctttgcgtaaaccttcttggcttcctaggtgtatacggaaagtcgaaagatacactggaagcacgtaataatctgaagcatatggaacaacgcggcgaccttcacccggaaccaaaggagaaaggaagccattacttgagtccagccagctacactcttagcaaggcagagaaggaaagtatgtttgaatgcttggagagcataaaggtaccgtctggatactccacgaatatcaagcgaataataagcacgaaggagaagaagttcacaaacctaaagtctcatgactgtcacgtgttgatgacacaactgctaccagttgtaataaggggtatccttccagacaatgtccgggcaacaataacaaagctatgtgcattcatgaacacaatttcgctgaaggtcatcgatccggatagattagaagcccttcagaatgaagtggtgcaatgtctcgtcagttttgagtcgatatttccaccttcatttttcaatataatgacgcatctgctttatcaccttgtgaaagagatcagtattctcgggccagtgtacctacacaacatgtttccttcgagaggtacatgggtgtacctacacaacatgtttcctttcgagatttagccattccgctagttgctgcttatatatgttgattactaataaataatctctcacaacatgaaggtggcgtcgggcatggccatcccaacggacccttcaggtacttaccactgcaggcggccgattccagcaggatactcgaaggtcgaagttgagttggtcgaaggcgcgtacgaggacctcgagctggattaccctggaggagacggtgagacgcatctacgagacacaagccatgccattattctatggcgcaggcggtacatcatcctccctgggcgacaagcggtgtctcgtgcaccatctcctctggctccaccatctcctcctcgggatcctgcaccgtctcctcctcatgctccgccagcaccgtctccacctcaggctccagcaccgactcctcctcaggatcctgcaccgactcctcctcgggctcctacacctactccttcgcaagctcctcttccggcaccttcaaagtcaagggcccccctagctccaccgcctgcccacacaagggcaacgaagaaggcgaaagttgacgccgccaagaacaaggacccgaggtacgattgcacgcaagaggagcttgacgcttacgtggcatcagaagtcaagagacaattcaagcctcgaagtccagaaaagaagattcctatagacccgagtgtcaggaacttctttaggggtatgtctgcacctgtcaaggaggccatcaagctatcggactatgagcgaacgctgaagaaagcattttctggaaagtccaaaccagtccctcagcttggagagcaaccaaaccaggagatcgagccgttggtgaccggggaagacatgacgatagaagaatttattactgacaccggtctaactacggatcaattgctaggagtcgaaccaatagaaaaggcggaagtgaaatacatgtacgaactcggtaaaccgcttgtcaagcccgagctggtgcagtccctacccacacaaatgtacaagttccatcaactgtatatggagatgagcgccaccggtagagagatgatcggagcgaggatcagggacccggacttcttgcaaggagatgacattctctggatcaatttcaagggaatctacgaactataccagctggacgcccttgacgtctctattatgagttgctggattttgtaagtatatcgtttagttatatttcttaattactacgtctcctttaattaattaggtccttgtatataagtagactatataaaataaaatactcccttttatcgttgtagaatggagattcaaagggcccgacggcggagggttttcgatactggattcatcgaccctcggaaagtaaatgtcgcaatgctcaaccaatatccgcaagacacagaggacaatctcgtctatctcctgaaggcgcagcattacaagacgttcatactgttgccgtacaacacagagttagtttaattttactgtcttcctacataccaaatttcattcccgtacgaacttgctaagtgtttcatatgtaatgcatcccacgcacattgcagattccactgggtgcttttactcttcgacctgtcggcctgcaccgtcaacgtatatgactcaatggataaaaaagagtctacgtttgacaaggttttcgaacttatagacaggtactgtcataagttcctctgttaattaagaaattcttgttatgttaattatttctactacgaatcatatctttaaactccatgtagggcttggtattggttccgtcgtttggtccgcggcaactggagagaaagacttaggcggaagttcaaatttcctgtgagtacacatgctctacatttatatttcttcgattcaaattaatacatacaagtgtatattaattagatctcacgccgttaatttgtcatttatttgtagtgcgcaaagcaaaagcagggaactaacttgtgcggctactacgtgtgcgagtattgccactgccttgcagaccaaatcatcaccacaagagagctcgatgtacgtacaaataaattcaaaatttcattacgtaacgatttcttgtttaattactaatcaatttcatacattcatatagtttatttgcatgagggataacctgaccacacacaaggaatttatcgcggcggttcaagaacaactcatgtgattcatcaacgaagaaatccttgatcccaagggtgaattctactatggcggaaacacaattcacaggtccttagcttctgagctagcgactactactacgtcgaaatcgtagctagctaggacatataatggattgtaattaatacatgactacatatgtttctatatgcatgtgtacacattttctataatgtaaatatattttggtcatatatatatatatatagacacacacacacatatgcatttgcataacatatatatgtataaatacatatatattatgcatgtacatatgtactgaaccatatatacataatatatatatatatatatatatatatatatatatatatatatatatatatatatatatatatatatatatatatatatgtatggtttatatatatatagataaaccatgcagcaacagggccatgcaaaaaaaaaaggtcagcttgatctttagtcccggttatttcacccgggactaaagatagcgatctttagtcccggattggtagtcccagtttggaaaccgggactaaaggggggttacaaaccgggactacaaagggtttctccacccgtgtgtaaaacaaaataaagcaaacaaatactcaaaaggacatactccctccgtttcacaatgcaagacttgctagtattgcccacattcattttgatattaatgaatctagacatatgtagattcattaacatcaaaatgaatgtgggcaatactagaaagtcttacattgtgaaacggagaaagtataaactttttttagataatggtaacaaagaaaaacatagtattcagtcaaaaaaaataaatcatagtaatactatgttttttttctgaaaagaatcatatgtgctattgacttttggatacacgtttaaccattcgtcttatttaaaaaactttacataattatcgtttattttgttgtgagttgttattactaaaagtattttaagcataatttatatcttatgaatgtaagatgaatggtcaaacatgtgtctaattgttaacggcgttatctattaaaaatgagtacatacatggacatgactataactatgaagaaaaatgttaagtaacatgtaataagatatttcgtcatgcgatcggtaagtatgaaattagtgtaagtttagttccaaatgatttaatctagcttttctgcttgtattttaatcaagtaactaataataagccttatatgtcttcttatcggaaattagccttccaaaagtttgctaattcatctcatttaaacaagttcaacaaacttaaaatttcagtacagtagtgcaagttcaatacccacctttgtctgttttttgtgttagaattttaatcgtgcatgcatttgttttatgattggcctaacgacatgttcgctaactaatctctctttactcgagtaattaacctatgtcaaggttagggcagtcctatattgcaagacctatgattcaattaatcttttcctgtaatttaatgtatttatgagcgtgttggaaggagcgtctacgaagaaaaggtcaatgctacgacgcccccattaattccacaatcttctgtcttcacgtttggaaaatgaggaaaatatctcgacgaaacgataaaaacaaggaaatgtaaataaacaactaaaaatgagtgaaaaagataagtcaacgagaaacaggagaatatgatgacactcctccatcgctcgatgatcacttcatgttaaaaatctctatgacatatattgagatctcgctatctcgggcaagatattatttgaacgtgggaatttggttggattttgtccaaattgcttgaaattcaactaaaattgtcaaaatttaaaaattttcccataagtttacctagagatattcctatcttgtgtgccctacatatttcaatgaggtcgaaaaaaaagccctacatatcaatgtttcgcttagcttaatgcagtaacacaggcattgggatctcgatcttgttactgggtgcttcacactcacacatcgtaactctatagttcgtggggtgacaaaaattggagtgccttcccaggtttcttttcgattcgagttctaggaccagcaccgtagagagtagtcacaatgttaaatactatcagtagtttctatattttccggggaaccattgtttatatataagacagagctataaaactattcacataaaatttgtcctggcagacaaatttgcgtcgttatgcacacactcgctcagcaaaaatgactcaggtggccaaagtcctttcgctggatttgaggaggcactttgccccccgactatcatcggttgcatctgatcaattcacatgcctttgtgccctcctggctgagcacccagtgacaaatggccaaatggatgtgcgtaggtcaattcataacaatgatattctgaagacaagccatgcatacctagctgaatgttgcggacttcccccctgccccaacgggaagtttatatggaataataaggctccgctcaaagtctagttctttgcctagctcctggctaaagatcgactcccgacgaagagaatccttcataagaaaaacattgtgtcctcccctaactgtgatctttgcaattctcctgaagaaacggcttcgcatttgtgtttgcattgcccttttgctgtggcattttggaacaaccttcatatccatatcaacattacatcaatgagcgagctggcctcccttctcctgcctcatcaaattcctggcaaacattttagggtgttttatctcttgtgcttctggtgcctttggaatcatcgccatggagtggtcttcagacatgaagaagcttccctgctccggattttcactatgtgtgtcactgaagccacaatgtgggctgagcgactaaagtttgatgatcgtcatgtagtctcggcttggaaatctcttttttcttcttctattcgctctcttgatgtataactgaacttcctgttcctattgcgtcctaatgatcaatgaattcaagtggggaatctccccccccccccccggtgaattttctaaaaaaaaaagataaggaaaaaaaaaccattcttcaagatcaggcaagaaactagtaccatatgtaactctactaatacatatactactactttaacatgttaatttaataccactaaactcttatcatattaagcatattatgtagtagaaaagtcatatttttcatgattaaatctcttgctacatcaccatcaatcttaattgttagctcaactttagttctatgaaaccatccaaggtggagcattgagaatgcccttacctatgcttggacatctgcagtttgtgaaggttctttgaattgtttttgggtacttttcattgttttctgaattttacatgttccaaaatgactttaatttgattttaaaattttacttgtgttgttccaaattctctgagcatggtagtttttttttaatttttttaattattttaacagtatttttaatgcaatatatacgtttttattaatttggtggtttcgacctaatatttgtttcaatccaagcccatcgccgtggcactgctttctttgaaaagcacgtctcattcaaaatcgcagaattaatttcaatctattttttccctcgacgcatttattatccagccttatttttatgtttgctaataagaaatcctagcttaaattattattgaaaataacatttcaaaatcttatctttttagggaaaaaaaagctaaagtggggctaatatgatgaaaaattggataatgtgccattgtcaaaactgggtttcgccgaaatgctaccccgcaaaagagattcgttaaaatgccatttttcaccccgtggctacaagctataatgctatccgagaccaaattgcccttgccttcctctatcccccatcttctcttccaactccggctatccctgttttcctcatcctctggcgcggcggtgcagatggggaaaaggcagcaccgagcacgtgcgttggctggcggcggtggtgcaaatgggggaaagaatgctgcgacgcagatagggggagaaggcagcgacgtgcgtgtgcttcaggcggcggcggcgcagatggggaagaagggagcggcgcacgtgtgcatcactggtggcagtagcacagatgtgaagaagacggtggcggcgcagatggggaagaaggaagcaactacacatgcctaggtaagaagaaggagaacgagggtaatttggtcccgtatagcattgtagcttgtagtcatgagttgatattggcattttaacaaatcccttttgcggagtggcatttcggtgaaacctagttttggcaatggcagaatgtccaatttctataatatgacatgctgagatagctaaaacgcatgtcattgaggccttatcttttcgctcatgcttatcagcggaaactaaaatttgattgattttaggtttttttatcatcgtttattttcccgtttttttgcttttaaatcattaagaatacgtatataaaagttttattttaaattattttttatttataaatatgtcgcttgacttagttcctgaaataagacaaacgatcgggctgtgaagttgtatgtaatgaaagcaaatcaagtagggctatcactacagtagtaccaaaagtaaaggagaaaccgtacataatttgaaagaaagagaaagtcagaaaaccacataattatgcatggctctcgctgcaacttggtccgtgacccacacgagtcctattaaaaaaaaatcaaaacagcagtagttgagcttatttaaaaggggagattttcttttccttttcatttcgagtccacatacgtttggaggcacagaaaaaggaaaaaaaagaaaagaaaaacaaaaagtcagaacatctgcacttgatttcttattcacgcaactccattaaagtctaaccattgacttttttcccctgcccgctcttacacggcacgtctcattcaaatatgaactctcgcacagtgaggaatcccaaattgagaaggaaaaaaaatgaaaacaaatttctttttcctctgacttgtagctctacaactacgcgtcgttttctttattatttattcgtgtataaaaacttttcctttcttaattcttgccaaaaaaaaaaaactggtcacgaataatcgtctcctaaaaaaaaaaagtctctagtctcagcgcgataattctcccgcgaactgcgcactgaccccgcgtgaccaattgacatgtcggccacccaacaagtgggcccacctgtcagtgactgtgggatcagggagcgtctggttcgctcggtacgcgtagcgcgatgcggtcgcttgtctcgtagttggaaccaactagcccccgtgaccccacaacgcgtcggattctgattgggcgagacccacctcgtggccactgttgcatggtcaactttcccacccatccgagccgtccatcccatccaacggcgcgtacggatccaccgcctgacgccggtggcgccggtcgacgatccatcccgaccgtccgatcgggctcgcgcgttgactataaccggtccacgccgtgaccgccaccggctgctcccggtgaccgcgtcgcgtcgttttataaccccgactacgttagcctcctcccacttcttcttcttcttcttccccccatttctcacttactccggcgatcaccgtggttgagcgtcggcggcggaggaggaggcgatgattaccatggatctgatgggtgggtacgggcgggtggacgagcaggtggccatccaggaggcggcggcggcggggctaagggggatggagcatcttattctgcagctgtcccagactgggacgagcgagaggtcgccggcgccggcgcaggagcagcagcaacaggtggactgcagggagatcacggacatgacggtgtccaagttcaagaaggtgatctccatgctgaaccgcaccggccacgcgcggttccggcggggcccggtggtggcgcagtcgtcgggcccggcggcgtccgagccggcgccggtgaggtcgtccccgtcggcggtgtcgaggcccatgacgctcgacttcaccaaggcggcgtccgggtacggcaaggacgccgggttcagcgtctccggcatctccgccgcgagctcgtccttcctctcgtcggtcaccggcgacggcagcgtgtccaacgggcgcggcggcgggtcatcctccctgatgcttcccccgccgccggcgaccagctgcggcaagccaccgctgtcctccgccgccgccgccatgtcagccggcgcaggccacaagcgcaagtgccacgaccacgcgcactccgagaacgtcgccggcggcaagtacggatccaccggcggccgctgccactgctccaagcgccggtaaaaatcttcacgactccctccatttcccccacctcgaattgaactcatcggaattaattttccaggaagcatcgggtgaagaggacgatccgcgtgccggcgataagctcgaaggtggcggacatccccgccgacgacttctcgtggcggaagtacgggcagaagcccatcaagggctcccccttcccacggtgagcaccgcactgccccgccgtctctcctcactccgtcgacattaacactcaaaactaatcgtaatcccctcatttttgcagaggatactacaagtgtagcacgctgcgcggttgcccggcgaggaagcacgtggagcgcgacccgaccgacccgtccatgctcatcgtcacctacgagggcgagcaccgccactccccctccgccgccggccaggaccacccgccggcgccgcctccgccgctggcgctgccgctcgcctgagatacccccggtgaagaagagtgagaattagcttgtcggtcatcataattaccgttagaaattatttttttcgtttttctctctttttttttcttttttttactgcatcattgtagaactagcgtgtaaaacaattttaggagactttgagactgagcttttactgaagaaaaaataaagcagaacaaaaaaaaaagagaagaaggcgatcgagactatcagtagagtagagagtagaaaaaggcgtgccggaattgaagattttgaccgcgcatgcgaatttgtttatcaactcgggttcaatcccgcggattggggtccggtggaggtcaaaaggaggtggggcccggggtgttgaacgttgccccccgcccacggtcctcgtgcggggcccacgcgacagtgacggggagggtccctcgtgtgtgtaagtgtggacgacgcggtcaaagaacgcggcgtggggtggggcccaccacggccttggcctccggcgtccgcctcgcccgcgctgccaacgttgactcgtgtcagccaggctggaatcggattcgctacgcctctctgtctcactctctctctctgtgtttcgtatcatttcgaatgggacattcgagttcgatatcttgatgcgctgtttggagaaagttttataatagaggaaattatcaactttaattaagtatgataatacaaactgatattataatatggagtataaacgcatacgttcacaatgtctcacatctatgattactcacgcacaccctacccttacatatccagaagactttggtgatatattttatattgatgaaatcatcgtagacgtctgatcgtcaaccggtgcattgctaacataaaaactaattaccataaatatgaatacctataataagtgtagaaattgaaattaggtggactggttccatcacaagaaaatctaaccagttgacccatgctataagaaaatatgtatataaagttcttttaaaaaatacatttggatggtttaggaagtgttctcaccataaacaaccgagttaggaagatttaaacgtaattacactacaattattttatatttatatttgataaattttatgaagaaaaattgtcatcaaatgtattgaaaatttgatggggattatgtattggggtgttgctgtttgtttatacctgtaggaccatgatgtgttacatgaaggattgtcaatatcccgatcctgactatcttggttacatccctactacgtttaatgaatggagtagatcggatcggaaaaaaaaacctcaatcattgtctagggaagtagggattatattattagtatactactcccttcattccaaattgatctatatatagtttttttaaggttatttttaaatgatctacgacatatttatgttcatttattaagtctattcgttatttgtgcattggagtaaatggacattaatgcatgcatccatgcatataagtatttataacccacatgcaatatcttgatttgctattggttaggaaatagtatggatggtgtatgcattgagtttgttgctaaagtaaatatagtataagggcacctacaatggttatctatagactctctacaagagatccatgtcagcatattttcctactggaaagagattaaatgaagagagagagcaaaactatctactaatctggaaatagtctatagagaaaaacgaggcaatggattagagcaagttcaatagtatagccaactaccagctccaattcatctatagccaatctaatagctcattcatacaatagttacatgctacactattaatatctggtcccacctgtcatgcacacactgtgtcttggagtccgtgatacagctggctacaaatctgtagcccgctgcccttctctctcttcatttatcttcttaaaatatgtttgcagctggcttatagcctgctattgtacctgctcttagagagctatagatacccatgtagacatgtcattgaagtggtttactattaatctagtctattgctgagatgtacatgttttatagatagcaccttactttaccattgcaggtgttctaagagagttattagctcttttttttatcttggtgtacctatgaaatatgtagatcaatttgaaatgggggagtattatcatggtgattttgctagatcttgacagagattttattgattagtggagatgttgctaagccatgagattatacgtggtgtttactcatcaacctcgttcctaattcccgcattacgcgtgagatctcctccggatggagactgtcaccggcttcgagctataatgacgtgatctctccgtttcatattataaaccgtttgatatttttctagttaattttttttaatttgatgaagtttatagaaaacatagtagtaacataaaacaaatatattataaaaatatatttaatgaagctaatttgatattttatatattactaaattttttctataaacatgatcaaacttaacatattagaaaaaatgttaaatggcttatatataagatggagggagtagtatgaatgaggagtggacaagtgaatgataggagagagatccaacagtgttgagaacggctgtttgacttggctgggaggcagcctgcatgggtacgtgtccgtatgcccactttgatacatctccgttctaaagcacgtgacgctggtcccacctgtcagcgagcacctccccttttggtttggcaattctggtggggccggaggatgctagggagataggttgggtttggattgatttttgctttggaatttggtttgtggatggaagcggtggcaacgttggaaaggaaaggggatgaaaggaggagatattggtgttggtggtgggtttgagagagcaaaagtcaaaacggcatctttcatctttttgtgtccagaggggaggggggcaggtgggtttgtcccattgggtgtgaaactgtgaatgtgtgctcttgtgtccctaccaccactatgctttggaggctggatctgatgtggccttccgccttcgatgccgtctaacctaccactatgagcaagtttaatagtatagctaactactagctctaaattatttatagacaacttaatagttaattcatacaatagttatctataaatatatactacacaattaatatatagtcttatctgttatacacatattgcgtcttagaatctgtgttgcagctagctataaatctgtagcccgttgcgcatctctctcttctttaatcttctcgatatatgtttatagctagtttataatatgctattgtacatgttctaactgcttgttcgactagtcatttttgtggttgtacctgtggttagggtttactccctccgtaaaaaaaaagacaaaccctgggtttttgtgtccaacgttggaccgcccgtcttatttgaaaaattataaaaaatttaaaaagacaagtcacgcataaagtattaatcatgttttatcatctaacaacaatgaaaatactaattataaaaaaatttcatataagacggacaatcaaacgttggacacggaaacccatagtttatctttttttgacggagggagtatcttttaatataaaaataaaaaccgcttctcatggtttatcgaaaaccgataaaaaactgttaaatgtggatagaaatgattgaacgagagagattgagcgagagagagaattgaacacaagtagagcgaatcgatggatttctcattgatcaacagttcatttatacaatgtgaagcggtgtcaaccgcaagggacgcgatgtttgtcgagagggacgccaaagggagagagaggagcgatctcctcttctctgccagttagtttaggaaccgttgttcctattttcttgggtggatgagatcacccgtagtttcttaacactcccccttgatcgaatcaacctgtgatcattgcttatttattgttccaggtatctgtaaagataatcttagaaacgataaataattagtaattaaatatatcacgtaaaactcctcgaaaacccagtgggaaaaataaggagagaaccatgatgtattattgactatttttagatctctatgattaaagctcatagtatgatccaaaatagtataatgtctacagttattatttagtaaaaaccccagtggggaaaagccaaatgataggacatataagcttatgttgatattatctcgttaaaaactttggatgagaaaacctaaagggtaaaactcatacaaaggaaaaagagtataatatcacgaaaataggttattttccagaggaagatactccccttgaatcctgcaaatttttaagtcgtctcataccaattccttcgacatatttaaagaatgtggagtatggtagagattttgtgaataaatcagcaagattatcacatgacttagtttgcaagatatttatctctccatgttgctgaagctcatgaggataaaataatttaggagcaatatgcttagtgatgttgctcttaatataaccagttttcatctgaacaacacaagcggcattatcttcatagataatggtaggtgattccaatgaaccaataccacaagatgttaatatgtggttaaccattctgcgaagccatacacattcacgtgacgcctcatataatgcaattatttcagaatgatttgtggaagtggctaccagagtctgtttagaagacttccatgaaatagcagttccaccctgtaaaaatacgaatcctgtttgtgatctggcgttgtggggatcagatagatagctagcatcagtatacccaattaaagtcgaatcctggttctttttaaagaaaagtccaagatctcttgtgccattaagatatcgaaagacattcttaactccagtccaatggtgtttggtaggagcagcgctatatcttgctaatagattaaccgagaaagcaatatctggccttgtactatttgcaaggtacataagtgcgccaatagcactaagatatggaaaatcaggaccaagtacatcctctccatcttcctttggtctaaatggatctttctccacgtctagagatcgaaccaccatagggattttggaaggatatgacttgtccatattaaatttctccaaaattttctgggtatatgcactttggtgcacaaggattccagaaggtaaatgctcaagttgtagacctaagcaaaatttggtttgacccaaatccttcatttcaaattccgtctttaaatgatgacgtgcttcattaatatcttgtgtattgccaatgatgctgagatcatcgacatataccgaaataatacaaaatcctgtgggggactttttgataaagacgcacgggcaatcatcatttttagtgtatccctttagcgaaaggaattcacttaatcggttgtatcacatcctgcccgattgttttaagccataaagtgacttctgcaacttaacacaatacatgttacgatttaccttctgattcgggatgtcgattccaccaggaaccttcatgtaaatatcagaatcaagtgacccataaagatatgctgtcactacgtccatctactgtataaatagacgattttgtactgccaatgatattaaatatcggaaagttataccactcataactggagagtaagtttcattgaaatcaacgccaggtttttgcgtaaaaccttgtgctacaagccttgctttatatctcaccacctcgttgttttcgttccgtttccggacaaaaacccatttgtatcccatagggaagataccacgaggagtaggcattacagccgagaatacatctcttttgtaaagcgaggctaattctatgtcaattgcgtccttccatttgttccagtcaaagcgcttttggcactcttttatagacctaggttctggatcaacttggaggcattcagcaatttgttcagaaaaattagtgtcgacaattgtagctcttctatcaaaagattctctagtttcagagtaattgatggcaatttcatcaacccttatagactcattgtgatctcccgaaacaatgtgtctatggtcttccgaattcctagtctcagcattgtgcaccaccgagctaggttgcagactatcatgatctgcttgacatatagtatcaatttggtgtgtaccaactaaaggttggtttgcatttaccgtctttctttgcttattagcaattgtttctcgctgagtggccatacttcttcctctctttttagtgagtggaagttgagtggttttatttggtacctccactctttctggcgcattctgagcgggaatgaaagatttagtcacacctttaaaattggtaaatgcatctggcaggttatttgcaagtctttgcaaatgtataattttctgaacttgaagttcagcttcagtagtacgtgggtctgagactggaataccctgggcatcccaatcaatttcctggcattctttctggtacttgaattctccccctaatgccggaaaatgttcctcatcaaagatagagtcagcgaaccgggcaataaatagataacctgtttagggttctaaatactttatgatcgacggagatttgaatcccacatagacccccactttcctgtgtgggcccatagcggtacgctatggtggtgagatcggtatgtatatagcacatccgaacttacgcaaatgggaaatacttggaggatttccacgtactaactgcattggggaagtttcatgatatgcagttggtcgtagttagacaaggtcagcagcgtgcagaactgcatgaccccaacacgacgaaggtaatttgcaattcatcaataatggtcgagcaataagcttaattcttttgatcaatgattcagccaaaccattttttgtgtggacatatggaacagagtgctgaacctgaattcccaatgccatacaataatcatcgaaagcatgagatgtaaattcggcagcgttgtccatacggattgattgaatcctatgttcagggtaatttgccttcagccttataatttgtgacatcaatttggcaaaggcatggtttcgtgtcgatacaagacacacatgagaccatctagtagatgcgtcaatcaaaaccataaagtacctgaacggtcaagatcttggcacaatagggccacagatatctccttgaatgcattcaaggaatttaagtggttcggctctgattttgagataagatggtctcaaaatcagtttcccagtagcacatgcagtgcatacgaaatcagaggatttgggaaatttgtcagtgatcaaatgatgaccaatagagttgccaataatttttctcatcatcccgataccggggtgcccaagtcgatcatgccaagtgtggaatgcatcaacattttgaaaaattactttgtacgcaacatgtgcaatgggcttaatgtatgtatagtacaatcccgatgtgagagatggaattttctcgcaaatgcgtttgccatatccgttttgtttcgttaagagaagaaattcttctcgattatccatatgagtttcaatgtgaaacccattttgacggatatctctataacttagtagggtacgggttgaatcaggatacaataaagcatcctcgattgtaatttgtgtacccattgggagtgtaataattgctcgtcctgagccaactatcacagtatcgctcccagcgatagtcaaaactttgccttctctctttttgagagtttgaaagtatttgatctccctaagtatagagtttgtggtaccactgtccacaagacataattcctctccaatcggagcgatatccttagacatctataatgaaagaagaattgcatgattaagaattctttatccaatatatatacatacatacaataattaaaacatcaaatacatagtatgacgtttacatatgttaatagtacatactctaatgactagcaagccatacaaccttacaatacaagggagttcgtacttatctacttattacaaccaatattatttggcaaacttataggatatcaatatactgtttcaatcacactgagataagggcagcttcatctccaagtgggacgcaccgagatcattgcaaatctccaagtgggtccgttgagcagtattcgatgaacatatcgtccatcgtagagagtggagcgacatcttctgggagaacattgaggttgctctctggttcagcaggagcctggtgagaacttgcaacctcagggtgctcttcatgtgtgagattgaagtgtgcttcaaatcttgggttctcagaagattttttgtccttgagggatttttggtacaagaggacaagatgtttcgggatgcggcagtctttagcgacatgagtgtcagatccacacctgttgcaatgcttgttggtattgctacgaggttgtggtgccttacccttcccttttcctttctttcgacccttgaatttgcgcctgttgttggtgcgtttgcgctttccagtcagattcttaggattattcgaagaatttcccttgaatcctttcttattctcagcattattctatacattgaagtgcacctcaggcagtggagcagagcccggtgggcgctgttgggcattctttaaagaaagctcagggtgcctttctgcctgagtcaatgtatgtataagcagagaatgtttctgaaaattgttagcgcgatactgttgagtcagtatcctgtcctccggaagtatagttgatagagttttctctatcttctctgcctccgttggctcttgttcgcaaaacttcaacctggaacaaatgttatgaacagcatgattgtattctgccacagtttgaaagtcctgtaggcataaatgaacccactcataattagccttaggccaaatgagttccttttgctgatcataacgctcttttagagctttccaaaggttgagagggctcgtctctaacatgtattcatgtttgagatccttgtgaatgtagagtctcaaaagaaaaagggctgtattgagcttcctgggctcaattgccggatccccatcattaggctcctcaattgtatttagaatctcccgagaggcaaaattgattttgatatcagaagcccagatgggatagttagtcccatcgagggcgagttcgtcgaactcttttgttgccatgtccctacaatcatggttaacattatcaatttacagaggtaaattaataaaaacatgatattaagggtgtaatctcaatgcgaaatgtaaaacttcatattctgtaatgtttcgaaagatgtaggttatggacctgacaattttgagttagaattcgaaattaggtggcacaatgtggataatctctaagtaattaaacagtggagtagatctcttaatagtgggcaagttatacttgctgcctaaaacacggtctccaggcaaatatattctggtgaatataccgcagccaatgtttaggactccactaccttgtgttcaaccaaatttcaaataatctcatttctcaaaacatattcttggaaaagaacacatgtgggtaataatcgtgagatgtagacctctgtgagatgggcgaggtgctcgccgcctaagttatgaccagtgcggccaatttctaggactccatcgggtaatcatctcaaaatgtagaccactttatgatgggcgagatactcgctgcctaagttatggtcgatatgaccaaagtataggactccatcgacatgtgattaatttctaagtcaaagtgtgaagtggaacatgcattaaatcctccattaattatgttggacataattaaaagaatttgctaaatcaaaatacaaaatttatagaattttgtaaattaataaagcgagaaagtagagcgtgtcttaaaataatatgcaaaagacatgttattaagacaacaataaatttagtgaaacagagtatttaaataaacacctatgttaataaacacataacatcagtggtctataggaccattacataattgtttgtacaactgatgaactgtttcgactaaattacataaaacatagggactaaagtgaaattgttgctgcaaataaaataaaaaaataaaaactaaatttaaggggtaaatgggtggcccccccccc

SEQ ID NO: 7553 - DNA, 27990 bp, Oryza sativa
tggggcggaggggtacggtgcgtcgagcgttttagttataacgcaccctgggtgcagtttagcgcgtcccagtcttatataacaaaattatacacttccaagagtatagctagtctacaatttccagatttccttcatgtctaagggcaaaaaggtccttttcattgaaattaaacattcaactaatggaatgagtatgaaagggatcaaaatcaaaattcaggggcatacaagggagtggacaaaactcgagggcatagatgggattggctaagctttcaggggtatagaagaaattttctccaacactcccttttatagcttgaaagggaaccaattagaaacttgcttgttgtggtggagggtatggtcaaatcggttgtggccatggtggcaccaattgttctgtggcccaacatgagttgaatctggccatggcgcatgccacaacacccatcctcgaaccacaccacctaagtaaggaggtggccatggatttctcttggttactccatcaacaacttcttgtcgtctttggtgcatttcatcgagcacttgtcagacatctcattttccacactgatgacggtgtcaagcttcagcccatgaactccatcaaatctgtgattaccccccagaggcctagccatgagaaggaatgaacctactacaagcgacggtgttgacttcaaggcccattattaaacacggcataagtgtgttctggtttatgttagcaattgatatcggtgccaagttactcacggattggatgaacacaacaatgtctttggacacacatgccttgttttagaacaaaaccacgacttcacacacatgccttgttttataacaaaaccacgacttcatcggtaccacccttgacgtcgaggcccaacatcaaacacttggcatccgtctccttggaacaatcaggggtttcaaggtcagggttagtgtcgaggctggtgcatttcatcgaacacttccaaggtatgactttgggaaggtgcttggtgacaatgtaggtaacgtgatccttgtccttaccatcctcaagctccaaggtgacaattagaacggtatcctcgttgatgggcttgaactcgccgtctcctatgtgacgttgttattggggcaagccgagcacatggtgggttctataggaggcgatgccatgggtggttgagatgatgccaccttgaagatggccgtggtcgggtggtaatatcctccatgattgttgttcttcaccgcatggactttctccaacaatttggttatcttctccccacggctaatcatggtgaacatggggtggttttggcagagaatttgtttagcaaagaagaggttgtgataccaatttgttatgaacccactttgccaacaaaaatattaataggtatcagtacaatgaacaagtgcttgagggttgaaagaagcagttagtggggttggagtaggtcagtcaaaaaagcttgagactcatgagctgctcgagctcggctcatctcagacttgactcaagctcggctcggctcagctcaagcttctcacaagcctagatgtatgtttattttttcttttatataacaaggtagtaggttaagaataaattagtgtatatttatgtaaaagtaagttttttttggtattatatattaatcttatgttcttctaacatttttctttagtattgttaacttaaaattattgcttttctaaaatattaacatcaaaatatgcattgacatatatactcagccaaactcatgagcctaaccgagctcaagttgaacctacttaaaagctcgtaggaggattaggctcggctcgagctccagcctagacaggcaggatgactcgagctcagctcgttgacagccctaggttggaggtagaagatatatgggcacaagactagaaggttctggaaacttttagaccatgtagaggaaggagggtagggaagtagatcagcacactagtagaggaacgatttttccgtgcggtcaaaaatgatttttgtgtgcggatcttcaaaccgtctggaatgaagtgtccctaaaaatcgctatttttgcatgcgggtgacgcacccgcacgcgaaaaatctgtttttcatgtgcggggtggttatgtcgcccgcacacaaaaataaaaaaccgtgaaaaaaataaaatccaaaaaaacaaaaccctaaccctaaagctgacaccgccgccctcctcgcggtcgctatcatcgtcgtcgtcaccgtcgcggtcaccgtcgtcgccattgccatcgccgtccgagcccgcctgctgccaccaccaccgtaggatccgggcgggggacggctgccgtcgccagatccgggtggggggcagccgccaccaccggatccgggcggggggcggtcatccaccgctgcgcgcatgcagccgagcccgccactcccggtcaccagctgccgcgcgcacgccgctgagccacgcggtgctgctggccacgcccgacgttgtgcgtgcggaccatgcctaggagtgagagtgagagagaggtgagagagtgagagaggatagagaggtgagagagtgagagaggatagaaaggataaggatgaggatgggtggacgagatgaaatttttaagtgttgaggagtgaaaagaggaggaaggatagatttgtaggcaggtctttattaagaggccagtacgtgaaaattgattttcgcgtgcgggcatcttaagggtccgcacgcgaaaatgggaggccaatttttgcgtgcggacatgaaaacgatccgtctgtaaactaaatagctcctcgtccaggaaaatcgtttctctactagtggcaatgagccaagcctagcctctaggtcgccaccactgcaattgccggattttgctatttgtttgatacctccaagagcatgtattgttgcctttgttctcttccttgagcttagttgggatagcttcactaagctgccgtatcggcccgttgaaagcccactcgatcctatcataatcttgtgatttgcattccaaaatatcagttattgcacttcaaagatttctagttagtgttttgggatgtatgtgcaaattggatctagaacaaagtgagatatgcaggtaggcacattgaactgttgggttttgagaaagtaaaaccatcattccaccactttcttatattcaccaccacaagaaacttcatcctgtaccttgcctggacagtagacactaaagctacaaatgttactagccatccgtcttcaccaatttccgtcactacttcaaaatataaattaacaatttgaaacataatggtcacaggataacattcaggagtttctttatttaaaaaaccatgacattcctgtcagacaataccgccacatagtttttaaagttcctcatagctccatctacgacattgtgcaaaaactcgctcgacgcaatgaagagcctctctacacatgtgccacacacactttaccaggcaatcaaaaagtatgtggtcactagtttctgggaatccacaaatgagagagctgacactttcatgaccttgctgacctctttttttttaaaaaaaaaaaagttaagttgagcacattatgtcttcattggtatagaaaattcactacaaggcactaatgaggcacttttgaaaataccactatagtattgtaaagacatttgaaaaatgcttctgtagtattagaaaaatatttctacaagatatttttgttgtagtaatattctacagacaccacgtggtgacatcttctgcttgaaatgttttctaagtggaattgagaatcccaaagagtaaagtctatcaccggtccctaaacttataccgttgtgtcatcctggtccctaaactcgcaaatcgaccgttcaggtcctcaaacttgttcaattgtgtcatcccagtccctaaactttcatatcactcatctaggtcctccaacttgtttagttgtgtcaccctggtccctaaacaggacggtctaaaaattttgtattaaaaaataattcataacttttttatgtgaactctaatgaagacaaactttatattaaaattgtagcccgcgacacgacctataaatttctagttgaaaagtttttgaattaaaactgtttagggtcccaaaatattgttgcatgtttatagattttgaaatttaaattttaaaattacattttgggacaaaaaatgacttaaaataaaaaaaaatcaactttataagttgtagatcgtgtcgagggctacaagtttgatataaagtttgtcttcattagtgtgaggacgacccaaagcctaggtggtgcaacgctccaaggcatgtcagcgcgaaatatctggatggatggggtctcaaataaagcccaaataaatacggtaaccatccaacctcatcgcagaccctaacatgtcttgaagagtgcactacataggctctaagccatcggatatgaaatagaagacacaaccgttggaatagccacaccagtcgtctacgtcatacgcccgtcaaccactcgatggtggcgaccaaaagcataccccaaagactcgatctcaacaaaggcatattccccggttatctcaaccatttcaaacccatcctcatgtgggactagtcgcctaggaatgcaacatagtctcacataaatcatctcaagcatgatatccaaataataagtggttctaagcaataagcataattagtcttaataaggttctaagtagtacttggcgacaagccataaatattggttcatgcggtaagcgtgctacccaaaagcacataggcaaaccgactaggttaaatccctagttagaaccatcctggaaatctgcaacatcacaagctgcatcaaactcctcatccaaacagtcattacctgcataggggtctgagcaaaaacaagtaaaagaaagcaagaaatcagtacattaatcaaattaatgtactagcaagtcggaaacaatcctagcatactacatgttggccatattcaaggataagctgtgtataggttaatttgcataaataccaattttagttcacaacattttccgcaacggaattttataacaatagtatagagtaagtaaaacttaaatgtaaatggataaataacacacatctacccctcaaggtagatcatcaccactcgccatcatctcatcaccattcaccgaactttacccaagttcacaaacaaaacattccaaccattttccaagttcacaagagtttatcaaaatcaccaactatactcatgacacttcaccatgccgctcatgaccgtgagcacggctaatcgattagttttagactctgcatagtttgtacaacttttaagcccacatgatatgaatcgctctagtttgtccgatacccgtcggtatcaccacactctacacattgagtgtgatctagaggtcataacgaaaccgttacattgtttattgtctagcattgcaccagcacgatgtgtgttttacccacgctactagcaaggtagcgccactaagtagcgggcccacgctttaacctagcgccgtaaggaacccagcccggaatccctcacgaggcacgacaccgttgtattggacagactacccgctcaaatcatcacataccacttgtcattaatcaatttcatcatatcaccaaccataggaagttccgataagttaccaaaacccggtaacccatacccttcggcctaccaagatgcaaggctaaactctaaacaacttaataggttgaggccagcccatacttagcacatgtgatttgtactgttttcattagttggtgacatagagtggggtccttaatcgacccgggcgaatgctccccctatcggtgtacaactaccaccatatgtacaccactcgccgcccaagtctaaaaacaagttatctccattttcagttcacaatactcacacatttaaatttctgtccagcaacatcaaaataaccattttcatatataacatttatcaaaacgagtaatttacaaggcggtaaccgaatataagcatataacggcaatataagcatagtataatcccaaagaacacaataattttattcaaaagcactctatggttacaaccagcaaggattcaatatttcaaggtggattatgcagcaattaggtcatatctaccattcccacatttatattttttttttaccaaaagtaatactagctaacatatgcatgtttgcaatagaatcatttagcccaataaaacataggatcaatgtggtcaaaggaggggcaaacttgccttcgtttgcaaactcctgaacctggtcgtcaacaaactcaccctcttctccttcgacgtattcttcctctatacaaaatatgcgtatacgataaatacaaaaatgcataaaaaccaaaatgcatgaaacttatgcagtgagtgtgtgctggtctcaggtggtctctggtgaaggaatttttattttgtcactttttatttacagagatatgcattttacaattaaaaaggtttaaaaagggctatgttttattaagcaacttttttgtacagaagtgaacaaaattcctttttacaaagttacagagcatgactttagaaagttaacagaagtggtttcacaatttttagagctatattcaatttgttatggatttaacaagttctaggcaacatttatggcaaaacaaaaataaaggaaaagtttgtatagaaagtacccagttttattttttaaaaaaaatatttcacagctttatggatctaataaaactggtttcacaatttttgaagttaaaatgaattttctacaaattttagaagttctgctcattctctgcttgaaaccaaaatagaaatcaattttcgaaattgaattccagcagggtccacaggtcagtgaaaggagatttgcagagaggccctcggaagttgggggaatcaacccgcactccttctaccacctggacagcaaactttcttaagagtccctattcttttgtttatttccatcaaggttctactaatatgattcatggcagttttcagattggaccctagtgtcgatcagattcaagaaatgaagtccccagctagctcacatcgggaacagcaatggctgagctcggtctacggctcacctgcggcgatcggtggatcgaatcggttcgagaacaaaagagaaaatgtagagaacgttcttgcgcatccgtgagtggtggtggtgagggaaatggtggtctgtagcccatggaacatgagctacagcggcggtgtgtcttggtatgcccatgtatgtgcatgcagaggcttggatagtgcaaaagggttagtgcatgtgctctcatatggtaccagggtgctcaccaagcagagaaacggaggcagcgaggtccagggagcggtggagacggtggttgttggccaacggcagcaaaactccggcgtcgacgtcgccggatcgactcaaggcgcgaactgcaacttcgagagtacaggggtgttacggatgagccacagagggtgcatgcgcgaggaatccggcggaaactcaccggagcttggtgttgcttcggtggtgaggaacggcggccggagcggcgtcagcggttcgggtggccggcggcgaggacggtgacgcccaccacgtgctcgacagattggcctagggcaaaacgggtacgggtgagctcggcgtgatgcgtaggtcatgttccataggagggaagagagagggactcactggggatgcacagcgacgatgactaagtcgccggagccggggaagatgaccgagctctgggcattctgggcgtggggtgtgttttcttggacttggaacgcgatgtggggagtgtgctgttgcttctggtgctttgtcttgggaaataagagcaggtacaatagcaggctataagccagctgcaaatatattttaagcagataaatgaggagagagaagggcagcgggccacagatttgtagtcagctgtagcacggactccaaaacgcagtgtgtgtatgacaggtgggaccatatattaatagtgtagtatgtaactattgtatgaataagctattagattggctatagataaattagagctagcagtgggctatactattgaacttgctctaaggaagagtggagtgggggagtgagagagagagaggtggctggtgctctcattgtgttccttgggcatccattgggcatgggggatggtggatgctgtgaggggagagtgggaggctgtcatgtgggtcccagggggtgtggggcccaccgtcagtgaaagaaattcgaaaatagccttggaggcaaagtcaaagagggttgcctgccaaggatctttggaggggattcaaggtggattttgtgcagcaagaagcctgggctagagatcctcttggtcgagggtgatgtggagagtaaatgtgctgaagtggattgggttagaagtctctggtttaggtttgatggagggatgaacatgggttgacagtgttggttagcagcagttgatagtgcagttgatagctgattggatttttggagggagggaagaaagggttagagagtgatccagggtgttccactccttagggtgttagaagaatgttagtagaagacctgaaaccaaacttcaaaaagagattttgaaataaattttacagagagagcaagtttgaatctgctaagcagtttttcaggattttggagagattaaagtagatcaacgagttagcaaaccttactgaaaaactctgaaaatttgtgggttgatttctgacatatcaaggtatttttgagaatttttgtagaatttttggatgcatataattaccagattaattatttttgtgactctaggcctatcattgcatatgatgatgagatgattaagatccaaaaacaattaaaatcactccacaaccacatgatgcatttaaattaaatttagttcttaggtttacaggcttgggtatgttacaattagagttcacatgaaaaagttatgaattatttttaaatataaagtcattagaccgtcatatttaacccagataatattcaaatccaagtttagagaccggggtgacacaactgaacaagttggaggacctaaacgagtgatctacaagttttgggaccgggatgacacagtcaaacaagtttaaggatctgaacagtcgatttgtgagtttagggaccgggaagacacagcggtacaagtttagggaccggtgatggactttactcaatggcaaaataacatgtgccatttactgagcacctatcacactaatattcatgctacttattatttttgtggatgctgagaaatgagttagtggggatgaactatatagtctatatagattcgaatttatgttggcatcatttattattttccatgatacatttccattgaaaaactagacaactgagacttattataataactcggggttatctatttgtaaccattaaccctgttagttcaacacatttaacagtaatttagctgcagtgtgatttattttttgtttcgctttatattttcatgtaactaaattgtcccatgaagataaggtggcttaacaaaatgcataggaatatgaacaccatttatgcttgtgttttagaattttgtactttcttgaacataaaattccattattacctgcaaaaaaataaaattccattattacagtatccaggtccatcaaataatattttggtttgcttacatgtattctacagacaccatgtgtccacaacttctgcttgaaatgtttccaatggtggactcagaatggtaaaagagcttgtgtcaattgctgagcacctactacactaaaagtggcacaagaactaagaattgactcagcactagtccaagctatccgtatggccaagggtgtaaacagtgcaagttcagctggtgaaaaatcagtttatcgttataaacaaaacaaagataagtctgataaaactttctctactgaatgggataagagggctggaatggcaatgcttctagtggacaaatatttgtgactattgcacctgatcattttggtccaattctcgaagaccatgacccaaaaaggaacctctgtgtttgagtggggaaccattggaagaatgtagatagtggggtgaccattttcctcataacactaggaccgccatccaatctacacatgcatggtgctcaattagtaaccttataatacaatgcagaaagtgaggtgcccattttcctcatgttgccaggtgccaggactaaggacagatctacacatgattctcaatcagttgccctatcaagagattatttggatgattaatatcatgtagagtggttcctatatactggaaggtttagtgcatgcctgacgttttgtccctgtggtcagtaaccttaatgatataaacattttaagcaaatagatatgaagaggatatatctgtagaaggaaaaagttgtgtgaaaaaatgatcatgtgtgtaccacacaaatatatattgatatttctatctttttaaataaaaaaagatattttgcttggtgaagtcccacaaaacacttctttaaaataaaaacgtaatgaacaaaaaaacatcttaattaatttcgcatagcccatcagaaacaaaataaataaaggcatgtttatgcaagattcttttgaaagtataaaagcacactagtgaccccatcttccacatcatacacaccctgatatctcccacctcaaatagacgtatatatatagagagatcattaagaaacaagtaagaagagaagtaacaaatacttcctccatcaaataaaaaaccaatccagattcattcctaaaagttgattctttttagtacaaagggtgtagctccctgaaaccgttcacgccatttatttcagaacttatgtcgcactttggtgcacgctgctacctctctagtctaccaccatcacttactgatgtgtggccgatatgatgatctggccatgcattgctctagggacattgcaaattcatctgattttgctagcgctgagagcagctttgtcactgccatccatgtgattagggttaatcagacattgtccatgttggagatcaaagccgtcaattgctgaggcttcttggtgatgccagtggttcagaatatagctaaagctcatgggacgatgggagcaccagagaggacagggacaacaacaatcctgcttgcttgctaacaagaacatcaatgggttcctctacatgctgcaatcggaacaacccatcactgccctttatatccggccgttatatatcctccactttagcaaaaactcgctcgacgcgatgaacaacctctctacacatatgtccatcacactataccaggcaatcaaaaaagtttatggtcactagtttcagggaatccacatatgagagctgacattttcatcaccttgctgacctctttttttttaaaaaaaaaagttgagttgagcacatgtatacactacaacaaaaaccttatatattgacacttttcaagatacaatttacaatttgcctttaacatttagagctatatagtctagagacactttaaaatttgcatcttccagcggcattgtatatttgtataggcaattaagaatttgctgttgggaatagtcccacattgcttatctagggggagttgaaccaacttaaaagtgaggggagcccctcatctcttgagctagcttttggggtgtagcaaggctttctcccagttgggccaacgtctcccggttttgggccaacaagtggtatcagagccaaacccacaatctctagtgcttgtgcactatcagggtggtgtaaacccaaagcccagtggaccgcgggtgtgaggcctgtatgtgcccgtgtgtggggtcggtcagtggaccgcgggtgtgaggcccgtatgtgcccgtgtgtgaggccggtcagggctaaggggcaccaatgtaacccgtatgtgcctgtgtgtgaggccggtcagggctaaggggcaccaacgtgtgacgggagagattgttgggaatagtcccacattacttatctagggggagttgaaccaacttaaaagtggggggagcccctcacctcttgagctagcttttggggtgtagcaagggtgtagcaaggctttctcccggttgggtcaatgtctcccggttttgggccaacatttgcctcaaatgtaaagtcattttcttgtgagattctaacatatgtagaggcactttttaggacattaatatgtgaaaaacatctagatataagcaacacacattaatatgtgcaaaacatctagatataagcaacacaaggcatatattaaacatgtagccacatgaggttgagatggttagtgcattgaagataagaatgaacttctcaagaggtttcgagttctaggatttaaagtagcaaggaatcataaagttttcacttattttttcacagtggtttgctatgtttgtcacacaatctaatgcccctagaaaatatctatactctctttgagaaaaaaagtttctataaaaaatgctgcaatacataaatgccagtttctataaaaaatgctgcaatacataaatgtcttcatttgtataacaaactcactagatggcactaatgaggcatttttgaaaataccaccatagtattgtaaagacatttgaaaaatgcttctgtagtatttgaaaaatgtttctacaagatatttttgcacaatctaatgcccctagaaaatgtctctactctcttagagaaaacaaagtttctataaaaaatgctgcaataaataaatgtcttcatttttatatcaaattgactagaagggactaatgaggcatttttgaaaataccactacatttgaaaaatgtttctgaagtattagaaaaatgtttctacaagatatttttgttgtagtaatattctgcagacaccatgtggtgacatcttctgcttgaaatgttttcaaagtggaattgagaatggcaaaataacatgcgccatttgctgatcacctatcacactaatattcatgctacttattatttttgtggatgctgagaaatgagttagtggggatatactatatagtctatatagattcaaatttatgttggcatcatttattgttttccatgatacatttccatggaaaaattagtcaactgatcatactcattataataacacggggttatctatttgtaactgtcgatgggggatacccgtagaccggataaatagagtggtggggtacgttggtacgaggatctacacgatacgacatcaaagcaaacaaaagacaaggattatacttcttcaggcccctcttgaggtaatagccctaatccagtttatatgagattgatatgaaaaatcacagagtacaaagggaatagatgaatccgatgataccggcaagatccttgtcgagattgatcgacgagatctcccgacggcttcggcttgaatccttcggcttcgtaaactgtggtggatgtattggctctaggattcgatgatcctaaacccctccgagggtgtgccctttataccgcgagttgccttagtctccaagtagaactcggagacaacgaaacatgcacgacacagaatagtcccaagcctttccgagtaggactctgatagtctctagcccgtaaggatatttttcataatatcttgtatatttccttctcgcttacggaaacatacctagaatatgagatacaccaatctagtatacttggttaatcgtaggataggaggtatggttatccataaccctgacagtaaccgttaacccagttagttcaacacatttaacactaatttagctgcagtgatttatttttgtttcgctttatattttcatgtacctacattgtcctatgaagataaggtggcttaatagaatgcatgggaatgtgaacaccatttatgcttgtgtttcagaattttgtactttcttgaacatgaaactccattattatagtatccatgtccatcaaataatattttggtttgcttagatgtatttgacaaataccataaggccacacactacaccagatcctcacacctttgacgacatatctgtgacggactttagcactcgtcagtgatgagggtcatctttgacggttcttataggatgtcgtcatcagtgaggcatccttctgcaacccgtcacaggtaactagtcacctgtgacggtcccgtaatgaaaaccgtcacctctgacggcttccacttctggcccgtcacaggtgactagttacctatgacgggttgcatgattataaaccgtcaaaggtgaggttaactcacctcaaacggtccggtcactaggcccgtcacaggtgtgggtggggacttgactaggtcagactaatatgtatatcttctctctccctcacactctctctctcccttatccacacattttctccaccgcgaaaaaaaatgccttgggcgacgccgctcttgcgacggcggcggaggacccgacgccctcgggcgaggcggcgctggacggcggctcagcaatacgtggcggcggcggtggtgcggaggcgaagcggcgaggtggtgcggcggcgcgtggcggcgacggctcagcggtgcgtggcagcggcggcggcggtgcggaggtgaagcggcgaggtggtgcggcggcgcgtggctgcgagcggcggcggcagtacccccatcctcctcccccttctttctcccctcctctcccttctcttatttctcaatccggtttttcttgaagtggcagcggcgtggagttctcaacggcgcgcggcggtgctgcggtgcggcggctcgacgcagcggtgaggaggcgaggaggaggtgaacggcggcgccgcggcctccatccccgaccgccgggggccacctccatcccccaactgacgggtgccacctccgaccgcctggcgctagatccatcctccacaaggtcaggggacgcggatccggccaccggggcgtcgtctcctccgtccgccggctgcgtccccaactgacgagtgcagaactgcagattcccccgtcggctgcttccgggtgcagaaggcgaagagggcggcgtcgaggagcagtaatagggacgaggtcatccgcaaggaggaggagcaaggtcgcctccaggccgagctcaagaaggtctagcgcgccaaggagttcaagcccaccgtggtatgaagaagccctgcccggcaaaacccacaaccatttattcccttcgtttttgttgctcgtcaggtgattgacgaattgcttgcttgccatggctgttttatgtgtgatgaaatgttcgtgaagacttttctgtgtgatgaaatgttgtgtgtgatgaatgcgatggcaactacccagaagcactttttttttgtttttttttatcaaaatctacatcagtgacgggtgttgagctgtggttgtggctcttttttcctttttttttgggtgatttttctcatctgtgacgggtcacatgatacaacccgtcaaaggtgtctgtcacctctgacggagctacacccgtcaaaggtgagttaagtcatcagtgaccattgatctgtgacgagggggtctatccgtcacagaagagggtttgagcccgtcactgctagcttgttctgctgtagtgacaacttctgcttgaaatgtttccataggttgattcaaaatggtaaaagaactttccatcaattgctgagcacctactgcactaaaagtggcacaagaactaagaattggctgagcactagtccaagctatccgtatggccaaggctacaaacagtgctagctcagctggtgaaacatcagtttatcattagaaacaaaacaaagattagcctaataaaacattctctactgaaagggataagagggctggaatggcaatgcttccaatagacaaatatttgtgactattgcacctaatcattttcgtctaattctctcaaagtccatgacccaaaaggaacgtcggtgttcgagtagggaaccattgggtagaatgtagatagcagggtgactattttcctcataacactaggactgtcatccaatctacagatgcatggtgctcaaccttataatacaatgcagaaagtggggtgcccattttcctcatgttgccaggactgtggacagatctacgcatgattctcaatcagtttccctatcaagaggttatttggatgattaatatcatgtagagtggttcctatatactggaaggtttagtacatgcctgacattttgttcctgtggtcagtaaccttataagatataaacattttaagaagatagatacgaagaggatatacctgtagagggaaaaaaatgtgtgaaaaaatgatcatgtgtgtaccacacaaatagatattaacatttctatcttttcaaataaaaaagatattttgcttggtgatgtcccacaaaacacttctttaaaataaaaacgttgggaccgccgttcaatctacacatgcatggtgctcaattagtaaccctataatacaatgcagaaagtggggtgcccattttcctcatattgctaggactgtggacaaaactacagatgattctcaatcagttgccctgtcaagaggttatatggatgattaagaccatgtagagtggttcctatatatatatggaagttttggtacatacctaacattttgtttctgtggttagtaaccttataatatataaacatcataagcaaatagatatgaagaggatatatgtgtagaaggaaaaaattgtgtgaaaaaatgattatgtgtgtaccacacaaatagatattaacatttctatatttttaaatagaaaagatattttgcttggtgatgtcccacaacaaaacatttctttaaaataaaaacgtaatgaacaaaaaaatcatcttaactaattttgcatagctcatcagaaacaaaataaataagggttaattgcatacatgacattataaattttatggtttgctaatatgccattattattcatatatttggtaccatgtcatttcaatttcacaaatattagagatatgccactacataccacttcacagtattatctactttctccgtttcatattataagactttctagcattgcccacattcatatttgtgttaataaatctagacatatatgtgctagattcattaacatctatataaatgtgggtaatgctagagcagtggtggaggactcgccatacctcgccgcccgctcgtaccaacaccctctacctccaactccggcaagccgctgacggcagtcaggtgcagaggcgaggtgcggcgtcaggcgatgggcgaagacagggcactcgctgctgggccactctccactcaatcgtaggcccattgggctcgtttcgtgttaatgtgggcatatgtggatgattcactagacttaaccctagctcagaaattccccatctccgccgccgcggcggacgatgaggcgacgacggcgcggccgtttggaactgcgggaggcatccgcatccagctccccgcatgagatcaacaagcggcgactgggcgccagagctggtgtgcggtggcgcggctacgcggctaggacagcagacagcaggagcgatgtggtaggcgtaaggcaagcagcagcaggtaagctgaagcaagtggccttcctcccgattcaatcgtccctaatcaatccttgctctccttttttcagattctatgcatatctatcctctcccttgttccagtgattattgccatgctgaatattgatacaatgttgtgccgtacagtatagtgcgattaggtatgtgtccatgagttatacctcttttttttccgtcctccgctactgtgctattagaaaatgttatagtctgaaacggagggagtattttttaggaccaaattacccttttcttcttcctttctacttcccctctcttctctctttttagaatttgatgtggctagtggcatgcagccgtgagatcagttgcttgcttgcacccattttagctaggattcaggaatatacagcatgcattggcctatgtatgtgtataactgtgtagatgtagagacgtacagtgactgaaccacgccatgtatgagcgtaagtgtacaggctagttccgtatagttcgtacatgctgggcagcacctcggctccaacaatgtggcgggcgctcctgccgtccacgccaccgaccagcctgtgaacggaccaaccaccaccgacggcatcttcgaactttgccgagaccacgtcggatgcgccagtggagggcactgatgcagcgttgctcgcggaggtgttttgggagatcggcggtgccaagctgtagtcctcaccgtgcagtccaccactacaggatgcagccggctacataaacctcgtcggatggtcagagtttgttggttggatgacatgagagaggagaaagaaagggatgaagcagaagaagggtaatttggtcctaaaaagttagatataactgtgaaaggatatgtagtggtatatctccaatgctcgtcaaattgtaatgacatggtatcaaatagataaatattaatggcatatttccaaactataaaatttataatggcatgaatctaatgaacccaataaataaagacatgtttaagcaagattcttttgaaagtataaagggacaattatatctgtgcccccactttgaaagccaattgttgttttgcccctactttttagggtttgtatttttatcctcactttttgaatctcaagcagccgtctacaatcacttgtgacagccgtttggtggcggcagtgggcccgcagtgcgcgacagagcgaggcggccgagggcgtgcgccggcgcccactcccaggatggcagttgccgcgtcgagggcggtcgggcggccgcgtcgagggccggccggcgcccgctcctaggaggtccacaaccggcggccgcgactcttctacgcaaagccccgtgagatctccggccgccgccatggacgccgtcgactcagtcgtcgaccctctacgcgagttcgccaaggacagcgtctgccttgtcaagcgctaccacaagcctgaccgcaatttcaccgcaatttcagttgaacactttgtagtttgaagtttaactcaattttattccacaaccgtgttaagtcaattttatttgactgctatcgtttactcagtctttggtagtttttcttaactgcagaagtttgtcactttgtcaggtgctccatcaaatccaatattaactgatttttattttactgttgagaaaatttcaattgaatatacctctattcaatctagttccagaatcttcatggtttgtttgcttttggacatctatctatatgttgtgcacttttgtgcatatatagacttagtaatatgatctggactgtaatatgtggtaatttaccctctatgttgtggatatgtgatgtgtgcaattatgtttgtggacactcaatgtttgtggttgatgacttatatgtaccatggctaatttgtatgggacactttgtaatgcttgctttatatgtgacttgtgctagttgtgtcaaaattctatcgaaatgctgtccaaattttatttaaatttcggtcaaattttgtaattgtctagttttttgtgagtttttttgttaaaaatacaaaaacatcatagcagattctcacatttgaattattcacataagctgaagtcacaaagtaggggcaaaatcacacaaagctgaaaaaaatggggcaaaattgcaataacaaccaagggtataaatatccttttctctacaactaacactgttaaaaccggctgctagaagtgggggtacatggcttcttcagatttaaaaagtaagggtaaaactgcaaaccctaaaaatttggggtaaaacagcaattggcttcgaaaatgggggcactgatgcaattgccccaagtataaaaacacactagtaatcccatcttccacatcctaggtacccttgatcctcccacctcagatagacgtatatgtagatagagcattaagaaacaagtgataaaagaagtaacagctacttctataggatcgaataccaataactaagctaaccagaggagggtgaatggttggtatacccaaaaaccaaaacttttagtggaaataaaagttaccctcgaattcgtcggatcgcggtctaaccgaagtagatgcgccggtctgaccgcctgaatgttgttggtctgaccgagattgcatctccggtctgaccggcgagattagctatcgtcgcctgaagtcgccaccagtctgaccgccacgatgccgctggtctgactgatggtatttcgccggttagaccgccgaaaccgagcaaacacaaatcaaagaactcttgatgtatatgacaactttattacttctttttgtgtttacaaagtgcaacaacaacactcctcgaaaatttcgactaaactcgaaaccctaactcaactctcaattcaatgctctcaaaagcgatatcgggaggccacaccctccctctatttatacatgaggtatgcagtctaaagccacaaactaaactcatagaagaagtcctaatccacctaggaaacctttccgtacaagaaaccaactttacaaactccaatcataccaaatttggactccttccaaattcgactccgcatcacatactccttccatcgtatgccatatggaatcttcaccaaccacgtgcattgatctttagcctaagtatcccgcatgatatctgaccgtccggacgtcaccttatctccaagttgaattccgatccatcactggcaatactctccggaggcattaagacacctacacatgaatcaaacaaagaaaccatattctaagaccaagctatctccaatttgactcattgttagcaaataacagtattacatacgtatagtatctatctagaagccataaacatgaaacatccacggatatccaaacaaacaacccgaaaccgaaaccgacacagagtcggccggtcagaccacgggctggccggtctgaccgctcgcatagcatcggtctgaccggcctcaccagcccggtctgaccagacccgacaaaatagcaaaccctgttcatcacatgaaaatcaatcatatccaaaactacttcgccaataatctccaaatatcaaaaccaataaactcaaatgccaattgttcatcacagaataataatcaaacacgctttgattttacaacttcctccatcccatataaacgaacatctagggatgaatcttgacaagttcataactagaagttgattcttttcaagacagagggtgtagctccttgaaacctttcacgccattttagaatatatgtcgcactttggcagacgctcttacctcttcagtctaccaccatcacttgctgatgtgtggccaatatgatgatctgcccacattgctatgtggacattgcaattttatactctatatttgattttgttggcgctgagagcagccttgtcactgccatccatgtgattagggttaatcatgcattgtccatgctggagatcaaagccgtcaattaattcctgtagcttctttgtgatgtcagtgattcagactgtagctaaatctaaagaatcaaattaagacatatcgattaaaacatttcggtgaatcacgattaaaacatttgggtctcacacaaaacataccgattcaactgatgaaaactaacacattcagaaacaatcaaagacaaaaatataaaacatacaccggaaaaaagtccagtgcaacattatattgatccaacaccagaaacataaacatgaaagatctatggcctaaaacatagaaaatccgccaaatgtacacgtcgggatctaacttcttcctcacttgcgtctctggatcagactttttctatttatcacatctaattaattctacagaaacctcacagttactcaaataaaacgtgaatcacttacaacagttcactcggttactaaaacaatcaatttgagacataaagtttcaacttaatttcaagatcagtttcgcatgcagaagatctttccagtatatatcgccacatcaccctagtgtactgtgtgagaaccacaagaaatcaaccatgtcgtcttctttgccctgcctcgccgtcgccgtcgccgtcgccgtcgccgtcctatcgctgctagctctagctaattccaaccacctgccagctgcctccgtctccgccgccgccggcctcggccgctctgcgatcccgcgcggccacatcgcggccatgaagttcctgtacgcggtgaacgacgtgcggcatcaggccggggcgccgccgctggagtggagcggcgcggcggcgcggcactccaaggagcgcgccacctggctccgcggccccggcgggtgcgacctgcaggcgcagaagggcggggacccggcgccggcccacggcggcgccgtgacctacttcctcagcgacggtggtagccgggcctcgccggaggacgcggtccggctgtgggcggacgagcggcggtggtacgacgccggcgccagggcgtgcgccgccggcaagcagtgcggggactacgagatcatggtgcagccggcgtcgaagcagctcgggtgcgccgtcgccgtgtgcgcgtcacgcaagacgatcatggtctgcgagtactacggtgggcaggcattgatctgagcctatctatgctagtactacaatcatgtactaattaagctccatttttacaaaatactactaataagatagcatatgctgggcatattaattttcttcttcgcggcttgtcttgaatataatgttccgttggaatttgagaccctgtaaactccattttgacatgattatttcactttcggagtacaacgttcaataaagattactacaccccactattctcaaggatgactcaaatttatgcgtgcagtatcttgaataattaatatattaaaaatattacgatttaatatgtcaaaataacaatatatttgtaaatggcacttttatattaattagaaaaatataatggtagaacctatgcattcaagattgtgtcgatatcgaagacaagtaaaaaaagaacaaaaaataatatgacttaagagagtacttcactacttcagtctggaactaaatgccaaccctgtatataattgcacgaatattatatcataatagaatttgtttcgtagataatcggtttcactttatcttcgaaattaagataaaatttattatttgcacctttgatcaactatcaaattgctataaataattttggatgatttggttttattaattagagaagagaaaactgagaacttcaaaagataaaaaaatagacaatttgcatcttaaaccaatggtccaatggttaaaaatagttaatataatgagagcatcaattacatttagtagggtgaagacactaatataggagataagttagattagctctaatatgtttacatgcaagatttgtctcttatcaatattgtaaaagtaagttcataaagttctgttgcactatttttcttatgggtacaaactcttacatccgcactatagtgaaaaagcacgtattccctccgtcccactaactaaggcgcacacatattgtaagatttaactctttaaatatttgatcgataaatagtttattaatgaaattatatttgattaaaatagtatcattggattatcatttaaatttactttcatatgtttatgattttgttactattatagtatatgagaaatttaaaaatagtatcattggattatcatttaaatttactttcatatgtttatgattttgttactattatagtatatgagaaatttaaagtcaacgattagtcttgaaaactgtaccaagtttgaccacgtcgtagtgagtgggacaaagagagtaacaaagaaattaaacattaaatgtgtctttggtaccactacatattatgggagtggtaaataattactaccaagcataaggattttatggataatcccaccttattttttattatggcagagatctaaaacggaaaatgtttcaatccggttgtccgatctcgagaaaaaaatcggacgcctctcgctatgactttgatgcatgcagcctactcctttgtaggctttttgccagatcctctctttgcacacatgctacatatgcttccttactgagcattagtatgcatgaaggagagaggacatgaggttatttgcatgtacataacacccttttagcaaacttgaaaatgatttttcttctagattacttatccaatctatgatccgattacaccaatgtattcgttacaattaaatctttacaacaagatttcacatgactatattataagaaaaaatatacatatgttttaaccaattaaatttaatgtttcacatatgagaatcagatgtttcagctgaaattatattatgttgtacatatttaattagtgtcgcactgtatatatcttttcttagtgtatcacatggtgctatttctatgtttcagtaaatagtttattatgtttcactggtttatttgtaaatgttgcatatgtgttggttgagtgtttaaataagtattcactagttaattaaaaatgttgtacacggtatcatccatacatttcagcaaatattaaaaatgttgcaaatattatataattggattatactatcatatttgttgtaattaaattttacaacaagatctcacatgactaaatcctgatgaattttaaatttagcttaattttatgttgcagttaatctttttctgaatgttgcacactgatttatttggatgttcctataaatatttttccgatgtttgtttagtttattttgcaaatgttgcatgtcatattatgagtatgttttagcaagggttgctttatgtttcaatagttacaactcgatgtttcatgtacatgtgctataaaaatatttcaataaaatcaagtatttgtaaatctatagtatgtaccgtactatttactattttcttttgtgtttcatttgttaagattcaatgtttcatgtagtaatttctagtgttgcgatgatattaaatattatatctctttgaaacataatttgaaacataattaaagacgagttgaaacatttgacctcaagtgctgaaacatttttttataaccgatgaaacatcttttttgcaattattttttatcaaaataaaatcatgttggatcttattgtaaagatctaattgtaacgaatataacagtgtaatcgaattatagattggacaaataattgagaagaaaaaatcatttaaagttttctaacaaagttagtttgtgctattatttaatgggagagatgagagagagtagttaattcaccatgtacagaaataataaagtaagaatgaaatagtgcatagctacatgcatgtagcagagccatgtgagtagcgtacaccagcccatagtagcatccgatttttgtattccatcagacgtccgatcgctagtactctcactctaaagtatagatgttggatttttttagatgatctcacttatttctccatcttcgcatgcacgtatacgtattatggtgtctctctaacatgctaatgtcacttgacacgggcagcccacttattgtcgagttggacaataaacattgaggaacctagctggtgattagaaagtattttaaacataaaccaaaacatcatatttggcattcacatgtatattttttatcattacattttctaatcatgtaattaatatgaaatacgaaaattgttggaaacataactacgtgaaaacattattaatttttcatgacaaatctactgatattatttttatataccaaatcttatcattttttatatagtagtgatctctaaaatgttacgttcaattgtccgtacgcatcctaaaattaacagcatccattgtgaacagagttgatagacttcagttgattttgaaacgtaaagtgtcacagagatataggtaaaacttaattatatgacatagtaccgatcaatccttttgcttgtaagttgtaaccgcatgcgaacgttttattatctactagtatctcagaactcacttgcagttactcgcgtagtagttaacacgaatcactggaagcaccgtcactcggttactaaaaaatactccttccgtttcaaaatatttgacaccgttaactttgtagtacgtgtttgaccattcatcttattcaaaaaatttaagtaattatttattcttttcatatcatttgattcattattaaatatacttttatgtacacatatatttttacatatttcataaattttttaataagacgaatggtcaaacttgtattaaaaagtcaacagtgtcaaacattttgaaacggaatgagtatacatttgtgtaacgaaagaacaataaatttttttaacagcagatgtaggagttctacctgatatattaaaataacaataaatttgagacataaatttcgagggtttcatacaaatctttagttactatataaacaaatcttcatcatacaaaagaaaaagcacaattaaccatgtcgtcttcctcctcctgcctcgccatcctgtcgctgctggcgctagcctcccacctgccggacgccgcctccgcgcctcgcggcatcgggccgctcagccccgccgcggccgcgaagctcgtgtccgccgtcaatgacgcgcggcggcaggccggggcgccgccggtggcgtggagcgcgacggtggcccagcgcgccaagctgagggccgaatggctgagcgacccgaccaaaggccggtgcgacgtggcgaacgccggcctcgatccggggctgacccgagtcctgctcaagccgatcgtggccctgacgtacttcgtcaccggcggcggccccgggcggcggcgcgcggctgacgcggtgggggcctgggcggaggggcggcggtggtacgacgccggcgccaaccagtgcgtggccggcggcggcgaggagtgcgcgagctacaaggacatggtgcagccggcgtggaagaccgtcggctgcgccgtcgccccgtgcgcgtccggccagacgctcacgatctgcgccttctcccctgcgtaaattaataagaaagcgtgcgggtttgatttcgcactaataatgttccggaaattgaaacatttgttatttttgagagtccaaaattttggaaaatcatatcacagtgttgagattttccagacctcttaagtccagacaacccctctcctgtgaagacccttgaaaactgaccaaatttatatgaagtaccactttgctattcgtatttccgccaaaaagttgcattccaatttaaagttttaaatcgttgacagacactggtggagaaaccatctttaatcgttcggccaaattctacaatagtcccggttctaataaaaaccggaagtaaaaaacatctttagtcccgatttaaaagttgaggggtactttttaatctttagtttcggttggtattaccaactgcgactaaagatcttttttagtcccggttcaataagtcgtggggttcaagacagaccccaattatttttactcccggttggtataaacaaccgggactaaaaatagatctttagtcccggttgtttatactaaccgggagtaaagagtaccccgaaccgcatgccagatattatccgcgtgccaccaaaataattgtttataccaattatttttactcccggttgatataaacaactgggactaaaaatagat

SEQ ID NO: 7554 - DNA, 11481 bp, Oryza sativa
attaatatatatttcgatttaagtgatttatactgtctcggcatggcgtccgatctatcccaatcacttgatttaagtatatatcgatacaaggagtatatattgtgaatacctacagccgatcgagtagatttagttccttcttgtttattcatgactgccgatcgatacatatatgacatcggctcaaagataaatgatatgtcatcggcacctagccgatcgactatcatttatagatttaaccgcggtttctttgcttctattttttgttgattacaggatcaaatcaactggcacgctcatacattcgaaggcgagctttggacctgcactagagttaagcagatctcccaggtcacgtgttttctgtcaacacaccagcccttgaggtttgctgccaacccgtagaagtcactcatcctctccaccccgccacctcgcgaggagcaacacatctagcatcctggctcagaggagctcgttagcaccatccccaccaacttccacaccgtgcacggccgaggaggatagctagagaaaggcaggtccctcgcaccgaccacggacaaggtgaggaagccccagatctaggaggagcgacggggaatggccaccaaacctgggtcgaaagctgctccgcaatatgccccccaacacactcgctaataagctcggtcagcgagttcgccgcacgcacctccctcgtactgccgccgtcgtccggcaacactctctccatgccggaggggcacaaaaaccgagccccaccatcgcaatcctagctagccgctcaatttccggcggctagctccggctgcgtacggttgggaatggggaggagggtggtggcggtagggcttgcatgtcgcccccaggttagttgctcgggtgtgatagggggcctctcctctctctccaactatttttttagtgaaagtgacatttcaagaacaagctcacttcttttgtgctagtgtaccttctactcactccgattcacaatgtaagtcattctatcattccccacatctattatctatctatctattatatactaaaagtccaagaaacttcctacaaacgctcctaagccaccatgtgtactcctacaaatactcctaaaccgctatatggcatcttaacaaaccggtaggtccaatatttttgtctattagaattttattaaaaaaataaccccacaaactcccctaccctctcctctccccatgggcccatccttcaactggacgtacaactcaagttcgtacgtccgtaggtacgtcttccctcccctcctatccaatctcttcttcttttttctttagttatacaaatttttaaacaataataaatcttaaataaccatattttttctatagttatttgcacgtagtctatcaacaattaaaaaatatatggtgttctttaacctatatgaaatatttaattttttatcacctcctaaactttgcataacacggaaaactgtcatataaaatagggaaaaattgataatgtagattacacaatcatatatcaattcacagaatatgcatgaacaaattaagttagatctattatataacaaacttttctaagccaccatgtggcatcctgcaagcgctacttactaagacaccacgtgtcactgtaataaattagagaaatttctaaaaattttaagaaaaaaccaaacatctagacattaattttcattaaattatgtggacccattatttaccaccattagatttgtctttaaaagaactccctaacccccaaaccggatccaaattgggactgtatgtagcgtacgttttcttaaggattcttaaggatagtacgtgcgtacgttagtaacgtacatccaccccttcatccctcaatttcttcatatttttgcacatatttcttcccctattatcatatactttattagttagaaaatatattttttgtgttaaacaattcaacaactataacatctaaatcatacaactaacttttaatccgcttatatcttaaaattatttatgactgcatctacaggcaaagaccaaaattccacaataattcaactttgaggaaaaaaatgacactttggattatatttccagacttttgcgtaccgttcaagcaattacaataaatatgaaataatattattatagactctatcattgtgcataacttcataagaattaaattatatctacaatcataaaatctaaaaaaatagctatgagtaatgttcccaaaatatataagttagaaagcaagagttatacgaaaaaaataagcagctataacatctcaatcatgagatcccctatatcatacgagtaatatttttgcttatgtattttgattattttacatttaaagacccatatttggggttatattatctgacttttatgtgccattcaaacaattataaaattgtgaatagtaatgatatatattttatcattgtatataagttcacaataattcaattagatatgtaatgacaaaaaggtaaaatgaacctaataacactaagtattgttccaaaaatttactcctcccattatgatattataataaagcaaaaataacagtagtagatttgtaatgttcacattttcaatattgtatactatgtaggaaaagacgagtaaaaaagatagatcttaatcaatcaataaagcttttattttatttttagttaataaagtaataataagtaaaacacaataaatgtaaaaaaataattatatgtacacatactttgtcccattcgactttctcttcttctcctatctcactcaactcctctatcttataatttttaactaattaacaaaataataaaaaatgatcaataattacaaagctaaataattatgattcttatgtcataactgttttttagtttatttgaactgttattttttttataattaaataaataattgaagatgcatattactcatatttcactccataaaaatgaaaatactccatttaagcacacacacctatatatcctttgcatggtaaccaaatagaaaaaaaatagagcattataaaaaaagtgacaataagtattgcatcacctcaaatcattgtacatcctctgtagcacatttacagtggtatgtaacttacgtgttacatcttaattaaaagtaagaccttagaaattataagaaaagacatctgaccatcagtttccacttaataggtggatctattattttaaccaatagatataatattagagaaaatcttaagctgccatgtgttacgccttaaaatttagacgcaaaggatattaaaaattttgacaaaaaaagtggatcatcggttttcacttaaatcattagatgtgcacaacacagtactacccatcccctccccccccccctcctgtctcagcttgagttctccactctctcctttacccctcctttttatagcgagaaataatcaataatattaaaacatgcaattttttagctgtacatctaatttctaatctaactattgctctattcataattaaatcatcaatttaaaggttcataacctctatagtttgaactggtataaaataaaatttaaaatataaaatatcaatatggactaagttgaactatttggagaaaatcaaataagttcgtacctttcactaaaattggaccaagcattacatgctctatttttataatttttttaaatgcttacatattaatgcccttgcatctattctataccatggtataatgagtttctcagcctattaagccacactatggtagcagtatacatatagttagttgaaaatttatatttattactattaaatttaaatttttgaactcatgttaactatattttcttttagaaaagatactataggtcaaacatattacaaggaagcgatggtctacgatatgtatttgttaatttatatgtaagtatgtaacaacttgtgtgaatctaaaccaactaaaaagaggactaacttgatggtacaaataaaacatgtttactaacaataatagtgctttaggatttgttaaaaaaagccactaaacattcaattaaacaagacaaaatattttacttttaatttacgtttaatttgttagatatgttttttccaaacaaactaaatagatactttgaaacatgacaaatgtttatacggatcatagataattgtttatacgaatgaattaaatattatatattttaaaagctaacaaatagtttggaaaaattatctaagcaatgccgatgaagtaaaattatggagaaatagtacttatgaaacatggcaatgtcattgagttgatattcgatctatgtaagtttttcgaacacaataaaatacatgcccgcgcaatgcatgggctaccttcctagttcatattaaagttaatgaagtctagattcattaacatcaatatgaatatggaaaatgctagaatgacttacattgtgaaacggagaagtagaacaaaatcatgcgaagcttctaggtgatcttcaagtgcgcttaatcttggttttaggacaaactacgctagctctttcttttattttataaatagaatgagatattttggttcgaacgcttaatttggagttggattagctgcattttaaatgctctttgttaggcaagatctgcttagccttaattaccaggatgtcactataacttggattgcacagaagtaaattaaaaagtaggagtataagcttcgcttgggctcaattcaatttacatattccgtaaatattgttacatgcccaatccagctattcttgaattaaaaaaaatccaactattcttcttctattttatttcaccatgactttatgttacgacttacaaaaaatacctaagtagaatgggcttatatatagtagcaaaattccttacacgcacctacaacctacggacctcacgttcactttaggaccagtactgtattaaaaaggagttgattcagcttgtccatatcccgattaatcgcttggtgccttctcacaaaaaaaaaatatttctctcaaaaaatcgcttggtgccttggtggtaccataagatttggacagccaccataagcttcccctttcccaacatgggctgagtgaatcagtacgtagtgcaataggctgttccagtgagggagtggagatgcttcctacttcctccgtttcacgatgtaagtcactgtagcttttctcacattcatatttatgttaataaatctagataaatatatatgtctagattcattaacatcaatatgaatgtggaaaatgctagaatgacttacattgtgaaacggatggagtattttgtaacatgggaataacttcactttaagtcttttatttttacatcaagtttagattatatccttcaaccacaatacatgaaatgttgaatccccaacattaaaaacctggttacataaaatcctaaggcagcatggatggttgttttgattgacgtggtattctagtacgcagaggcataagattctaacactagaacggataccctcatctcaatcgggcggtaagccccatctcaatcgggcacagcgtccgtcacaggctagaagtcactgatgtaaagagttatctcaatcgggcaaacggccgtcacgaatgaatatatctcaatcgggccctaagtaaagcccgtcaccgatagctttgacccagacgaccagtcaaactatagcccgtcacagatgacctatctctatcaggccacaactagcgcccgtcacagatgactactaacctttatcgggcctaaactagagcccgtcacagatgatactcatctcaatcgggcctaaactatagcccgtcatagatgactgatgacctcaatcgggcctaaactagagcccgtcacagatgactgctgacctcaatcgggccaaaactagagcccgtcacagatgactagtgacctcaatcgggcctaagctagagcccgtcacagatgacctcatctcaatcgggcatttagttatggcccgtcacagatgactataatccacaaaaaaaaattgttttttggctagcctctggcctttgctagccatgcccgctgtaaaaataacagaaacaaacacagatatccaatatccccagctccccagcatcacccattcatacatatgcattcacatacacagacatcaacatatttcacacaaccacacattcacagccatctcatatttcacatccattcacatatttcacatccattcaaatatttatcatattttacctgtaaaaccgagttaattggatcaaatatttatttagcaagtcttaacataaacatataaaatatatacataaatataagcatcacagtgacatcatcacagttgcataataagtgttcatcattgcctaaacatagaagttcaacattgttcatcattttagtttaagcctaaacattcctttggggttaattatttcgcggaggatgaagctggctatctcctcgcgaacctcctcaaagctggtagtcagagacttggttattgtgccctacattgtcataaatccagattagttgatcgatcatataaaagtactaaaatgtagttagtctatcacaattgagaccaccgacctcaaactcagccaaagtcttcaccttttctctatacagaagtcgcatgttgtggcacacatggaatccgcactggttacctatttgttgcttcaccgggaagtcttttttgtggatgagggtgtcatgtcctgtcttcctgaggcctcctctttgcacgtattgggcccacgcttcatctatcgctagttgaattggggtccaatcatatgcgttcttatcaattctggagttcaggtaatgacatgtactccatttaggtgttatgaccagaaggatccaatgggcactgcggcattaatatagtgaaagttaattaagtactcaaggaatgtgtcatgctgttgtgtatatttagttaacacacttactattgattataggcacacataatgtactccttgtctcggcgggaccacaaggtgtcgtagatgtagttgaccattcattgacggtcattatggagatttgtgacagtgaccacttgtggatcaaggaaggcaacttctggtgcatgcttctgacaccattgccaacttaacctacacacaggatcaacgatcttgtaagcaagttaaaccgattgttattaccagaatgagttgggcgacaatacttacaaggagtagcacttaaggaggcttgtgtccaccgctcggagcctgtagaggtcgaaaagatccttgaagtcgaccacgatataatttgttggaccaaggaatggctttccatcgtgctgtccaaggatatcggtagctttatttggcttcctggcgttagatttctccatgtagtataagtgaaggtccttgcaagcggtgcccattgcgggaagcacgtcatctccaaccaatggcatgcctagttggaactcctgtggagcgacgtatttcttcttgacctctttgcccttagtctcttcctggctcttgcccagatctagctttcttggagctagaagcgaggcctgcacctttcctccccttcctcacccctttgcttcgggtttatcgagagtaattctctaaggggaagagtgtgccttcctgctcttcttcatcggtgggggttcattaatcgccttgctgtcggcctccgttcggtcctccccaaaatccgtatcgtactgcaactacacattgtaagattgtgcatgacgatcttgagcaggaggggctgaaggagtagaagcgggtctctttggtggacgaccgcctggtgcagtggttggcctcgctgtaacctgatctcaatgaggtccttgggccattggatgaaggtaccacgggcatttcctagtgagaggacctcgtcgtttggtagatacttcagagggaacagctcgtattcgggcttcgccgagtcgacttgaacttttgcacagtcggccctgagttgcgctccatgcactcttgtctctggggtcggcttgtacgcaagtccctcggctgctggaacagtgaaggtcggcatcaccctaactgtgagggtgcagctcgttggttcctgtgatagattaatcaatttttttagaatattatatatcatatggatttgttacgtctttcatgtattgagtaagttcacggttaccgttatgtggtcgacggcgctgtcgaccgatgttggattttccgccaactcagttgatgcgcaactgctgcgtttttcggtgggacttcctaactctttgtgcgcagcagcaacgacggcctgggggatctattgctcttctcggatctcttgcctaatcttggccctcatcgactcgagcttttcgtcgaattcagatgtcagctcagctcgtatcgactcctggatcttggcttcaaggtgtgcatctttctccgccttgttggaagtccgcttcttgtactgccacgcgtagtctggaaatccatacttccaaggaacagaagacccaatgccccgtgtccgtccacggtgttccttgttgcccaacgctttcgtgaggaggtcgtcctcgcgtctttgagagcaggcctcttgcgaggcttgttgctcggcaaccaactccttctgcattacaatttagtggggtcaaataaactgcacgatgggaaacaatgcgaacatctagtttgactagacacttactatagcttcgtatactcgttgatcttctgcatttggcatgaagattgtgccatcatcatgtttctggtacctagccctggcccagttcctagcccgagggtgtgggatatcgccaaacacgagcggtgtgcacgattcctccgcttcttcatcctcacgctgccattcctcttccttaccggcatatccagtggtaccaagccggtgcggatgctggttcctggtctggagcaagcgatatgcctcgcttctagctctggactcgggggtcgacttcttcgcatggaattcctcccagacctgttctgtgatccaaggaaatttctctcttggatctggatttgccgggttgtagacgaactcgccgactagcttagttttgaagttcttccaagcagtgcccataaccttgaaagcagcccgcctgagacggtcctcatgctccgcaggataatcaaagctctccttgaacattagccaagcaatgtccttctctgcggccggcatgagcttgaagtcgtcttacagaatactgaatttctgcctccctatgaccccgcagatagacctaaatcggctcaatattttccttggagatgtcggcaaccctacggcgtccaccgctgttatgcggaaccgttccttaggaattttgttccctgtcctaggagtacgtgcccttgaggacccactagttgtcgtcgacattggttcgccttgctgagacattatctacttttttccaaaaaaacaaaaaaaaacataatttagtgctacaatttattacaatctattaaccacatttcacaataatttcattaatgcaccacatttcatcccaacataaataaaccacatttcatcccaacataaataaactacatttcatcccaacatgaataaaccacatttcatcccaacataaataaatctcatttcatcccaacataaataaatctcatttcatcccaacataaataaaccacatttcatcccaacttaaataaaccacatttcatcccaacatgaataaaccacatttcatcccaacatgaataaaccacatttcatcccaacatgaaccacattgcatataaataaagttaaatgaaccacatttcatcaattactacaatcatctatcacaaaattcataaatgcaccacatttcatcccaacatcgacatgtctcactcacagttcaatcacatatcatccacatccacatttcaatgacatgtcattcacagttagtagagggcgacgcgatggaggactcacctgaggatggccggtggggctcggcggcgcccgggctcggtggagggcggcgccggtcggtggagacgccgatcgggcaggtcggcaccgggcgggcggcgtcgtgctctatgggggtcggcgacgtgggtcggtgaggacgcgggcggcgacgacgaggaaggccaacactggtccgatcggtgtaaaggctcggtggcggcggcggcttcctgctcggggggagggtcgtcggtgaggaggctcggcggcggaggtctgaatggagggccgaggaggctcggtggtgacgacggcaggcttggcgagggaggacgactgcggtggcggcgggctcggtggcgacggcggcgggctcggtggcgacggcggcgggcttggcgagggaggatgacggcggcgctagggttctaaggaggcgggaaactgtagcgggacttagaaaaattttcgatccgatctgagaaaccctagttatattagagtgatgagtcatctcaatcgggctttgccgtagggcctgtcacagatgactcatcggtgacgggctccatactaatgcccgattgagatgacagtcaggcccgtcacggatgactcatctgtgacgggccctaagataatgcccgatagagatagattaatctctatcgggcttgaactaaggcccgtcactgatgactatttttccatttcccagataagtctttatatttgtgagtacaaaatatatagctgttgtataataattcattttattagtcataacatattttcggatagtaaattatttcaaatcgaaatatggtcaacaacaaaattgtagaggttatcaagatctacaacttttattttggtcatttgtctatataactttgtttccaacagcttgaaattgattttgataatatgacaaatctaaacagcatttgtaaatactaaatgatttgaaatggaaatatggtcaacaacaaagttgatcctctcatcaagaactacaacttttattttggtcatttatctatataactttgtttctaacagcttgaaattgattttcacaatatgacaaatataatcaacatttgtaaatactaaatgatttcaaatggaaatatggtcaacaacaaagttgatcctctcatcaagatctacaatttttattttggttacttcttcatccgacaaagtgatagttatattattcacaaaaatcacatttctctcatctggtttataaatattaacacagatatgtcaattttgtaaacattggtactatcactttgtcggatgaagaagtgactaaaataaaagttgtagatcttgattagctgtacaagttagctatttatggctttcccatttaaagtcatgtaatatttacaaatgctgtttagatttgtcat

SEQ ID NO: 7555 - DNA, 9342 bp, Oryza sativa
  unsure (1)..(9342): unsure at all n locations
agtttcctcaaggctgtagtgctccaaagtgagtacaaaaattactgtgtgatggataccatgatgattgatgagcttatgataaaaaaaatatcgaaattttacagtgcatggtttattggttttgggtgcagaaatttggctgctattttattcgaatttctattgagcttgattgttttgactgaattaattggggtaccaactcaagtgataaaatcatcaatcttttattgcaggctattcatgccacctagtatttgtgttggtgtttccataattttttcaaacattagatggcatttaatttatttttccaagttaaaataatgcatgcaaatgcaattaggaatgcgagaaaaaaaaacagccaaaaccaactaaaagaacatatattcaaaggcaagcatccacagctcatcatactgttttgaggactttgtttcggtttcttacattaagagtgaatttaaactggatttgaaatgtaacatggaattggatggttttggtgatattccagctcaatctatttaatattaggatagtggaccatgttatgatgtactccataaaatattcacatttcattccattggtggttttgctacggaataacgaaaaaaatcattggtttaaatcttaattgaaaattctaccgttgactgagctaaccctatcttgaataaaataatatttcttctgaaaactgttgattttcgtttcgtacgacaagtttagctttatctatgatcaaattttcctagtccgatatgttttatagtgtatcccgcacatgaaggtcagtaaaggatgtttgctttttaaatgttgttggtatattttgatagctctagaagagttagaaaatctatttgtaattaattttattacttgtaatcatgacaataaaccttgatataacaaatatgagttttatattccctcttattttggttgcatttaatgcggttacttggttgaattatttgtgactgacgtttgatttatctcttcttgtatgtactattttgaaactcttttatgcaccggaatcataaaggaaagcttatataatatatttcaacactataagagtaatttaacatcaagagctaaaacttgggtaagttataatgctcaccttcattgagtgaaaccattgccgctataaagatagccaattttgcttcacgacattcaaagtttatataatttactggtgaacattgaaaaaaatatccacggttagaggagacgtcaaaactaataatttgatggaaaacatgcaatcaatattttattattttttcaccaaaaggatagagaaacccattataatgataaatttgtccctcgggccaacatatgttactatgattggtttggtcgaactagaccaaaccaaaccaggccatgagtatattttgcaacctttcccccttttttaaaaaaaataggttttcattttttaccctaaatatattgctaccatatatcatattccttcttcattctagagatagcttagaagcttctagcccgaggggcaatatcgtccttttgaaatatatctcgccgattggactggaaataacaaaataatggatgtggtgtcgacctttggcaaattaccagtttttgaaggtgttctcccaccttttgctatgtttaccaacaaacaagctatgtttaagtgacctgtgtcaatattttaccaaatgataatgacaatacctataactttcacttatacatgtaacttgatctatcacctatgtctgacagttgagaagatggttaggagatatgttccatagaataatatactgatccttctcttcatgggccaatcggcctagagtatatatgtgccatcatctacttaacaccgtcatcaaactcaagatgagagcagaggatctgaaacattgaatttgagcaagtgaagttaatgttatttctcaagtctatgcattaggatgctcatcagaataagcggttctcaagatctttataaaaaagcatcaacatctacaataacaaataaatgcactatcaagacataatattgtggattgaatgaaactaaattgatgtatatattgatgcacttatttataaactcagttaatgttagaaaacaaaatgcagatcacctagcatgatgaggtctactgcatcctcatcaatgcccccttttgtgactaagaagacgagaccattcaacatcccctttttatcttatgtgtgtctagacagatgtggttctcccttttgcatcaagttgtcccttgggctcttgaaccacaacctgtggttgtgaactttgatgaatggtggaaccgaatcaatggtatggtttgtgcaagtaccaggaagggtataaacaggttgatcatgcaaggagcttggtctatatgaacgattgcgtcttcaatggagtacctccaagattatcagccacttgtggagtttggcagggactaaggggctttctgtaattatagaccttagctagggccttttatttttaagttccttttggtcgtgtaacaagttcgtgtacttcttagtgcttggtgtgtttggacgccttatttcttctcctattgacgcaatgatacgcttcttgcgtcttcaagaaaataaacttagaacaaaactatatgacttatattataaaactgagggagtactagttaaatagattctattccaccatgaatacaaattgccatgcatagcatgacgaggtctactgcatcctcatcaatgcccccttttgtgactaagaagacgagaccattcaacatcccctttttatcttatgtgtgtttagacagatgtggttctcccttttgcatcaagttgtcccttgggctctttaaccacaacctatggttgtgaactttgatgaatggtggaaccaaatcaatggtatggtttgtgcaagtaccaggaagggtataaataggttgattatgcaaggagcttggtctatatgaacgattgcgtcttcaatggagtacctccaagattatcaaccatttgtggagtttggcagggactaaggggctctttgtaattatagacctcagctagggccttttatttttaagttccttttggtcgtgtaacgagttcgtgtacttcttagtgcttggtgtgtttggacgccttatttcttctcctattgacgcaatgatacgcttcttgcgtcttcaagaaaataaacttagaacaaaactatatgacttatattataaaactgagggagtactagttaaatagattctattccaccatgaatacaaattgccatgcatagtttccttgtttttgttgagaatataggcatataatgatttaatatattccataaataaatcatgacattacagatgtatactagcattaacgcatcattagatctacacatgtaaactaagcaataaaacatgaacagatcaaatatgcgcaacatatcgaacacgtaccgagatggcggaaagaccggttgctcggcaggaactactcgcggtagcgagcgtcgacgaaggcgcgcaggacgcgagcggagaggaaggcgagccgttgcggacgaaaagggagcagtcgcgcgaagcgcttcccaaaaaccttattgctgccttctcccggtgcaggacgtcgaaggcagaggttccggagacctgctctcccgatcgccggtgcacgctggcaagcgggatggagtagtccacaagcgacggcgcaacacagagtaggaggcaaaccctagattgatttcgtgtattttgcgtgaatgcggcggctcggtttatatagagataggtcgcttgatcagggcgcccggacgatctccattccgcgtaaccgaaccggataagtcgcgcgtaacttatccggatttttcggaatgtttccaaaacaaaacaaatccgaattttcgccaagggtgatgagccaattttgtggatcattcgacgcgtaacatcgtgcacgcgcgccgcaaggtaggcacgcgcgccgcctgccctaccttgccaggcgagcgagcgcgcgtgtgttccccctcttctctccaccacacatgcttcaagtggctaggagggcatcctcccttttaaggaggtccccctctcctagaataagcaaggtggtactaaactccacatgcatgccatcccatgaggtgggcttttgtgattttccaaagaattaatcttcgaatgggtcttagcccatctattaattccaacagttttcaccatagttgacagtaacatttttccatggacatgctcccctaccaccatcactgttgaggcagcattgccaatcaaatctgatttcgcattgaaatcaacattagccattgatattaatttatttacactaatcagtgtggttttatggtgtattgttaattgcacatcagttcacaagctagaagtcattaaggaaacactctacactatttaaaatttatgtgaaaaattcttcatagtgtgtgaatattctctacttcacagtggtgtacattgcaaccaaggagtttctatattgggccgacatcagtttattaatcatcatacatagttttcacaagtatcttcatattttagtactttctagctagcgttgggttggaatccattaggaacccacctctcgaactcaaataatagcaggtatcagtacacaaagtaattgagggttggaagaaccaaagtactttatgtacagtagtggagttggtgttagaagatggaaggagtacaaggccaaaagtttgttcaattcctttgaaaaagcagttgttgttgcctttgttctcttccttgtgcttgcttgggccagccatagtgagttaatacaacaactcaacttgtattgacctgttgctagccaccggtcctagcaatcccctttgctttaaattcaggttgttcccaagccaataagttgaaacctcctagatctaatgactgaacatgaagtgtcatggcataaaaagttaccttcacatttaacaaatcactttcatcattccggccgggtgatttgcttccaggcatggtttcattcatgatattatcataaaaatggttcttatagtccatgtctccactctgcttcgtgctaggaagtaggaacatgatagaagtgttgggatattgatttgtctttgcagttacaacccattttttatagcgcaatatccgtgagcatattttcagcaaagcatcacaattgcatttaggatatgggcatagtgttgacttcatttctcctgtgatgtccctttgcttgtattactcccttccttccatttggacagcacctgaacaacggccccaaaaattcagtggatggtaactgcgaagcaaaatcaagatccaaacacttttgcatttcctgctcaaagctagcatcaattgcaatactcctattttcgtccactcatttcaaatctatatccttgaaattttagccgattccttctatgcccctgaattttcttcactcctttatatacctctgaattttgatttggatccctttcgtacccttgccatcaattgaccattagttgaccgtttaataggtatagaaaagttagttttacccttcaatatgtgagaaataagtagaaatttgtaaactgtattgttggaagtataaaatttgttgtgtgattatcatatgcataagtttgttgtacataaaaaataatatatattaaaaagtatgtgtagcactttttaaaatgataaatatagttttggaaaacattcctatataatatatacaactggagaaaatatgttgaactatcataaaaaaaagctacatatactgttttaataagtaaataaatattagttttatgtcattatataaaattaaactttttcataaaaaatacctggtataataaagtcataaatataatagtcttatattatatagatactatactacatatgaggtgtaggcgttaaaacacaccccccgcagcaacccccccccccccctcctcgtatagtaatcgtcaactgtggccccaccccagaaaccgcccctgcttcttccccgcgctctccattattttcggatctagccctcccgtacaccgcagttagccaagccgctccgcctcgtttccatcgccgccaccaccgcctccccgtccgcctgccgccgccgccgtgtgggaggggataccagacttgggaggtgacggcgacgaagcagagaaggcgcccaccctctcccctgcggctgtggcttgtgctcggggatggatgcggcgacgggcgacggcgacgcactgcggcaatggcgagcgacgggctcggcggggctgtcccccgctcgaatccggtgacgacggtcgtcctccgcccggatccagtggcggcgggcgtccctcgcctgacctcgcacggatccaccggcggcggtgggaggagagcagcgtgcggcaggccaccttgcagtcctctcctcctcttcctcctcccgcttcttcctgcccgctgccgtcatcgtggttgtcctccaccagcttgccgcgtggccgccgccgtctgccgatggacgtcgactctgacccggccgccaagggcaagcccacccagatggacctcgaggaccaggtacgccgcagccgctcgactcgtccccacgggaattcttccttcagttttttattgtgactgcctaagcttggagagcatctcaatttctgttgaaacacttcagggaagcatttagctctcagagcattcatgagacttccatctataatcctactaaacttctggctggttcgttagttctatgtgatctggatttggtttgtgtaacactagcatccattgatattctgaatttttcaggcttctatacatctacaggtttctgtaattgataggttaagggcccctttgaatcacagggtagaaaaaacattggaataggaaaaacacaggattctgacaggaattaaagtgtaaaacagaggattgcaaaacacaggaaaaacacaggaatggtcgtttgattggagcgcaggaaaaacgcaggaatcggatgagagagatagactcaaaggaaattttccaagaggttggagctcttgctaaatttcctccaaaatccacatgtaatgtgccattccataagaatttcataggatttgaaaagcttcaatcctttgaatcaaagggccaaataggaaaatttcctataggatttaaatcctatgaaattcctatataaattctttgattcaaaggggccctaacaagcttttctaatttatttattttttggtgattgctgcttttgctggatcaagcatcatgagtgaatagtcctgatagccgagttttttttttttttgcaacgcatgaagaaccatatgctctcattttaattttcatttgttcagtcatgaattgttattgcaatatattcagaaaagtgctcccatctgaatttcatttgttcagtgatatatttgtgtgtgcaatatttggaaaactgccaatagcatcatcatcaggttctctgatattttttataaataaaaactctagaagcttgattcaatagcagttcactgaaattttgtggttcaacagagcatatcaattgattttctctgaactgctctctacatatgatcctttcgatcatagtttttcgctgaatattttggttgaacaaagcagttgtagtcccctatgagcttctttctgctgtagatgtagttcatgttctgatttttttttttttgttgatgaacagatttctcaattttggtctacttgatttttcatctatagactacaggaatgctctgaatttgtggagttttctgcacctcagctgacgatcatgggggaggctgcaactccagagaggcaggaggatgttgtccaggtggcgggtcacgcctcgtcgacagcatagatcacacatgggcagaggaagctgtggatagcatgatgggtctgctagctgcaaggttcgttgggttgcagctgagctatgcatttttttagctccttttatttttctcaagcaattatctttgtggttcaacaaagcagatcgatacatgttttcctcaactgctcaatgcatatggtcccgttgattaggctcttgattttcttgtaaaaatgcgtacaacctgtcaatccattgaattttctgcaattttatggttcaacagagcatatggattcatttttctgaagcactcactgcatatagtcatgttgatcagggtcttgatttgttctacaattgtgtagaatctgtcgatccatcgaattcttttttatactgctcttgattttgtacagttcattgggtggagctttctcttggggggtgcttttgcctgccatggcaaggccagcaagatgggatgaggcttcagctggctagtgaggatggagatgaaatcagaaatttactacctgtgagctgaactcaggatttactgccttttgtagttaataatcagcgtcgtcggccctgatctacgttgctatattagtgctggcatcgatcggtattggcatatgtattagcgggtggtgttgatttgattttgtttattagttttgtgtttttctgccgatgtatcattgcgtgcattatcagattgttgatgtaacaccgacactggatcaaacaattcatgtttgtaaagaaattattaaattgtggttaggttaataatatgaatcataattttttaccttcatttgttttgtcactaaatactccagcggccttgtgcaatctgcaatatatttactcctgtatcaggactaacttattttactaagagaagtccaatgacgtgcaaatattaatttatttactaagagaagatttgcaaaccaattgggagtactaatgaagagctgagaacgatctgagagtaatttatttacttaaaggagtaaccaaattgggaagggctgaaaataacctaggagtaattcatttactaagagaagaaatcaatttggaagtgcggaagtgttagtaactcatttactcttagaccgaaagacacaataatattgttactaatgggccaatcaccaaaaaaggtgcgggaggaaggaaaaaaaaggtgcggggaatattttgatagtaacttgtttacttatcgaacaaaaacaactgatagtaattgatttactgaacgacagaatttgtcggagagagagggatgagggagtttgtgcaggatggatgtgggtggggtgatgcgggggtgggggggtggggggtggnggaggg

SEQ ID NO: 7556 - DNA, 13012 bp, Oryza sativa
tgttcaacctgttgagcaacatcttgctcagcttgttgtggttgtgtggaccttgaaacattttccggtgtttcctgaatttcttcaagtcccaccatgctcccactatcctttcttgaaataaactcttttcccaagaaaacaccgtgtcgggcgataaacactttgccctcttcccgattataaaaataatatccttttttttccttaggataccccacaaagaagcatttatctgatttaggtgtgagtttgtccgattgcaaacgttttacatagacctcatagccccaaatctttaggaaagacaaactgggacgcttccctgtccatatctcatatggtgtcttatgcactgattttgatggaaccctgtttagtatgaacgcagctgtctctaaagcgtaacccaaaagcttagcggcagatcagtttggctcatcattaatcgcaccatgtccaacaatgtacgattcctccgttcagataccccattccactaaggcgttcctggcggagtgagttgcggaacaattccacactcctttagatgattaccaaattcatggctcaagtactctccaccacgatcagatcgtagatacttgattgtcttgcccaaatgattttgtacctcattctgaaattccttgaacttttcaaaggactcagacttatgcctcattaagtagacctaaccatatctattaaagtcatcggtaaaggtaataaaatacccaaaaccacctctggcagttgagctcattggtccacatacatcagtatgtactagtgccaatagttcacttgccctttcactttgacccgtaaaaggtgcctttgtcattccgccaagtaaacaagattcacatgtctcaaatgattcaaaatcaaatgagtgtagaagtccatctctatgaagtttctccgtgcgtttctcatttatatgacccaagcgacaatgccaaataaaagtgggattcaaatcattaggagcctttttgcattaatgttatagactgaacatccatcaagattcacaatgtataagccattcatgatgggtgcatgtaaatagaaaatgtcattataatagactgaacaaccattgtccacaaactctaaaaccataaccctctgcatgcaaacaaaaagcagagataacgttcttacgcaaacctggaatgcaataacaattatttaactccaaaacaaatcctgacggtaaagataatggcatagtgccgaccgcaacagcatcaactcttgctccattgcccacgcgaatgtccacttcgcctcttgctaagctcctacttcttttcagcccctgcaacgatttgcatatgtgagcaactaacccggtatcaagtacccaagaattagtagaggaagtagcatgattaatttctataacattaatacctgaggtgaaactctttccatcctgctgcttctgcttgagctgctctaggtatttcttacagtttctcttccaatgacctatctcctttcaaaagaagcactctgcatccttagggggccatgtcttttgaaccttggtcttagagttgcttgtactcgtgatctcatcagagtttagctttctcttttgaccactcttcttgttgttgggcttgtgcttatgcataaccatcacatggttggagtttttcttaatgctttcctcggcagtctttagcatcccatgcaattctgccaaggtcctgtcaggttgttcatgttgaaattcattatgaacggctcaaagctgggagggagcgactggagaatcaaatcagtagccaactctcatctaaggggaaagcccagcttatccagactctcggtgtaaccaatcattttgatcacacgtgggctcactggattaccttctgcaagcctgcacgcaaattatcgtatgagcatgttacatagtcccgtgattatcgtatgagcatccaatgcctcatattgcctttgaagctcaggggacatagtagcaagtatgagacaacttatatcaagataatcattgcatcgcttttcatgctccctacgttgagcagcaggagcattgttgggcaagttagctggaaaaggctctgtaagcacaaactctttctgctcttgcctaagaacaattctcaggttgcgataccaatccatgaagtttgttccaatcaacttctctttctcaagaatagaccgcaagttaaaattggatggtgcaggagctgccatgatctacaatagaaatatatgtatacaaaatcagcaccatgtttgcatttaacctttcattaaacaatttaacaaaagatactcccactatgtattgtgaaacaaaattccctctagtaacatagtgagtcaagatcctcattttattagtgtctagtgagctttggcatcgcagctagacaactatcaaaataggtaagcaacaccttactaatcacatcattgtgactcttctgctgttggggtgacatcttcatatccaacccaacctatgccccaaggtccaaaactgttttgattaccttgtcaagtaaaccaataatctctgcatatagatgtccgacatctatcctattttatcatgataaaagtgacactttgctatggcaaactcatcacttatgatcacaaccgtaataggtgcaattattagaagagcataaattacacttaatttttctgagggaatctatcctaccatgtcatatcaaatatataacagtaataaagtaagatagatataaaaaccccaagcgaaatctaaggggcaacgcacacggcagtcccagtggtacatagatctcatctacgattcgccatgtgaaaaccttaacggcgtaatcaaattatgccgaaaccgagtcaatctcattggctcgtttttctcattggcgtgcggttccagtggacatcagactatccgatgaacacaatcgcgctcagccttggtgagtactaaacattccagtgaagtcaccaacacacataccgattgatctcatcaacccatgtggctatcggttcatctcatgttccgatcacctaagaactcatatacaacataatagatctcatctactacacccgcatatcaattatatgcaatgatctagatcataaactatacaaggcggctctgataccactgttgggatacgcgtaggctacgatagcatcaaaattttctatcgcgtaaactaggaaccatgcaagtattagatcatagatcgttaccactcgacgcgctgcgcaacggaagaagacgctgagaagtcgaaggaactctcacgaagtagcgcgcgtcgatgtagaggaagttgtcgatcataccggctcgaccttctcctcctcgtgcgttctcctcgccgtactcccacgccgatcaacatcgcaaaccagcggcgcctctaccggtatccacacgtacaaggacggaacaccacgcgcagatgtgctagcacccgcgcgcggctagggttttgctcggggagggaagtgacggctaaggtttctcacgtgatgcaatgcctccgccagtcacacccctcacgaatatataggatccatcactcgggcctccaaggcccataggactcctattcggatccctatccgaattaagctcatattggatctccatccaatccccttatttcggcccattaagcgtgcgaccctgtaggttcatatatactcggctgtaacccgaaaactccttttcggtccaggcatcaacagcggcccctagcagaacgtattgacccaccgaacatacataaagatcatatcggctgaacctctagtgtatacttgtatggacccatttgcctcacgatatggattaagctcaaggctagatatgtgccatcctctaatagctcaatcattcactcgaacctgttgatagattatatgacttgtgattgactcctcaatcacctttggcatggccatgcacttccataatctacaacatcgaggggcccagagatatctctccataggaggggcaaatcccatcttaattattcatatcccactacatgtttcatagcatacccgaaaactactttcataactacccaattacggagtagcgtttagcagtccctaagtaagctactacacatgttgggaaccatgataatctcaggtctaaggattcaacaccaacactaaatgagattactgatgatacaacacatatggctcttgcagtgtctcatgttgggtctatccaacaacatgttcactaacatgtgtccacattattaatttggtatctatataccatgatccatgagacatgatcatcaattaatacatgtgctgatcatctaatcatatttgttacacatatgatatttgatcagggatcctttagaaatagtaacacataatataaagagtctcatgaaagaatcacatattcattaaccaataatgagtttatctattttaagaaacaatgtcggataaatatgtaaacatagtgtgtgatacaatcatctttatgattgcctctagggcatatcactaacactacgctggctctacaacgtatattgattcatatgtaatgaaagcataaagacaatttcatttggttccaggagtctttttgaaacctagttccaggagtcttgatggctcataattatatgcatagtaccctttgatttacactagttgcaaacctgcaaccctcggctataaaatacgacagctaattgatcctgtgcttcacttccaggtgctatcagagtacctcaccttcatttcatttcctgcagcaacatctttgtagcggtagtgcatacaagacaggcagtacatggtttgtatagcattttaccgcgtaaatcaaatggtaattaaattgggcacgagagacctcagggaaggaaggaacacaggatatgatggagtgcttagttttcactcgaatgccacatttctactctaatatggcacagcagatttcattcatgccacaaaactactgcagttcttggcatgatcaaattcctgtgattattgcctgattgtactggcgtagcagagagagagagaaattgaacatgtctttttatttgaaaccttttggctaaagatgccatgttttctataagagtttataaaatcctgggtgataaagttctagcatgcaacctctgctaaagattcaccttaaactaactaggtggagtaatttgcatgttggctgcattcgcctgcgatttgttgtagctaatgagatcttccagttggatgtagcataggaagaaagagtcataactaatgctgaaaaggagcttagaacatatctaaagacaatagtggtggtgttgtatctactttaaacaagattaagattagacataaggcaaggctaacttggaccaaagaaggtgatgtcaattgactgttctttcacttaaaagcagatgccagaggagagaaagaattatacatagatgttacaaaccccatcaagggatgtaaccactcaagacaagaaagaacttcatcgttttttcacacaactcctaggggttccgacgatctcggtgcctgaactggtcggcgataaacctaccaaatgtatagctctactataagaccaggaggatacagcacaaggtgaattaaaggagactatcttctccatgccatctgaaaaattaagcccctgatccggatggttacattggggcctttttcaaacaagcttgggacatcattaaagtctgcaactatatatgcccgagcattatcgacctataactttgattcacagttttgttcgaattgtgacagagctacttgccagtcatttcgccccaatattgaacgaattgatctcgtataaccaaagtgcttttattcgtaaaagataaattcatgataattttctttatgtgcggaatttactgtatggcttttatgctcactactagagaaataactattaacgatagaaaatgtggtccataaaagtataaatatggtccaactttggttctataattaaagtatagtaaaaacgggtattgtttggctaaggctctatttgttttaccctaacattattgtaatctatattattgagtcagattactataaactggattataataagctatagtagatttgtttgtttctctagattatagtagattaagggtagtgaatctttaaccacccgataatctaaaaaagaaaacacgtttataggagattaacatattatactaatatggcttataaattataataatctatcgtaataatctacttgtttgttacagattattaccaataatccaaattataatattcctaagctaaaacaaacagggcctaagtcaactagtcgggataacttactagtctgttggtgtcctatcatcggaaaagaatgttttagaaggcaccaatctctacctatactaattggacactttctacgagctctcacgttaattaaaaaaatctgaccgtcaattcaaaggaggttaacatcgtgaccgtagatcaaattgatctatctccgcaaatcaggccgagaataacctcagatcagatcaacctatccgcatatctggccataaccagaaagagcgtggcaccactgacgcgttgacccggcgggcgggatgcaatgcaagcgtgttcacacggcgatccatcgatcgatctggggaagcacgcgctccagcggcggcggtcatgcatggcaatccatcgtgtatgcagcggcctcaacacgtcatcctccagccctctagccaatttcgtttcctggtgagatcatccgcttgtggttgtggatccgtacgctgctgcaatctagcctgtggatgggttttactgacggctgctaatgcatggcgtgcatgcctttttgcagttcatgccctgctcgcagaagtggaggagatcaacttttacagtggtcatcgagcaccagccaccaggtactttaatatatctaacgaactctttcacgtctatctgcttcacatttatcgtcctgcatgcatgcatacgactatatacacaaattgacaaatccttctcatacatgtatcattgaattcgtcaacaaaaagctggcgaaggtaaggcgcccccagtcaaataaccaagattggtttctaaattggttgttttgttgttcgtccaaaactcatctgcgtatgcttgcacctaataaaagtaagatctatatatcatcggcacatacagttattatagttattatgcttacacacattcttaatccatagtttttgttttaaaacaatgaatcataagtgttttgtttttccacctattaaatgagttgttttatagataatttcgacagccaaacccccataatttacttaaagaagattgaacattaatatatcataatttgttagcagataaacatatattgatccacattttttcttaaaacaaactagcatataatgattaactttccgtgccctgtctctgtaaacccgtatgcactgtatgtactctacaatatgcatattattgatttatgccattcaattttgatccctgaattatttttttcatcacaagtaatacctatatcgctaataaatatttcccattctttgtccaaatacatttctttgaatgattacatgattatgttcacggatatatataatttaccagcctattccatagttgtttttatttatcaaagttaaagtgtaacacaatggtaagtcttatggttattcacattgagaaggaatcaaggaaagtcaagagaagagcaattagactttaggagtcataatctaatcatgtaatcaacaatgtatgcatagataaaagtgattccaggtcctttttagagattaaagataaatgaaaaagactgtgatggccatcattaaataaggtatagttggatttaagattgggtgaaaattaaataagtgatccgatggggaaaataacaatataaaattccttatatttgtggataaattatgagccccaaaatccgttatgttggtggatagagagagtacttattagcctcgatgtcatacttatgaagaggctattagtataaatactttttcacgtacagatagtgttcatatttacatgtcttcccacttattttatttgttgcatgacaccatgatatatgccaataaagaaattctgggtccattaataagagatggttaagtgcacttaataagaagatgcttcattaacttcatgttgacctcaccctttttcttatccagatatcatattctcttagcatctctcatagctaggactgattgaagaaacacaacaaagtcgtggaatgagaaatatcaatgacattatgctccaaatcatgtaagtttaattaatatcatttaatccacataagtataaagtattggcagcagtttatctgaaatttcagcatgtgcatagttgaaacaatgcaaatcacactatatttggagtgacgagaaggggaaattggaaaataatttttaattcactagaaagtgtattgtttcatctaattactgacaggaataaacatatgtagagcatactatcatgatcgctaaatattaaattacaataaataaaatataattagtaatatttaatttttagttcatttggatgtttagcatcttctttgtcaaaagattcatcatcatgaaaatgtacaacacgttgttgtataattattatttttaatatttatactaaaatattttatttcaattatatttattaattaacacattactacagaaggttacaacttagatgcgattcttaccttttgattacaatatcaaaataatacaccattcaaaatacttaaattttaaaaattaagaatggtgcaatgaattctatgattaaaaaaattaattcacgcaggaaacaaattataaatgtaaaataattaaccaattaaaattttatatgattaaaattattatataaaattccccgtgcaacgcacgagttgacatctaaaataaatgtattttaataattatattgtatcaaatgtgtgaaagaataaaataagttataatactgcagaacagatgtcacaaaataggagagcactgcatgaaattactcaatttatatacgaatctaaaaacgaggtatttatgagtttctttctttctgctgtgcttgtaagtctgatatacgaatctgtgagagaggtcgaattgattaaggtactaatgtatgtactgatatactgacagagtcatataagtcttcttatgttgctacaaatatatgttccattccatttctttcataattatttaccttgagattgattggattggtacactaatgataataaattcaattaattaatgttcattgatcgcactacataaatatacaatgaattcactaattaaaaaaataattcatatataaattgccacactcggctcccaattttgcatttctttcactcaactcagaaaatcaaaccaaaaatcatgatgttgcaatttccatattgactcttcttttgattaaacccattaaacttttacatgattcacaattagtataatattaccccgtgcaacacacgggttggcggcttgttcaataaatacaggatcacaaaattgaatagatttggaccatgggctttgatggaaacttcatggcctcaagaaaatttcgagcttatttttccttaagtagccatgttgaagctccatgtctgtttcttataactagtccatctcaaaatataaaagtttctgacattttaaagatcaataaagaataaaaagaaattattgtgatgcctctcattaattgagaggtgattgcagtgtgggagggtggttagatataaaattgagtgaaaattaaatgagtagtgattgttgggagaagtagcattttagaagttattatgtttttgtcaaatttcaaatgctataatgtaacaccccaaactgtctgtcgcctatagtagtgggttggtgcaagtacctataagttgcagcagatgtgatttattactatcataaaagttaggtgagtgatagccaggttaacccttttatatgaaacaatgatcataaaaatgtaatatggaatactacgtctatataggctaattcaatgtgtggaaagaactgatgcaaattttaaaggaacggaatgagatgtgtatgtgaatggaattgtgaaatatgtgaataatagatgtgtgaaatatgtgaataatggatgtgtgaattatgcgaatggggatgctggggatgtcgatgtgctgggaatgctggggaatatatatgtttctgtcattttacagcgggtatgactagcagagacctgaggctagcaaaaaacatatttttttttgggggggatactcatcggtgataggctttaacttaaacccgatgggatgacctcatccgtgacgggcttttgttaaagtccgattgagttgagttatctccttgcctcctgcttgctgcgccaattggcaatgggtccaaaataacataatagtttataatcacttctttggacggatatttctcaaagtgcaacgacaaaaattgtagttccccgacttattagcgcgttggtgagacaactcacaaaaaagggtgtcaactgatgcaggcaaaatctgcaattcaatgttcagcgatcgacataaggtcatctagaccggtcaaaatgtcaaggtaatctgtgaggttgcacactcccagtcgagtgaaaccagtaatggtgaggaaaacgaataggaagaggtgagaatgtgcatcgactttactgatgtgaaacaagcatgtctgaaagaaggcacccatggtaaaaaccaatttgccatgtagagaacctctgtggatgaagaaccaagaattgcaatacattttttcccaacttctctcattcctattattttcacaaaactaggaagaagaagaaaacagaatagaacatgagttgtggagttctaccacaatcaagttagtagcacatgggagcagaaagtagtcggcctagttcatatatggggaatatatatataacaatccgttacagtagcaagaaccaagatcattactgctgaatattcagcataggtacaaatcaagggagattgtattgaatcaatagtaataattaacctgtaggggagtaaatcattcgcggacactgaaagattatgaaacttctatcagtgcgttcagatatttttgaacaaagcaaagatggtattatgctctggtagttcgtggatagtctgtagatatcgatgagtaacctgtgggatcacttattaatgtgttctctggagcatcatactttcatataatggctgacgaatcaattcaatagcaactttaaagctttgaatgataattgggctgcgtactattttataaaatgcttaggaacttgtccaatgtctcttggacggtgtagaaaacaaatggataataggttggtcgtatcaatcaatgactatatgggttctgattgtagtgaaatgtattttgctaaaaaatgtggaactagttttgatagaaaacaagtggtcatcacttaactagtttccacaatagtgatcacggaccgaatcttgagtgttatggaattcctcttttaagtgaggaccacttgttttctactccatccgtttcacaatgtaagtcattctagcatttctcacattcatatctattatataagtccatgaaactttctacaaacgctctcataccgccacatggcattctaataaaatagagaaaatcctagaaattctagaaaaaagcaaaacatccaaccgttaatttttatttaaattggtggacccattattttgcactattagatttatctcaataagaaaacaaccaaagccacctatttccagcgttagatacttagattagattgatctgtacacctcgcctatttccgtacacacacctctcctctcttttgctgcccctcccctcctattctctttcctatttctatgcaatcatttttttatcaagaaatcaacggttcgatgagttcaaaataattactatagtttttaatatatttcgtaagcaaacaatcagctcaagaaaatccttcatcgatatatggagcagttctaccgactgctgtatcaatataagcaatgcaagcaacttccatctctttgtttgatctctcaccttacagctggcttatcactttgattccacgtagtagtagtgcagcaaggctatctttgatttcatataaatttcacaaagcttttggaatataaattaattaattttaggcatttgagttatcaggtgcttcaaatggttgtcaaatatgcatgcgtgctccgttctaggcccatgagtacttcatggaaaactcttggcactactagaaaaatgattttttatggcgtttgaaaaatattttttatggcggctacgagaaaaacccgccagcgtaaaaaatcggggggtgggaggtcacgggctgccagcgaaaatcagttctcgctagcggccacattaagagatccgccataaaaaatattatatttttcgaggcggacctcttacgaaaatcggcgttttcgctggcggctgctaaaaagacccgccagcgaaaaacactgtctcgctaaaaaattttgatggcatttaaaacaatgcgcgctagattccttcacccaccacatttaaaaccgatttcatcccacttccactacccacccacccaccacatttcttcccactgccagaccacccacccacctcatctctttgtcctcctccccgacctctctcccttccttgcgcccccactggtgacggcgactggtgacaaggaccacggcgactggtgacgatgaccacggcgaccacaacgacgggccgggccacaggtggcgggagggggtgga

SEQ ID NO: 7557 - DNA, 7282 bp, Oryza sativa
cggtattgggccggccaacaaggggcagcggggcgctagggcgcggcccattaggcccgacagcaaaaagggcacaggggggcgtcgggggggagttagggttagaacccttaactgccccctcgcgggatttctgccgccgccgccgccgccgtcgcctttccgttgccgatgccgccgtcggagccgctgtcgcctgtccaccgtgcccttcccctgccgtcgctgcgccgtccgtcgtcgccatttccctgtgcagcttcgacgcgggacgcgccgccgccgcatcaagatgcgtcgccgccgccgcctccatttccaccgccgccacacgccgccatctcctgcatccaccatctgccgcccatcgccatcgccatccaccatccaccgccgcctcggccgcccctccgtccgccggcggttggccggccggattaggccgacggctcccgatcctcatcggagtcggaaaccggccgagccccgacgccattccccggcaccccgttagggagtgtacggctaggagagccatggggaacggcgatgaaggtgtggcggaggccgggacggcgagcggcggcttcgctggcatgacgacgagacgaggacggattgaagaatggcggctcccccgtgcgcgcagccatggtaccggtccaaccggaccccggtggcgcgggagtgggggaacggcgtcggcgtcggcttggggtcggtagggctggtgaagcagcggttgatggtggcggcagcgactccatctccggggaaagatcgcatggctcgccgggcagagtcaccactgccgtccatccgtggtgggcgcagtactgcaccccttgcacacagatacggcgaggcactgcggctaccggagatggaggcggaggaggagcaaccggagtagcggccaccacgatgcgtcggcgagggtggtggcgtcggccaccagccctagcccgacgttcatggtgttggtggcggccgtggtggcggcggcgactcctctccgatcgatggagaagatggggaaggcgacgagcgcgctgattgcgagaaaggccgagaacggcatccataatccaatgaaaggtaggcatcgtaccttctcagttgattcttctgttcgcttttctgttagatcaaaagcgatgtttcttcctttcacttcgcgatctccttcgcgagagcgaaagtgctgataacatgttaaatgtggatagaaatgattgagcgagagagattgagcgagagagagaattgaacacaagtagagcgaatcgatggatttctcattgatcaacagttaatttatacaatgtgaagcggtgtcaaccgcaagggacgcggtgtttgggaacatcgcgtcggttgtcgagagggacgccaaagggagagagaggagcgatctcctcttctctgctagttagtttaggaaccgttgttcctatttccttgggtggatgagatcacccgtagtttcttaacaaaaaaaccgtaagttttggtcaacaccgtacaaaacccctaaaaaaccgtctaatactaatacggatcgattttgacaaaccgagatgtaacggtttcacgatgatgagttccgtgaaccctggccataaacctgtactcctatgttgcagccactgacacaagacaccacaacagctgcaaaagtcaacagttgaaaggcgtggtagactagtagtaggtggtgcagcatgacgggcggagaacctcaaaaaagttacactaacaaaagaaaataagaaacctcaaactttatttaagaatacaatatttcattagggaatctaaagtaatgaaagaaataacctttcttccaacctgattgagccacatcatcaattaagtatatgcgtgactatatagcttgttaaaaaataattaactactacgaggttgaaatgttgctttaaaatactactccctccgtcccaaaataagtgtagttttgcactattcatgttcaacgtttgaccgtccgtcttatttgaaaattttttatgattaatatttttattgctattagatgataaaatatgaatagtactttatgtgtgactaaatgtttttaattttttcacaatttttcaaataagacggacggtcaaacgttgaacgtgaatagtgcaaaactgcacttattttgggatggaggtagtatgaaaataaatccatctacgagtttgagaagtatgttgatgataatactccgtatattatcagccccatcttttggcttatgcttatgtttataagccaaaatttaaattttcaacttaaaatttagagctgattttagattttttttattatagtttatttttcagcctttagttttacttttagaacactaaaaacacatgtataaaaattttatttacaaattatttttcgttaaatatatcgtttcgcttattccgtcggagtccaacatgtttgagtgaaaagggagcaaggggaaaaagtatatcggccgcatccttgaacacatcaacacgtatgatatattttttattttatatgacataatgtaaaagtacttttatacttcggtaccatatgagctttagtaaaaaccatttgccttgtttagatcttaaaaattttggctaaaaacgtcacatcaaatgtttgacacatgtatgtagtattaaatgtgggaaaaaaactaattgcacggtttgcatgtaaatcgcaagatgaatcctttaagcctaattacgtcatgatttgataatgtgatgctacagtaaacatttgctactgatgaattaattaggcttaataaatttatctcgtagtttacagacggaatctgtaatttgttttatcattagtctatatttaatattttaaatatgcgtccgtatacttacaaactttacatccaaataactaaacacccattatggtttgagggaagaccggaagagggtatttcacatggttcgaagacctttgagattagctttaaactatggttgcttgtaacgatgtcggaggttcagaaataaactttgcctctttcacatatgcagtaggaaatatactactacttcgatctatgtggaaaatactgtgagaaattaagaggccttctcattcaatatgcttgtcgaatatccctctcagtctccaaccgtataacactgttacaaaataaaacaaataaacgcgtacatgcatttttatcattacactggccatggacaaattttgcagtggcttcgactaagttcgtttaggcaattggggaacgactcctcgttcatcataagcacactcttttaagtatatattaaactgtgtgttttatataaaagttttctgcgtagaaatttctaaaagatcaaacaaacaatatcaagggctattcagattgataccattttcaaccataccattttttttacaaaattgttaaaaaaatatctatgtttagtttgttgctaaatttcataaatacataagaaatcatgtgccaaaattttagcattgccaaaatttgataaggcatattttggctataatatgaacatatccttaattttataataattaatattcaactaatcctgtactaatgacttatctcgctccgttatgccgtaggaaattccaacccaacaacctatccattttgagccaaataaacaaaaatacaattttatcgtcatatatattcgccatcgacgaattttttttgagcggcttcgtcgtcattgacttggacttattttgagtcctcctagactaatatggcaagagtgctgacttcacaatgtaattgccgcgcaagaatgcaatattaatgcaaccggctgctatatgctattccctccgtcctattttaagtgcaactatgattttttatacacaactttgaccatccgtcttatttaaaaaaaataaaaaaattaaaaacataagtgacgtataaagaaccattcatgttttattatctcataacaataaaaatattaattataaaaaaaatttaaataagacatatgatctaagtttggcacgaaaacttatggctgcagataaaatgagatgaagggagaagggagtagctagctcatgaaggcactgacggccatccttgactttacttgtcagcatactccataaaacttccaaatgcacacctactccaaccgtgcaagttatacatgactttgaagactcgacgacaatcatgcatgttggtactacacatcatcaccacggtacaccgattgcttatacatctcaagttggcatttggcaatgctcaatcttgttatatatatgccctttatcttcaaggaagaaaacctcaacttcaaattgtatatatatatatatatatatatatatatatatatatatatatatatatatatgttgtttgtacgcaaaaaatgatatattaggtgtttgctttgttgttttgctaggaactttgtcttaaatggggcacatgtgtcaaaccgttgtcccatgctatctatataggctgcctcgcctttctagatgatctcatactataccagtatatacaatatctagagtaagactaaagaggagataagtagatttatactcaatctatgatgttgagctatatatggatgatagtgccttgataagtagtagtgggagtatttgtggtccattgtgtaaagtgtaaagtcttgtactcttgtgtgctataacaaaatgggatttcatttcacgcttataatgatatactccctccattcacaaaagttatacgtattactttaatttatcacacaaatgctatgtttgggagcttaaaattctaagaagtaacttgttggtatgagaatatggaaaagttgggtttctgaacttctggcttctacttcattttttggattatacaactacaacttctcaggttctgattccgagagaagcaacagcagctagaagctctccaaacaggctcaaactaagggaactcaaatccttcgtgtgtttaatggtgtccacacccacaccctctgacctctgtaaattgcctacctctgttagggggtgtttagatttagaggtgtaaagttttagcgtgtcacatcgggtattatatagggtgtcacatgggggtgttcgggcactaataaaaaaaaactaattacaaaatccgtttgtaaatcgtgagacaaatttattaagtctaattaatctgtcattagaaaatgtttactgtagcaccacattatcaaatcatgaagcaattaggcttaaaagattattctcgcaaattagtcacaatctgtgcaattagttattttttagcctatatttaatattccatgcaggtgttcaaacgttcgatgtgacagggtgaaaaattttagggtgagatcttaacagggccttaattgcatacgcacgaactgtctttgctattcatgcagtccatcaatcttgctcaaaaggagacccttggttgccaaatcaatttaactagttgaaaccccgcacgttgcaacgtgatattttgttaagattggtggttgcatttggtaaattgaagtgatataaaaattcctcactattgaattgggccatgattaaattagatgggtctcccgtagtggaaaatatacatgggcctcacatggtggatgtgtgtatgggttgggttgtgtttagaggcgatcaaacgactcggaattgacgatgatgtgaaacattgaggtttgagctttaggatcttaattgcagttagtgggtaactttatagtaagaagagatcaacgcagataataattttttttagaaaggttacagcctcatatgaggattttattaaactaggaaggtagcccgcgcagttgcgcgggcatcttatttaaactatcataatttttgttattaggattttgaatattatgacttttgtctctcggtgaaagaatttgaaggttctttccaacacatgattgaaaaaaatatataagtcagaaacatgttagaaatgcatgtgtgaaacaacgaataaatgaattttggacagtaaacgaattttttacagagtacagcaataatatgaatgttaaaatttgttaacccacatagatgaaatcatcatctttcattgcataaataaattgcagttaaccaaacaacctttgcatcagcagcttgattttctcgatcccatgcgaaggaaaaaaacatgcgcatgcatcttatttctattttattaattttattgccattgagatataccgcaactttttggatatcagctaatcgttagatgcaccgtgcatggatacctcgtaagcaatatgatttgggaattagtagatagtggtagtgtggatatacctcataagttataattgatagtatacatattaagcgttttagtagctttctaaataacttatcggattggctactcccttgtccaatatatctgtaaagttcatcccactaagtgcagctaatgctaattctctcttctctcatgaagccacatcatcttaattgtttttagcccttggatgattcatcaagggtgcaaattgcatttcttctccccaaaagccacaccatacaactcaaccatttataacttttcaataattgatcaaagtacaaaatatacaagcacatgaaagaaaatcatatagtaaataagatttttttttctacagctcatatctactattttatcacacaaatctcccgcagcaatgtgcggggtacccatctagtttatagtgagaacgtttcccggactactaaacgtgtaatattttatctttttctcataatttctatgattttatctaatttattatagtatcatgtatgaatttaagagtgttcataagatgtttaatggactttaacttttctatgtttatttttgcatggtatcgataggatttgaatttttcatcagacttactataatgtattcgtgcaaatcaaaagatgcaatcaataggaatcccaatcgcatactttttttcctataatctaaaggagctttgaattttaattttaaatcccaactatacttttgagctgagtacaaactttttaacggtgtattgccttttggatttcacaaaaaaaaaatgaaagagaggaacatcggaccggcgtgggtacatacttatgtgcaccttgaagtggggacttttagagataaatttaattggtagttttttaagatagatgtaatggataaaacaatagtctaccaaaataaatgaaa

SEQ ID NO: 7558 - DNA, 15368 bp, Oryza sativa
ggtggggggtgctgcacgaatcttaaaatttgtgcgatgtgaagaggggaaataagcgatgtatagatagtatcataaatctaaaccagggacagttaactatttcccactgttcacttaattattacatctgcaaccatggaaccattgaaagaaatgtagccattatatatatcaaagctatatttggtagcttcttccttcgttacttttccctggatggcagaataggcaagcacacccagtgttaatacaggtcccatgcctgcgaaaaattctgtagcaatccacctcacacgtctgcggatcacacgccgtacccggagatatgaccaccgttgtgcagttctgcgcttggtccgctgccaacttgcttgccggcacttctgtggccaaaaaatgcaacaaatttatgtgaaaaagtactcttgaaggatatgcttgttcagcaaatcagtgttggagttgggtgcaaattaaagttacctgaactcatcgccaggatggcaagggccataagcatcagatgcccaatcctcatgaaactctgttggtcgcaccgttgagaatgggagatgttgcgcaaggtgacctgggtcccttggcttgtggatagttcatatatagtgaaatggcaaggctttggtttaatttgctctggaagttgatatttttttcttttcgggatcagttttggaatatatgatgatctttaatgtgcataattaatatggatatattcttgtatctagaaacaacagatacagttaataaataggtcatgggccactacaaattggagatatgcacatccagcttggcatttatagcatatattcatcagtgcagtcatggggccaggccactaattgtttgttggggcattttctacttcaaggttataatgaaacagcctcaaagatttaaggggctttttcgaccttttcattttcaaatcccaactaaaacagctttcattccccctggaagagctcgtaggaacaaattgtatccttatcacctaattgtaggaaaggttaatcatgaatgaattttaacatgtttcatcttacatatatcaattgctttgctccatatctttctctgtaaatattaacatcttgcattatatcaaaatatgaacatattgcacaattacttgaggaaaggtttgcaaacataagaacaagaagaggtagagatgaagacaaaaaggtctttattggtatatgggaattttgtgctattattgttgtttgctacacatcccttggaaaagctgaccatatttgtcaccttgtgatgacacatgaagcacttgctacgatgaaaaagctcttgcataccaaaaccaccttgcacagaaaaaaatggaatgtccaatatagaaatccttaccaacaatcgtttgaaaattggaaattgttatagggaaataacttgaatatatcttgagaaaatatatttaaagatcattgattcaatccaacaatgctaatatattaattgaaaatgttagcacacgaagacatatgtttcatgggaaccaaaagcgtaaatatgcttaagtggaatatatttttcataaatgactagtttaaaacattttgatgaccacggacccaaacatgagcaattcaacatttaaataatttttttggggggaatattagcaattccagccgggcttggtctggaggacacgacaacagtagtgatggaggcggctgtgctgcacacggagcaacgatggatgtggcggtggagggctagccctctagcttgggcttctgtggtgccgccaaccggccagacatatgccaccgtcactgtcatttgtcgctcaagcacagatatcggtgacgctagtaggcaccacacaccatcatggaggtgatatgtgaaatatcgatagtgacattcccaatgtcgtagcctgctacaaggcgtctcattagaggttccctattggtgcggcatccttatggcgatgtctgtgttggttgggtttgatggcaatggtggcatttggatgaatgactgatttatataactcaattactctccgagttatcttccgctttgaacgtcagtcacctatagttatgggaccgaaatttgatcggcaggagtcggccgctgatttctgggtttttgcttttctggttttaggaaaataaggactacatacatacatctgattaagttgtcgatagaaataatggttatgcatgaacaactatatatagaaatcttgatctctttaaggtggtaaactaagtagttttcttatactatgtaggtaataactgactacgagtgggctccaccggcctgtcggtgaaccaaagcaagacatgcatggtggcttgtccgtttgtgctagccattggcaaacaacagtgtggctagggtgtagtccacctgggaagggccatgagttcattgaactcatgtacacgtctacatagcagatctaggggtggtcctcattgtccccgtgctcccaggaccacctaaaaaaatcctagctcaatgcatatatatgtatatatatatgtgaaaataaaattttgaaaaaagaaaaaaaagcttctttattaatgtattatgatgcatatttgatcaatttatacttctaacttggaccatccatatatagatacgccggcctttgcatatctactagaggttgcggtgtgcaagaggaggcgagagagcgagaggggtgcagcaattggctcgatgtgggtctatggccccaggcatcattgacaagggtggatataagaagtgactgaaatattagatgtgaaatggatgaaaacatatggcaggttcttccactcatgcgctacctgtacatacattgctgttaattttactataagggcaggaggtcacagtgaacacacatggtgaacacatgataaaaattgcatagccgtgtatggttgtattctacatttaaccttactaacaaatttaaataggcaccaatgtatttgacaaaattatataatttgtgcagatggctatatggatgctacttcatactccctctatccaaaattcttaagcatattttattttttggttttttttccaattgagatggtcagatttgtagttttcatgtgcatagttaaattgttgactagaacccaagcaactatctgcaaatacttcattagtttgttacgtggaggatgagttaattcctccatgattttggtgacaaaagaaatatgacttttgggtggatggagtatttattagaatgtttatgaaattttgcattgtgctgaaatgataaatatttttttcaagtcttagctatttacatgcaaataaatttattaatgcaaaaaaaatagaaaccaggctaggataaattcataaaaggaagccattaatactcacatcgtccaaccatatcataattagacaataggctatattagattcttataaggaagcaattaatactcacatcggccaaccatatcataattagaaaataggctaggataaattcatataaggaagcaattaatactcacatcggccaaccatatcataattagaaaatagactaggataaattcatataaggaagcaattaatactcacatcgtccaactatatcataattagaaaataggctaggataaattcatataaggaaacaattaattctcacatcgtccaaccatttcacatttgtgaaccatgaatgaaaaatctttaaaaatagaggcaattaatgcatagcaaaaacagaggcaattaatgtagagccaactagtcccagtgaagaataaataaatgcaaaattttgtcacttacccccttcttttatattaaaattgaagataaaacctattggcttatatgtcagtgaccttatatgactcatatatcgatgatataggagggtatgtccaagaattataaattaagggagggtgtatgaccaaatctttcataataaattagatgtatccgaggcatgttgaacatgtttgcctttcttgaaagcataaaaccaccccccctcccctttcccacctcacatgtcccacctcttccccaccccatccccttctcctctcacttcagatcgacaaagagttctatatagtagagagagatagagagaaagctagggatattgagagtctgacatctgaaaattagctatttgaaatctagagagttgagaagttcaggagagtagagggggagagaaccgcgtaatcagatggcttcgtcatcaaatccatcaaatcttccctgctctagtgatggtgtatgcatgttatgcaaggtgcttacaacagaggtagagcagctgcgttgtagcacctgtgctacgccatggcatactccctgcctctccagcataccgccccttacagatgtggcccactgggtctgtccagattgctccggtgatgtcacagccagctacccgccatctgatgttgttcgtccggagagcagcctcatcgctgcgattcgtgtgattgaggctgatccggtgctgtccatccaagagaaggctcgtcgtcgccaggaacttcttggccatgccggtgatgcaggggctgcaataactgaagctgttggggaaaacgtagaggacagtgagagcaacaatcctttgtctatgctgaacaagaacatcaactgctcattttgtatgctgcttccagagcgacctgtcactgtaagtatgattgctcttttgccaaccctgtcaacctttgctttggaacagcctagaaaaatatagaaatgtttccatgaggcactacatgtcataatatgtaagctcataaagtgtaagtttgtaccattacttagatctcagatcacactgaagataggctcctattagcacacaaataaattatgattaagttgttctgattttatttgaattgatctacaattgctgtacttctactgcaaattacatcaagtatgatatatacatgaaaatacagggagctactggattgttggtttctccatctatttagcctgttttactgctctgagatatgcctctgtggatgcaattgatctcctttgacttttgccagtatctcctcttccttctcgacagttgtgtcctctcttcagcagcacccaccttcccgatgtttcttgccaactttataattttcaccttgttaagaacctttctctcttgattatcaggctataggatcttccagttaggaaagagctatgtatagttttcttctatagggacagtgatcattacatgcatggcatctcgttgcttatatgctagccctcctcctatgagcttaatttatgttgccatcgatctgtctcaacctggaaaatttacattacaaaaatgtcatgcacatattcgtagccaaagtcacatatgatcgcctcctattgccttgcatagctaatagttctgcattcagtataactttctaatacaatacctattgccatttgcacccactatgaaccatgcacaactaagtcgaatcaaccatgcacatatgtgttttggatatttgtattatctcgacaatttttaatctgctccttgttagcaagaacgcctcgtttcatagcatatgcatttgtctggtaccataatttatcacagtgaaatgactaatgatctcacaaaaagtggttttgttcatgttactttttatctccgtcctttatttaaatattgaaatttgtggaagcttcatttattgtttacaaaggatatatttccatggacagactagtcggctgagactcattattatctggctagttcattttcatgttatttttcatgtaactacattattatcctatgaagataatgctaattaaccgaatacataggaatttgaacaccatttatacctgtgtttcagaatattttactttgctgaacatcaaattccattattatagcatccatgtccatcaattgtcatcacataatattttcctttgcttacatgtattgtgcagacaccatgtggccacaacttctgcctgaaatgcttccgaaggtggattgaaaatggtaaaagagcttgtgtgatctgccgagcacctattacacaaaaagtagcacaagatctaagaattaacttggcactagtccaagctatccgcatggccaaggctgcaaacaatgctagcacaactggtgaaacaacggtttatcattataaagaaaatgaagataaacctgacagagctttcactactgaaagagcaaagagagctggaatggcaaatgcttcaagtggacaaatatttgtgactattgcaccagactattttggtccaattcttgaagatcatgacccaaggaggaaccgcggtgttcgagtcggggaccattggaaagatagaatggaaggtagacagtggggtgctcatttccctcatattgctgggattgccggccaatctacacatggggctcaatcagttgccctctcaggaggttatttagatgatgaagatcatggagagtggttcctctatactggaaggtttaatattactacctgaccttacattgcgatttgtttctgtggtttatcaaaaactagttaatccattattttctacatttggcagtggaggaagggatctaagtggaaacaagcgaacaagcaaggagcagtcttttgatcagaagtttgagaagctgaatgctgcattacgtgttagctgcttaaatggctatcccgtgagagttgtacggtaatgtttttttttctctatgtgcatccatgacaaatttagtgttagtttatgtaaaatcatcattatattatttcctatgggttgcttccgggaccatcacaaaaaatcaaagccatcacagaaggacgttcttctggtaatgcacggagaatatatgtagacctctatatgttgcaagatattatttgttccattattgttatgtaattatgatacgttgcgaataactgtactcacacaaggttattgtcttttaaggctttcagtgttacgtttagtatgtttccactacatctaatacgaacaatcttgtttcatttctttggaaaaagtaatcccaatttttgtttttgtatatgttgttctgtttgtttattaaaaggtcttttaaagagaagcgctcaccatatgctccagagtctggtgttaggtatgatggaatctataggattgagaaatgctggaggaaaactggagttcaggtatttatagttttcatgaaacattacagatattttttgtgtaggctgcaatgattttttttttagatttacaaaactgaatgtatccaaaattatagtttatcaacttatcaatataagtgatgattgttggagtttttgttttttggcctcagggtacattcaaagtgtgcaggtatctctttgtgcggtgcgacaacgagccagcaccatggactaggtttcttatacatcccttatctcatgtatacattgctattgttattctatttatttacttttccatttaattttctatatttacttgaagtgatgaacatggagaccatccaaggccattaccagatatcgaagagctgaaaaatgcaattgatattactgagaggaaaggaaacccagcatgggattttgatgtaagttgttgtattatgttctcagaaaaaatattagcttgcacatattgtgacatctcctttttcttgttataggcaacagatggatggaagtggatgattactccacccatcagcaggaaggctgtcgtaactggagatcctagaggcaagaaaatgcaaggagcagcaaggcatacaaataacttgtcaatgagagaaaggctgttgaaaggttttttttttttttgtctatgaattgcagttcatagtagtggctgcttggcattgcatttccactgatttcagtcatatattttctttattatagaattcagatgctccatatgtaggaacgtgatggaagagccagtgacaacaccgtgtgctcacaacttctgcaagaaatgcctgcttgggtcatatgataatctttcccttacagaggagagaagccgtggtggtcggaccctccgggcacgaaagattgttaaaaagtgcccttcttgtccaagtgatatcgctgatttcgtacagaatcctcaggtacagtaaaatagtagcaaaaattaattttgtatagattttagtcatttttttgcgagggatttcagtcatctttcccattcttagatgatgtattctttgttgtaaggtaaaccgtgacattatgaacgttattgaatcactccaaaaagaagctgagaaggaagatcatgctagggtgagtggagaaggcagcagtgcagcacttgtagattctgatgatgaaaatgacactgcttgggagaaccaagatgatggtaatctggatgagggaggttgcaacaatcctgaggacatgataactgaatctgttgatttgaattctgttactaatgttgataatactgaaaacaaggtggaagttcagcagcctcacaagcgtaccgccggtgccgggaaggggaaaggtggcaaatgggctaggacaagctctgcaccaggtgatgcagatgccaggaatgttgtgacttcaactgaaacattggatggaatagctgctgagaatgtggctgatttagtacaaattgaggattgcactttcactggtgtggaaagagccgaccccaatgcgttagaagttgatggcaagaatatgattccagacttttcagaagctgagaaggttaaccctaaacaggatcaagaagttcttccatgatgtgtttccttgcatacttgggatgtttaaaagtttttaagaagtagtattatcttattatctttggtgacattcagattgggatgatatcatttaatttgggaataattgaactcatagtgggggtgcaactttcacttcctcaggttcagacattaagctgctgcattattgaaacttgaaacatatgcaaattgcttgtgaagttttttttgtattcttcctcttttgttatccctttttctttgattatatttttttttgcttgccctgtttactttgcaaaaactagcttggactgaaatgattcatgggtcgtgaaatggaagaaatagtggtgatatatattgttgttgcattgattcccagtttctttcacggtataatgcagtggtggatttaccacccggcttgggcaggcagttgtccaggctatatgaacgcaaactatcaaactggactgatttctctacggtaaaatccatggatttaattacttcctgcacaaaccaagtagattagatttaactactctagttgggctgtacaagcagcaagccttataggcttacagccctgtagcatgcaattgagccctatcacaatgaataacatatggcatgctcaagcttatacgaatcatcttgtctttcaactattgaaaattttacatgcattttgaactaacaaaattgttttgcctttaattagtagtaaaatgagcgtataggcattacacatgtgggtagcggatttggttagactttcccatgctttgtgaaattcctggctccttcactggtataatgcattactagataagggaaggctcctatatgctaagttctaattgatgttattgggtgttcctctcaacacctgggaacttagtggtcgtatcaacagatattctcgataacatctggtgcataacgtgtgctacaaatgaagaagaggcagaggtttttaaccctctcatgagtagcacgcccaaccaggttgatatggtaggacagagaggtagagctgaagtgactttcttggaagttgaattgagttgcaggtttgcttgaagtttcctcaaggctgtagtgctccaaagtgagtacaaaaattactgtgtgatggataccatgatgattgatgagcttatgataaaaaaaatatcgaaattttacagtgcatggtttattggttttgggtgcagaaatttggctgctattttattcgaatttctattgagcttgattgttttgactgaattaattggggtaccaactcaagtgataaaatcatcaatcttttattgcaggctattcatgccacctagtatttgtgttggtgtttccataattttttcaaacattagatggcatttaatttatttttccaagttaaaataatgcatgcaaatgcaattaggaatgcgagaaaaaaaaacagccaaaaccaactaaaagaacatatattcaaaggcaagcatccacagctcatcatactgttttgaggactttgtttcggtttcttacattaagagtgaatttaaactggatttgaaatgtaacatggaattggatggttttggtgatattccagctcaatctatttaatattaggatagtggaccatgttatgatgtactccataaaatattcacatttcattccattggtggttttgctacggaataacgaaaaaaatcattggtttaaatcttaattgaaaattctaccgttgactgagctaaccctatcttgaataaaataatatttcttctgaaaactgttgattttcgtttcgtacgacaagtttagctttatctatgatcaaattttcctagtccgatatgttttatagtgtatcccgcacatgaaggtcagtaaaggatgtttgctttttaaatgttgttggtatattttgatagctctagaagagttagaaaatctatttgtaattaattttattacttgtaatcatgacaataaaccttgatataacaaatatgagttttatattccctcttattttggttgcatttaatgcggttacttggttgaattatttgtgactgacgtttgatttatctcttcttgtatgtactattttgaaactcttttatgcaccggaatcataaaggaaagcttatataatatatttcaacactataagagtaatttaacatcaagagctaaaacttgggtaagttataatgctcaccttcattgagtgaaaccattgccgctataaagatagccaattttgcttcacgacattcaaagtttatataatttactggtgaacattgaaaaaaatatccacggttagaggagacgtcaaaactaataatttgatggaaaacatgcaatcaatattttattattttttcaccaaaaggatagagaaacccattataatgataaatttgtccctcgggccaacatatgttactatgattggtttggtcgaactagaccaaaccaaaccaggccatgagtatattttgcaacctttcccccttttttaaaaaaaataggttttcattttttaccctaaatatattgctaccatatatcatattccttcttcattctagagatagcttagaagcttctagcccgaggggcaatatcgtccttttgaaatatatctcgccgattggactggaaataacaaaataatggatgtggtgtcgacctttggcaaattaccagtttttgaaggtgttctcccaccttttgctatgtttaccaacaaacaagctatgtttaagtgacctgtgtcaatattttaccaaatgataatgacaatacctataactttcacttatacatgtaacttgatctatcacctatgtctgacagttgagaagatggttaggagatatgttccatagaataatatactgatccttctcttcatgggccaatcggcctagagtatatatgtgccatcatctacttaacaccgtcatcaaactcaagatgagagcagaggatctgaaacattgaatttgagcaagtgaagttaatgttatttctcaagtctatgcattaggatgctcatcagaataagcggttctcaagatctttataaaaaagcatcaacatctacaataacaaataaatgcactatcaagacataatattgtggattgaatgaaactaaattgatgtatatattgatgcacttatttataaactcagttaatgttagaaaacaaaatgcagatcacctagcatgatgaggtctactgcatcctcatcaatgcccccttttgtgactaagaagacgagaccattcaacatcccctttttatcttatgtgtgtctagacagatgtggttctcccttttgcatcaagttgtcccttgggctcttgaaccacaacctgtggttgtgaactttgatgaatggtggaaccgaatcaatggtatggtttgtgcaagtaccaggaagggtataaacaggttgatcatgcaaggagcttggtctatatgaacgattgcgtcttcaatggagtacctccaagattatcagccatttgtggagtttggcagggactaaggggctctttgtaattatagacctcagctagggccttttatttttaagttccttttggtcgtgtaacgagttcgtgtacttcttagtgcttggtgtgtttggacgccttatttcttctcctattgacgcaatgatacgcttcttgcgtcttcaagaaaataaacttagaacaaaactatatgacttatattataaaactgagggagtactagttaaatagattctattccaccatgaatacaaattgccatgcatagtttccttgtttttgttgagaatataggcatataatgatttaatatattccataaataaatcatgacattacagatgtatactagcattaacgcatcattagatctacacatgtaaactaagcaataaaacatgaacagatcaaatatgcgcaacatatcgaacacgtaccgagatggcggaaagaccggttgctcggcaggaactactcgcggtagcgagcgtcgacgaaggcgcgcaggacgcgagcggagaggaaggcgagccgttgcggacgaaaagggagcagtcgcgcgaagcgcttcccaaaaaccttattgctgccttctcccggtgcaggacgtcgaaggcagaggttccggagacctgctctcccgatcgccggtgcacgctggcaagcgggatggagtagtccacaagcgacggcgcaacacagagtaggaggcaaaccctagattgatttcgtgtattttgcgtgaatgcggcggctcggtttatatagagataggtcgcttgatcagggcgcccggacgatctccattccgcgtaaccgaaccggataagtcgcgcgtaacttatccggatttttcggaatgtttccaaaacaaaacaaatccgaattttcgccaagggtgatgagccaattttgtggatcattcgacgcgtaacatcgtgcacgcgcgccgcaaggtaggcacgcgcgccgcctgccctaccttgccaggcgagcgagcgcgcgtgtgttccccctcttctctccaccacacatgcttcaagtggctaggagggcatcctcccttttaaggaggtccccctctcctagaataagcaaggtggtactaaactccacatgcatgccatcccatgaggtgggcttttgtgattttccaaagaattaatcttcgaatgggtcttagcccatctattaattccaacagttttcaccatagttgacagtaacatttttccatggacatgctcccctaccaccatcactgttgaggcagcattgccaatcaaatctgatttcgcattgaaatcaacattagccattgatattaatttatttacactaatcagtgtggttttatggtgtattgttaattgcacatcagttcacaagctagaagtcattaaggaaacactctacactatttaaaatttatgtgaaaaattcttcatagtgtgtgaatattctctacttcacagtggtgtacattgcaaccaaggagtttctatattgggccgacatcagtttattaatcatcatacatagttttcacaagtatcttcatattttagtactttctagctagcgttgggttggaatccattaggaacccacctctcgaactcaaataatagcaggtatcagtacacaaagtaattgagggttggaagaaccaaagtactttatgtacagtagtggagttggtgttagaagatggaaggagtacaaggccaaaagtttgttcaattcctttgaaaaagcagttgttgttgcctttgttctcttccttgtgcttgcttgggccagccatagtgagttaatacaacaactcaacttgtattgacctgttgctagccaccggtcctagcaatcccctttgctttaaattcaggttgttcccaagccaataagttgaaacctcctagatctaatgactgaacatgaagtgtcatggcataaaaagttaccttcacatttaacaaatcactttcatcattccggccgggtgatttgcttccaggcatggtttcattcatgatattatcataaaaatggttcttatagtccatgtctccactctgcttcgtgctaggaagtaggaacatgatagaagtgttgggatattgatttgtctttgcagttacaacccattttttatagcgcaatatccgtgagcatattttcagcaaagcatcacaattgcatttaggatatgggcatagtgttgacttcatttctcctgtgatgtccctttgcttgtattactcccttccttccatttggacagcacctgaacaacggccccaaaaattcagtggatggtaactgcgaagcaaaatcaagatccaaacacttttgcatttcctgctcaaagctagcatcaattgcaatactcctattttcgtccactcatttcaaatctatatccttgaaattttagccgattccttctatgcccctgaattttcttcactcctttatatacctctgaattttgatttggatccctttcgtacccttgccatcaattgaccattagttgaccgtttaataggtatagaaaagttagttttacccttcaatatgtgagaaataagtagaaatttgtaaactgtattgttggaagtataaaatttgttgtgtgattatcatatgcataagtttgttgtacataaaaaataatatatattaaaaagtatgtgtagcactttttaaaatgataaatatagttttggaaaacattcctatataatatatacaactggagaaaatatgttgaactatcataaaaaaaagctacatatactgttttaataagtaaataaatattagttttatgtcattatataaaattaaactttttcataaaaaatacctggtataataaagtcataaatataatagtcttatattatatagatactatactacatatgaggtgtaggcgttaaaacacac

SEQ ID NO: 7559 - DNA, 30797 bp, Oryza sativa
ggaagtcaaatttctgggtcacgttattacagctcaaggcgtggcagttgatccatcgaatgtggagtcagttaccaaatggaccccacctaagaccgtgtcacagattcagagttttcttggacttgcgggttattaccgccgattcattgaaaacttctccaggatcgcccgacccatcactcagttgctttagaaagatgagaagtttaaatggacagctgagtgtgacaagagttttgaggagctcaagaagaaattagtatccgccgtagttctgattctgcccgactagacaaaagacttccgagtctattgcaacgcatctcgccacgggcttggatgtgttctaatgcaagagggcagagtggtcgcttatgcctcgcggcagttgcgtccacatgaagggaattatccaactcatgacctggaattggcagcagtggtacatgctttgaagatctggaggcactatctgattggcaaccgctgtgaagtatatacggaccacaagagtctgaaatacatcttcacccaaccggatctaaatctccgacaacgaagatggctggaactaatcaaagattatgacatgagcattcactaccatccgggtaaagccaatgtggtggcagatgctttaagcaggaaaagctactgcaatgccctatgcaccgaggacatgtgtgaagaattgcagcaggagcttgaacgtctcaacgtgggaatcgttgaacacaggttcgtagccactctagaagcacggcctacgctcgtggatcaagtcagagcagctcaagtgacggatcttgagatagctgaactgaaaaagaatatgagggtcggaaaagcccgggacttccttgaggatgaacatggcacagtctggatgggagaaagattgcacatgcctgatgacaaagagctgaaggatctgatactcaccgaggctcatcagactcaatactccattcatccgggtagtaccaagatgtatcaagatctcaaataaaaattttggtgggccagcatgaggagggaaatagctgaattcgtcacgctctgcgatgtttgtcagcgagttaaaacagaacatcagaggcccgcaggactattacaacctcttcagatcccggaatggaaatgggaagaaattggaatggatttcataacaggtctgcccaggacatgatctggccacgattcgatataggtagttgtggatcggcttaccaaagtcgctcatttcatcccagtgcacactacttatacgggcaaaaggttggcagagctctacctcttgcgaatcatgtgtctacatggagtacccaaaaagatagtatctgatcgagggagccaattcacttcaaagttctggcagaaattgcaagaggaattgggaacccggttgaatttcagcacagcctaccatccgcagaccgatggtcagaccgagcgagtcaatcaaatattggaggacatgttaagggcttgtgcacttgattttggtggagcttgggacaaaagcttgccgtatgcggagttctcttacaacaacagctaccaggctagtcttcaaatggcaccgttcgaagcgttgtacggccggaagtgccgcacacctctcttctgatatcaaacaggcgaacgtcaactgttcggaacataagtgctaacggaagcggaagagaaagtcaggaccgtcagagagaggctaagaattgcccagtctcgacagaagagctacgcggacaaccgccgaagggagctcacttttgaagccggggattacgtgtaccttcgtgttactccgctccggggagtacaccgttttcaaaccaaaggcaagttggcaccacgcttcgtgggaccatacaaaatcttggaacgaagaggagaagttgcttatcagctagaacttccattcaatatgatcggtatccatgacgtgttccacgtgtcccaattaaagaagtgcttgagggtacccgaagaacaagccgattcagagcacatcgatatccaggaagatctgacctacgtggagaagccagttcgcatccttgagaccagcgaaaggaggactagaaacaaggtcaccaggttttgccgggtttagtggagccaccattcagaggaggaagcaacctgggaaagagaagatgagttgaaggccgcccatccgcacctcttcgccagctcctccgaatctcggggccgagattccgtttaagggggtaggtttgtcacaccctgaagttctcctcccaagcctaaattgaatttataaatggtcccaagaaaatatcggtgtaaaagcaagagtaaaccctaataaaccaaggcaaataataatcggaattggcatgtggaatttttctcgagttctacatgtcgaaatttgctaacaagatttttagtggaattttgagagccctagaaataattttaaccaattaaaattgagcacatgcaattttaaatcccaggataaatcctttagtccttttctttttcttttccctcctttttcctcttcttgggccgtcggcctagtccgcccgccgctgcgcgcgctcttttcctccttgtgggccggcccaagccgcccctctctctctccgggacgccgacaggtgggtcccacctgtcgaggtcgtccccttcctccggccgcccgccccaggtcggcaaccgccgccgaaaccgccgcacccacctcctccgctcctgccgcgcccacgccgcgccgtccccgcgtcctccccacgtcgccgccgtctcccccgcgtctcccggcccgcgcgcgcgctcgcaaggggcgggattcgcattttgaatccccccattatctctctctccaccccacgtcgcaggtcaaaaaggaggctttcccggccgtttccacccatcccgcacctataaatcgctgccccgagcctcctctttccctttccgctctcgccgctccctcccgtgcttcctaccgagctcgcgccgctcgccgccagcgccaccgcttgccaccgcactacggccacgtgctgcccccgctagagccgccgccgcgctaagccgccgtcaccactagcttcgccgccgcaagatctttcccagccgccgccttgcgttgccgaaatcccaccaagaccacatttccctcgcgtcgccggtgagtcccctctccctccgactccggccgacatggatggccaccgtggggttttttcctttgcgctaattcctgtcctcccctcccctaggtgtcgccgtcactcgtccgcacctcggcatcgccggacttcgccgcctccctcgttttctgccgccggtcgccgccgtcccctccggtgaggaatccctcccccttcctttccttccccttcccgcgtgcgccattgcttttggccgcgccgctgctccggctgtgcgccgccgccttcgcgccgtccgccgccgccggtcgccgccggtggtcatgcacgccgccgcctctagccatggccggccggccggctttgaagccgagccaagcccggcggctgctccctgcgccgtccgatcggcccgaggccgatccggaccgtcggtcccgtggaccggcggtggaccacccgcgtggccccagtccacggtggaccggccgctttgtgccgctgacccgtggggcccacgtgccggcgccccctccctctccccttgcgccgctgacatgcgggccccgcatgtcggcgccacccgctccctttgatgacgtcagccctgggcatttattgcgcaataattcaattaaggatttttctgtttatagtaaaaacacagtgaatcttctaaaattcataactaattcatccgagctccgtttaaacccattcaagtcttagtaaatcaagaaaaatatgtagaatccattaaaattggttttgttctctgtttcagtagtattatagcgtgtttgtattgtttgctatgtatgtcacttagattccggctcttccgacgctccggtgtacttcgagatagtcgtcgaggttcctccagcagtagagcaaggcaagtcatgccggtcacttgaacatgttgatcctatattgcaaatgttctaatgttttccttcaaatactgcattgttttacaataatactatgtgatgtttacctactgttacagccatgctattttggtaccatgctcctttgttagcttgggttataacatgactagatattggactagggattgcttagccatgctttgttcaactagcacacaaaggggaaaatcctattaatgtatagactgtaggttctaatggtaatgttggattagtgccaccgcttcggtgttggttaattaaaataaatcacatggtgggctgtgggtgcatgattttgttggtcgcgcccatggcagttaaggaccggttcacaggatgccctggaagaacttatcgtacttaccacaagctagtgtgggcaactgctgggcttgtagtgtagctttcctctagctgacgcatctaggcaagggtggccgtgatggagtttggatgggtcctgcgacggcctatgcggcttccggattcatctaggcacgagaggggactgcccgctgccttgcgaggagtgggggtgatacctgaggtgtggtgtgcttggttagagggggttatgcgaagggtcctgtcacggcctctttccggtatgtcgtggtggcatgccggcgcacgaaaacgtgtcgtggggctgtgtcttgtgggtacagttgtacacctctaatcagagtaaaactattcgaatagccgtgcccacggttatgggcggtcaaccagattcaccgtgattagtctcaccctagtttagtctgatgaaattggatagtataggtggatggttgggcctgttgcaacatggtatagcgttggacagtggatgattaatattgattaattgttacaactgctttactgctttcaacttctgtttataaatgctcgttttatgcaaatgaaccattatagctatcccttgataattccctgcatcatacccctattccggtatgacttgctgagtacagtgggtagtactcagtcttgctctattttccccaaaccccagagtttgagtatgcgtcagatggtggtttctccgaggagtaggcttcgtccgtgccatcgaggatgcctgtggagtggtgttcccgctgcagttcaagtcaaggcttagctccagttatcttttgtttttccgctgtatttatgtaagacttttataatgtttgtaagacgtggatctgtatgtcaactttgtcgtttgtgtaccccggccggtcctggacggggattttaatgcacattctgcttggaattctattcgggaatttctgggcgtgacaagttggtatcagagccgaccttgaccgtaggacaagccaaatggaaaacctaagagccctctgaatccttttcattgcatatgttctttgcaattggatttgttccgtgagaaattgggatctgttcttgtggttcaagggaaaaatcttggtcgctcgtttaagtgagatttgtcgaaacaagtaagtctagggttttagtaaaattatttgagatatattcgacagttagtcgggatttgatgggtggtatgcattaggtcctagctcaggaatatgggttgcaaggtgtttatgcttttattgttattattagtatgtacctaattttctcactattttatcgctatgtaagtctgtcttatttattcgctctcatgcaaatgatctatgcataaaattccgctcttattcgcttctcttatttgagtcctttactgctttatttaaaattggatttgagcatgcattgatcctacccctttgtcttctctagatggccgagcacccacccaaccaccgcggagaaggcatggatgattttgtggcagaattggctcgcatgacactggtggtgggctaccccaacgtgccagagtactcgactgttccaccgctcagtggcgagcttcctcaccgtgttcgcctggaggtccatggctatgtgggtacctgcctcgctaacattgtggttgaggcatccggaggcacagcagatcacgcctgtcaggaggcagcatatctgctgatggccaggcttcgtgatcagcacaactacatcttctgcaacacggtgtaccgcttccaccctcgtcgagcaagtggcgatgatatcagcaccttccgcccgatagctggtgagaacgacaccaccttcggccacatgtgcaccgtgatgaggggaatggacaggatgcactcggatctgcacaaggcgtctaaggccttgaatggtgggaagctcgtgaggatcatagctctgaaggatgagatagcacgcctgaagaaggagaatgctcagttgaagggtctccccgcgccaagaggagtcctgatccgcaccacgcccggcaagtcgacgacggcacccgtgtgcattcaacttgcgcccaggaacccacctccgcctgcagctcccgcagctcctccagttctgccccacagttgccgcagctcctgcagctccagagccagtcccagctcatgttccagtgtcagctcccgtgtccgctctctccttcgctccagcatcagccgtcaggggcccagccagtggcaacggcggttggttgcctgccactcccagtggcagccgcgaccacagcagcagcagttccagtggctcagagccgggcagcggcgagacgtatctgccagactccaggagccgctcagagggacctggtgacaagcaggaggacgccttcgactccaccgaccgcaggagccgttccgagcattaggctcgctttccattagtttatcgactgtttagtatttgcctgttagtttgtgtgtttaggtctgctcgcttgtgggtcagtcgacggtcgatatcatgtgcctatgatatggctgtcttaataaggattttgcttgctgttttaagtgttttaattcagatcagaacaattgcagtttaaattcctatataataaagcttagttcctgagcatctgtttttcttcttttctacccccccgtctgctcttcctccagatggtctacaccaggaatggtagccgcacaacaggcgagggcagcaacggcaaagaacgcactgacggtgtgcatcccaacagcgattccagcaatggtccgccaccactccccgagaatccgactctggcccaagtaatggctcatcagactcagatgatggcagccatgatgcagcagcagcaccagcagatgcaccagaggatgcagcagcaagacgagcaacagcagcagcagtttggtccccctccccctcagtccaagttgccggagtttctacgcgtcaggccacccaccttctcttgcaccaccaaccccatggaggcgaatgactggctccatgccatagagaagaaactaaatctcctgcagtgcaatgatcaggagaaggtcgcctttgccacacaccagctccagggttccgcgtcagcttggtgggacaatcacatggccacccgcccgccaggcactgaagtcacttgggcggagttctgtcgcagcttcagaaaggcgcaggtgccagacgcggtcgtggcacagaagaagagggaattccgggcactccaccagggcaacaggacagtgactgagtatctccatgagttcaatcgcctagcgcgatatgcaccagaggatgtccgcactgacgcagagaagcaggagaagttcctaggaggcctggatgacgagctgaccaaccagttaatctctggagactacgccgactttgagaggctggttgacaaggcaatccgtcaggaggatcagcgcaacaaaatggacaggaagagaaaggcggcgcagttccggtccaaccaagggagccaccagcaaccgcgcttcactcccggacagcaaggtggacctaccaccatgatcgtcctccagcaccgccctttcaactcaagcagcttccaccagggcgccagtggcagccagaaccaccagggaggtcagcccaacctcagtgcagctccgcgcccaccaatggcaccagcacagtcagttccatccgctcaagccaagatggaggctgggacaaagccagggtcctgcttcaactatggcgagcttggccacttcgctgacaaatgcccgaagccaaggcgtgccgggctaaggtttgtccaggctcgtgtcaaccacgcgtccgcagaggaggcgcaagcagcaccagaggtcgtactgggtacgtttcctgttaactcaatccctgcaatagtactttttgattctggtgcaacgcattctttcatttcaaagaaatttgtggggatgcatgggttaagaaaagaagagcttagtactgtcgtgtcccaaaacgactctaaaatacatcctcaaaattgtgcatagaataagtaaaatccatgtgaaagcctccaacaattaaaatgtgcaaagttaaaagtcgaataaggcttggaggatttttgtatatttcctaaaagcctaaaatgcgtaaataaattttagtggaattttcagagcacaaataataattaagaagaaataaacaaagttaaaaaggttttataaaaagaaaaaccctaaaaagtttcttttccctccccctctccctcttgggccggctcggcccacctccctccctctctctcctctcccccgcggcccaatcggccccctccccgcgcgcgcgtgccgctgacgggcgggcccgcccgccaccctcgctgacgggtggggcccacccgtcatccccttcctcccgccgctcccgccgcctcgcccgtgccctagcgccgccgccgccacgaatcccaccgcctcccgccgtccacgcgcgcaataaagtgggggggggggaaatatttcccgtgattccctccctctttccccccatttttccctccctctctccctcggattcgtttggaaacctctccctaacctcgccggcgccatcaatggcgaccggatcttccgcgcccgtttccccctcgtccggcagctccctccccctcccaatcctatataaaccttccccgtgcctcccttcaccgtttccgccactcgccgccctctctccccgtcggaatcgagctcgcgccgtcgctctctctctccgccgtcaccgccgagctccggtccgccgccgtcgtcgccccggaccacctcccgcctcggcgtcgccaccttcggcttcaccgcatccccggcgacctcgtccactcctccgttttgctcgccgaccgccggagcaccgtcgaccccgtccacccgagccgcgccgccgccttcctccgctccggtcgccgtttccgtcgtcgccgtcgacccggggtgagccgtggaccgccgcttcttttcccccttcccttcccctctctcggccgccgctccgccgtgcctatggccgccgccggcgaccataggggcgcgggcgcgccgcctcccgccgctgcgccggcgtggccgccttcgggcgcaccgtgcggctgccgcgtggggcccggctgtcagccgcccgcgtcctcgggtgcggctgacgcgtgggacccacggcgccggccggtgtgagcccgggtgcgcccggtccaccgtggaccgtggggctgccgcgtgggccccacccccgtggacccggtccgcgcgcccctcccctcggctgacgcaataaatccattttaaattaaaatttaaatgaagaaattcgcaaatattcatttaaagagcatataaacttcaaatggccataacttggccatttgaactcggaattggaccgttcaagtctctaatttttccttaagaagtcaagaacccatttttgtgctttgtttctgcttgttatatggagtttattagagtaaaagccttttcttttccgttgatcgtgtagacgctgcagctttggaagatccgctcttcgtggaagttgaagccggcgtttgggaaagcgagcaaggcaagtcacatcatccttgaacatattgaatcccagtttataaaattatgttgctttaaaattattgcattatcgctttatttaaattcccgcgttatcactgttttatctagccatgcctatttacctttgttatgaccttattattgttattgttattatttccttgttcaccctagaataaacaaaaccccagctagtggacactctactcatggtaccactagtatgattttaggtagatgcttcgctatttaattaggtaacattaggcggttttacaactctagactttgggatattcatatcacctggacactttggaattgttggagtattgtggaattggattcacaccgccccctctattcaaaatccccaaaaatggttttaggctgggctcggggtgcatggttttgatagtagcacctcggccaaataaggaccggtcttcgggcctctgttgcaaagcactaccgtactttcacatgtctagtgggtaaggcttagtttgtggctcagtctggttataaacaaaagtacacggatggagatggacgaagtcgggggtcgatggacatctccagggcaaatgaaggctacacgagctgcggcccggtagtcgagatgtcatggcacagggtcggtgtcctgctgctaggggctcagtcctgcctacctgtcccgggggttccggccgtaggtgggattgggtcggtactcttgtctatggctaggatgggttggaaactatgtcacgtcttccgtctgtataccgtggtggtatgtggcacgtggttgcatgtgaggaagatgtgtcttgtgggtaaagatgtacacctctgatcagagtataatctattcgaatagccgcgccctcggttatgggcaagccgagcaatgtacccaagttagtgttttaattcttaaaacctgcttaacaactaaaatgtggaatggttggcctgggttggcttgggacgagctgggacccagggtcgggttgccggttcggtctgaatcatcgtaggccttgggttaaggcaggttcgtgtgggttcacggccttgataaataatattgtatagttctagaatcgtgtttacaaaatagctttgagcaactaagtatctttaaatgctgtttactgcaaccctaaccctttatattataactcccttgtactcccttgcatttattatgcacttgtgggtgtgtcttgttgagtacggtggttgtactcagtcttgctcaatttttttcccaaacccagaagaggagtctctggaagatgaaggttttggtgtctagctcgtgcctgccgtcaaacgcctgtggtcgtcgccctagtcttccgctgtttctcgtttgtctttgtgtgtgctgggccttcgctgcccatgtaataaattaactatttacgcttccgcttgttgaactctgatctgtatcaacttttggtgtaccttgcctcctgggacaaggaataatgcactcacgtaaggaacgcccgttgggttatttccggtcgtgacatacaatctacttgaatcgttcttttactatgttttctattttaccctagtttagtccatctttgtcggtttgcgctgtaaacagtctgccgccgctgcgagagtgcgacacctctttgtaggtttctcctgaaaaccttccgttttacccacgagacgggtagttatcctcatatcgatctaaatcggcctagaggctgattttgatctctaaatcggctccactagccggtttagcttttctttatacaaaacccatcttgatttggctctttggctagatcgaggtggttggcgactccatatcaccgcaaggcgtttaggtgttgcgatcgtgcttgtcgacttgtcacaaaaaggtgccaacatgatttttggcgactccgctggggacgagatccgttcatcgtcaactcgacttcgacttcgccatgacgaagccatcatccagaacggaggtggagccatctaatgtgatgccggtcacattggatgacttcgaaggagaggatcgtaaagctgtggaggagtacatcaacgagctcacacgggaggcgttgatgagattaactactaggactcatcaagttgtgatcatcaagcccgggccacgtcctatgctcgctcccgacgtggtaagtaatgacgaggtatcgcaatctatcaacgaacaaattgcatctacaaaagattcatctatggctaattttaaagatagattagatttaatgtttaaggagaaggttgatgggtttttaaggagtaggctaggtgcttttatggatgattacacattaaaggataaagcctataccactgttgatcaatctcctatagatccgatgggtagtaaaaccgacgcgacggtattcacggtcggtccgaccgggcctgacggccggtcagaccataacatagccgtcggtccgaccggccagacggccggtcagaccggctctcaggccggtccgaccgcgcaacaggacgctggtcagaccgggccctgggccggtcagaccggtgcaattgtcccgattcagggtatagatccaacgactaacgctagttatttgtaccactttagaacatttgatcctcctgtatctactgctactattaatcctcaagttcccccacatattcctaatgcttataatgatgtttctaggggatatcctcccgatactaggcaaggccaatataatcatattgcgccacaaacccagcctattaggctaccaaacccaccaccaaatccacaagggcctaataacatagagaatgtgattagtgatattatgagaaatagattcgggattgaaactaggaatcgtgctagagcttacaaaaagccatatcctgattattatgataatgtgccgtttcctagaaattatagagttcccgaatttgccaaatttagtggtgaggatggtaagaccacatgggagcatgtaggtcaatttttagcgcaatgtggtgaggctaatagtgatacttttaaattgcgcttgttttctttatctttatccggtaatgcttttacatggtttacttctttaccggcaaattctattcatacttgggctcaattagaagaacaatttcatgatcatttttgcactggtaaaactgagcataggttgtctgatataacatcggttaggcaaaaatacaatgaatctgtcgttgattatattgaaaggtttagagaaattaaaagccgatgttttagtttgaaaataactgacaaagatttggccaacatttcatatgatggattgcttgattctattaaagagaaattgaatggccagatatttcttgatattgatcatgtgttgcatgaagctctgactcaggaaagccgagtggatgacaatagcttaaatgctagtttagatgatagtgcaataacatgtatagccgaacctagcgataattcggattgtgttaataatttgtgcaatgatgccgtgacaagtatagccgaatcaaatgttggtccggactgtcttactagtttggatgataacgcaataatcaatatagccgaaccaagtgttggtttggattgtgtcactagtttagacaatgatggaatagccgaaccaagtaatggttcggattgtgttgctagcttagagaataatgccatcgaagatatagccgaactaaatgacggttcggattgtattacaagctcaagtgaaatagcattgtcacctaagaccgaattacaaatcggtcatgtagatgttggaaaagatagtgacaatgtcttgcaggatagtagtgagatagaatccaaagtaactatgcatacatatcaaagatcgtatcctgaacacgtagattcggtcccatacccgcaaggatttaaggtgcccaacttcacaaaattcacaggtgaggatgctagaacaacaatggagcatatcggccaatttattgatcaatgtggtaaggccggtaatgatgatttgcttaagttaaagttgtttcctctttctttgtcaaactttgcatctacatggtatagtttacttgctcctaattcaatttctacatggtcacaaatggagcatgagtttcatggttatttcaaagatgcaagcttaatggagcaaagaccgattgatacttcaccggtcacttgtgaaactatttcggttacatctatgcctaagaccggaattgttagtgattctctccctgttagtcctattgatgtagacaaaaagaaagggaaaagtgttattattggggatcttcggcccaagaataggataaaaaatgcgaatgccgaatatcataaagttgcaaaggatgggtcatctaattcccaaaagaccaaaaagccgaagctcacttttgagatgcttatggctaaatacaagaaaggattagccggttaacgatttgataaccaaactagtgattcgaaaagaccaagatcatctcgtaggaagagatttagtcaaacattaaagcaatcggagccatcaaccataccaactccatataaacctccggttgtgatgccatggtatccatatccaatgtcaccgtttggttatccttttatgtattacgtgccgtggatgcatcaaccacttatgccgcattatcaggagtggaaggaatcacctaggacagtgccaaatcgttcatctaactcaagacaagactgttttccacaagagaatcggtccggtggatcaaaggtgaaaaaaatgaaaaaggtgaagaaggtgtgggtgaggaaagaagccaaagctccggaggtcgttgctgccaaagaggagtctcaagaggttcatgtacctactggagatgcggtggaaaccacgcaggcaaaggagattgaagctgatgccgtgactgccaacattgggggtctaaccgagacagctggccggtctaaccgccagtctatggccggtctaaccgaccttaccggccggtctgaccgacggcttgtggccggtctgaccgggctcagaggccggtctgaccggggggcattggagaagagtgggaaaattgagagcaacataggagcttccacttcgacaaaaaatatcaagaatcattgtttagctcctggaaaacaaccacagccgaagtggataccttctggcttatctcgctctcaaaagaggaggctacagcgtcttcgggccataggtcaaaaagaaaaggaggccaaagatgtggagaacaaaacatgtaacaatttagagcttcgaacgacacctaagcaagtgtggagatctaaagaagtaaaagttaagagaccggtgatttcccatagtagtagtgataaatccaatttgatgagagaagaatcatcggtcattagagataagtctccttcacatgatgctatggatgttagtacggtattcatcttgccttcgaaatcgtgcaatcaagaaagccgattttgcttggggggcaagacattaatatgctcgtgaaggaaccaagagaagatgaacggcgatggatacgacatcatatctttgagccgccgtttgttggatgctaaggcaagatatgggtttattgtgtttaccattatattatatgcctatgccatgttattagaatattgcttgctatctagaacatgtgtgtttttgcttatcaaattgatattatacatacatgttgcaaatgccagttctaggaagtagaattggtaggatggcatataatttgtttgaggtatgatttggctcatgactctttgatatttatttaaagccaaatcatatgtgtttttatggatcaccatataagatatagatttcatatttattgcaccatgaaagttttgcctactagtaattcggctaatatcaatggtcactgtgatggtttgctctagagtggttttctttaggaacattggcattgttaatattttgcatacatgctcaagccgattacttacatttttagtttattggaatctatgcatgtgacacatatgactttggtgattcattattgatcatacttcaattggctaagtgttgtgatgccatgatgattattgtttcaacagccaattgaattagtattcatctagacatattagttgaatgttatgatttttcatatgtatagagagaaggaattttggtccaataatttgatacactaagcatctggctattatgtgaagaaaaattatatactaaaggccgatgcttgatttcaaaagtttggatgaagttggcaaagtcatagatcaggggtggtctgaccggcattgcacggccggtctgactggtggtacccgcggtctaaccggctctgcatggccggtctgaccgggcagacagggtggtctgaccggcattgcgtgtccggtctgaccgatcccagacaggaggctggggggcacgttacaattgattaaaaggccgaattaattattcggacatttgtgcccatgagttagaaatagcttggagaattcctttgattagatatttaaaagatcctacacttaaggttgatcgaaagattcggtggcaagtgttcaaatattgtatcgccgaaacatagatggtgtcttgttaaagtgcttagatgaagatcaatctaaagtggctatgggagaggtacatgaaggaattcgtggaattcatcaatcggccgtaagataaattggttgcttaggagagtggagtttcttggccgaaaataattgatgattgtttcaaatgctatagagggagtgaagcttgttaacggatcgacaatgttcaaattagcgcctatcactatattgaatattatcatcaaaccatggccgttccaaggttgggctttggatttcattggtcaaatttatccttcgtcatcaaaagggcattggttcgtgctagttgcaatgggttacttcactaagtgagccgaagccgtgccgctcgagaatattactacggaggtaattggctttattttgaagcatatcgttcatagattcggtattcctcaaacattaaaggagcttcttttatgtccaaggaagtgagaagttttgccgaatcttatgatattaagttgttgagttcttctctttactacgctcaggctaatggataagccgagtcgagtaataaaacattgttaaaattgccgttttgccagttgaggtaaatcttggctctcttcggtatttcaagcaagacgacttgtcggttgacgattacaagaccttgatgggaagcaattttgaagacgtcatcgacaagcgtttaaagactttgaaggagatgaagacacttcaagacggtgttttcaaagagcaattaatgggaaatagcttgaagaaatacttcccgagcatttggtaagatgcttaggaagtcctatggccggtaattggattatcgccctgagataacatgttctatgcttttaggttcacgtatgttcaccaaaaaggcaggggggcatgtgtttacacccaaatttggcacctatggacgaaatagggaaaaattgccaaagtttggaaagtgtcgggtttccttcactagggccggtcagaccataggtatgtgggcggtctgaccggctagtagggccggtctgaccgcagttatgtaggcggtcagaccgtgagggtctgagtccgactctgttttcgtcgggtctcgggtttccttgctcaggaaggcatgtttcgtgtttccattggtttctatcccgaattggacgtgaaggagggcctgtagagggcaagaccaacccctatataagggacaaggccggttcattgtaaaacccccgaatacaatctacttgaatcgttttttaactatgttttctattttaccctagtttagtccatctttgtcggtttgcgctgtaaaccatccgccgccgcagcgagagtgcgacacctctttgtaggtttgtcctgtaaaacttccgttttgcccacgagacgggtagttatcctcatatcgatctaaatcggcctagaggctgattttgatctctaaatcggctccgctagccggtttagcttttctttctacaaaacccatcttgatttggtcctttggctagatcgaggtggttggcgactccatgtcaccgcaaggcgtttaggtgttgcgattgtgcttgtcgacttgtcacaaaatgttgccaacacaaatcactagtctcaccaaagcaaggggtctccttgaatcagattgaggtggaaatcccagtggtcaccgaggggaagagttcgaggaaattggaagatatccccatagtctgcgagtacccagaagtgtttactgaagacctcactaccatgccacccaagagagagattgaattccggattgatttggcaccgggaaccgctccaatttacaagagaccgtacaggatggcagtcaacgagctagcagaggtcaagaagcaggttgatgagcagctgcagaaagggtacattcgaccaagtatttcaccttggggtgctccggtcatttttgtggagaagaaggacaagacgaagagaatgtgtgtcgattaccgcgcactcaatgaggtcacaatcaagaacaaatatcctttgccgcggatcgatgatttgtttgatcagctgaaaagagctaagtgttttctaagatagacctgcgatcaggctatcaccagttgagaattcgggaagaggatattccgaagaaagccttcaccactcggtatgggttgtatgagtgcacgcttatgtctttcggacttaccaacgcacccgcattcttcatgaatctgatgaacaaagtgttcatggaatttctggacaagtttgttgtggtattcatcgacgacatacttatctattcaaagtccgaagaagaacatgagcaacatctctgtcgggtactcgagaagttgaaggagcaccagttatatgccaagttcagcaagtgtgacttctggttgtcggaagtcaaatttctgggtcacgttattacagctcaaggcgtggcagttgatccatcgaatgtggagtcagttaccaaatggaccccacctaagaccgtgtcacagattcagagttttcttggacttgcgggttattaccgccgattcattgaaaacttctccaggatcgcccgacccatcactcagttgctttagaaagatgagaagtttaaatggacagctgagtgtgacaagagttttgaggagctcaagaagaaattagtatccgccgtagttctgattctgcccgactagacaaaagacttccgagtctattgcaacgcatctcgccacgggcttggatgtgttctaatgcaagagggcagagtggtcgcttatgcctcgcggcagttgcgtccacatgaagggaattatccaactcatgacctggaattggcagcagtggtacatgctttgaagatctggaggcactatctgattggcaaccgctgtgaagtatatacggaccacaagagtctgaaatacatcttcacccaaccggatctaaatctccgacaacgaagatggctggaactaatcaaagattatgacatgagcattcactaccatccgggtaaagccaatgtggtggcagatgctttaagcaggaaaagctactgcaatgccctatgcaccgaggacatgtgtgaagaattgcagcaggagcttgaacgtctcaacgtgggaatcgttgaacacaggttcgtagccactctagaagcacggcctacgctcgtggatcaagtcagagcagctcaagtgacggatcttgagatagctgaactgaaaaagaatatgagggtcggaaaagcccgggacttccttgaggatgaacatggcacagtctggatgggagaaagattgcacatgcctgatgacaaagagctgaaggatctgatactcaccgaggctcatcagactcaatactccattcatccgggtagtaccaagatgtatcaagatctcaaataaaaattttggtgggccagcatgaggagggaaatagctgaattcgtcacgctctgcgatgtttgtcagcgagttaaaacagaacatcagaggcccgcaggactattacaacctcttcagatcccggaatggaaatgggaagaaattggaatggatttcataacaggtctgcccaggacatgatctggccacgattcgatataggtagttgtggatcggcttaccaaagtcgctcatttcatcccagtgcacactacttatacgggcaaaaggttggcagagctctacctcttgcgaatcatgtgtctacatggagtacccaaaaagatagtatctgatcgagggagccaattcacttcaaagttctggcagaaattgcaagaggaattgggaacccggttgaatttcagcacagcctaccatccgcagaccgatggtcagaccgagcgagtcaatcaaatattggaggacatgttaagggcttgtgcacttgattttggtggagcttgggacaaaagcttgccgtatgcggagttctcttacaacaacagctaccaggctagtcttcaaatggcaccgttcgaagcgttgtacggccggaagtgccgcacacctctcttctgatatcaaacaggcgaacgtcaactgttcggaacataagtgctaacggaagcggaagagaaagtcaggaccgtcagagagaggctaagaattgcccagtctcgacagaagagctacgcggacaaccgccgaagggagctcacttttgaagccggggattacgtgtaccttcgtgttactccgctccggggagtacaccgttttcaaaccaaaggcaagttggcaccacgcttcgtgggaccatacaaaatcttggaacgaagaggagaagttgcttatcagctagaacttccattcaatatgatcggtatccatgacgtgttccacgtgtcccaattaaagaagtgcttgagggtacccgaagaacaagccgattcagagcacatcgatatccaggaagatctgacctacgtggagaagccagttcgcatccttgagaccagcgaaaggaggactagaaacaaggtcaccaggttttgccgggtttagtggagccaccattcagaggaggaagcaacctgggaaagagaagatgagttgaaggccgcccatccgcacctcttcgccagctcctccgaatctcggggccgagattccgtttaagggggtaggtttgtcacaccctgaagttctcctcccaagcctaaattgaatttataaatggtcccaagaaaatatcggtgtaaaagcaagagtaaaccctaataaaccaatgcaaataataatcggaattggcatgtggaatttttcttgagttctacatgtcgaaatttgctaacaagatttttagtggaattttgagagccctagaaataattttaaccaattaaaattgagcacatgcaattttaaatcccaggataaatcctttcttccttttctttttcttttccctcctttttcctcttcttgggccgtcggcctagtccgcccgccgctgcgcgcgctcttttcctccttgtgggccggcccaagccgcccctctctctctccgggacgccgacaggtgggtcccacctgtcgaggtcgtccccttcctccggccgcccgccccaggtcggcaaccgccgccgaaaccgccgcacccacctcctccgctcctgccgcgcccacgccgcgccgtccccgcgtcctccccacgtcgccgccgtctcccccgcgtctcccggcccgcgcgcgcgctcgcaaggggcgggattcgcattttgaatccccccattatctctctctccaccccacgtcgcaggtcaaaaaggaggctttcccggccgtttccacccatcccgcacctataaatcgctgccccgagcctcctctttccctttccgctctcgccgctccctcccgtgcttcctaccgagctcgcgccgctcgccgccagcgccaccgcttgccaccgcactacggccacgtgctgcccccgctagagccgccgccgcgctaagccgccgtcaccactagcttcgccgccgcaagatctttcccagccgccgccttgcgttgccgaaatcccaccaagaccacatttccctcgcgtcgccggtgagtcccctctcccctccgactccggccgacatggatggccaccgtggggttttttcctctgcgctaattcctgtcctcccctcccctaggtgtcgccgtcactcgtccgcacctcggcatcgccggacttcgccgcctccctcgttttctgccgccggtcgccgccgtcccctccggtgaggaatccctcccccttcctttccttccccttcccgcgtgcgccattgcttttggccgcgccgctgctccggctgtgcgccgccgccttcgcgccgtccgccgccgccggtcgccgccggtggtcatgcacgccgccgcctctagccatggccggccggccggctttgaagccgagccaagcccggcggctgctccctgcgccgtccgatcggcccgaggccgatccggaccgtcggtcccgtggaccggcggtggaccacccgcgtggccccagtccacggtggaccggccgctttgtgccgctgacccgtggggcccacgtgccggcgccccctccctctccccttgcgccgctgacatgcgggccccgcatgtcggcgccacccgctccctttgatgacgtcagccctgggcatttattgcgcaataattcaattaaggatttttctgtttatagtaaaaacacagtgaatcttctaaaattcataactaattcatccgagctccgtttaaacccattcaagtcttagtaaatcaagaaaaatatgtagaatccattaaaattggttttgttctctgtttcagtagtattatagcgtgtttgtattgtttgctatgtatgtcacttagattccggctcttccgacgctccggtgtacttcgagatagtcgtcgaggttcctccagcagtagagcaaggcaagtcatgccggtcacttgaacatgttgatcctatattgcaaatgttctaatgttttccttcaaatactgcattgttttacaataatactatgtgatgtttacctactgttacagccatgctattttggtaccatgctcctttgttagcttgggttataacatgactagatattggactagggattgcttagccatgctttgttcaactagcacacaaaggggaaaatcctattaatgtatagactgtagattctaatggtaatgttggattagtgccaccgcttcggtattggttaattaaaataaatcacatggtgggctgtgggtgcatggttttgttggtcgcacccatagcagttaaggaccggttcgcgggatgccctgtaagaacttatcatacttaccacaagccagtgtgggcaacggctgggcttgtagtgtagctttcctctacctgacgcatccaggcaagggtgggcgtgatggagtttggatgggtcctgcgatggcctatgcggcttccggattcatctaggcacgagaggggactgcccacggccttgcgaggagtgggggtgaaacctgaggtgtggtgtgcttggttagagggggttatgcgaagggtcctgtcacggcctctttctagtatgtcgtggtggcatgccggcgcacgaaaacgtgtcgtggggttgtgtcttgtgggtacagttgtacacctctgatcagagtaaaactattcaaatggccgtgcccgtggttatgggcgatcaaccagattcaccgtgattagtctcaccctagtttagtctaatgaaattggatagtataggtggatggttgggcctgttgcaatgtggtatagcgttggacagtggatgattaatattgattaattgttacaactgctttactgctttcaacttctgtttataaatgctcgttttatgcaaatgaaccattatagctatcccttgataattccctgcatcatacccctattccggtatgacttgctgagtacagttggtaatactcagtcttgctctattttccccaaaccccagagtttgagtatgcgtcagatggtggtttctccgaggagtaggcttcgtccgtgccatcgaggatgcctgtggagtggtgttcccgctgtagttcaagtcaaggcttagctccagttatcttttgtttttccgctgcatttatgtaaaacttttataatgtttgtaagacgtggatctgtatgtcaactttgtcgtttgtgtaccccggccggtcctggacggggattttaatgcacattctgcttggaattctattcgaaaatttctgggcgtgacaccgtatctagcgtgccagacccaggcttgatccttcccctttgcgagaagggaaaccggttgcgccagctcgacgtggagaacgtagaggcgcccaactccttggcgcaccctacacagcagctgtcgctgtggatcatgcaaagtgagaacaccatcctcgatcaccgtcttgcaatgcgcctcatcaagctagccaaggctgaccatgttgctccgaagcttggggatgtagtagacgctagtgagcgcgcagtggtcaccattcttgcaagcgaacagcaccatgcctcgtccttcaatccagactctcgacgcatcaccaaacttgacagtgccgcgcacggtggtgtgaagctcggagaacacatcacggtagcccgtcatgtgatttgaagcgcccgtgtcaaggatccagtctagatcaacgggctttccttcatcctgaagagaaacgtgagcacgttcctccttcagtgtcacctccccgtcagtaatgacaggatcggtagcaggggcaagctcgcacacttgcgccatcagcagtgtcggctccccttcgtccgcggcttgagcaggctcggtgatgagaaggtttgcctgagccagtttctcgcggtctcgcttcgccttgcaacagtccttggcccagtgaccaagtttgccacagtaccggcatttgtccttggacacattgcggtttgccgcttgggacgaacctgacttgccgtcggagccgttgccgtcgcgctcgcgcctgctgcggtgtggttgccgtgagctggacgccctccccccggctgagttctgcccagcttccttgtttgagtgagcaggggcctccttttcgctgaagagcacctgacccgcgtcctcgccatcagagtcggggtgatcgtcgacggtgagaagccggccagtcagatcctcaatagaaagcaaggtcagtgtttgatgaaaacaaaacaacgaacacacagaaaatagggaaaccctgtattgcctttttattaatcatgattcattaacatgaatgtttacaaatacatgagggctcctgtaggagttcgccttttgccttcgtgaggaatgcttaatggagaggtatcttgacaggagattccgtgcagtccgctgattcccggcgctagcaatgaggcggccggttaattacatctataggagcgagcctatggaacacctccgattaagctgcgctttgtgatcgtcaacatcaaaatttggttgctcgccgaaggttgaggttggttcagatttaacggtgaatatagtgaatgtggaactgatggctttgttttgccaaaacccagtcacaatacactatcatcatgttagtatacggagggaatttggtgaagcgggtgacctttgcctcatcggtgcccactcatgtgccccggccttcatcaaacatggattttgtgattgcttttgcctcgtcggtgcccagcaacggtatatccagttcccgtccattttagacgtgttaatagtatagtgacctggccttgtcgacactcggccatggtttcatctaacctcgtcggtcatagacaaatggaatgagttaatgactgcagccttgtcagctttagccaatatgttatccggactcgtcggtctcggacatagcacaaatattgataaattggccatttcatctcgtcgacactcggccatgatgtcgacgtgtgttgtaaatctgcatgccttgccctcctggcgagcattgtttttgttgtcttcaagaattttgagagttgctcccatccatctggtagaatttagagagagaaggaattgctcccgcacatgacatgcacaaggcaaatctataattgttccggtatgaatataaatatgtataaatcatggttggtccgatgccgattagactcaaactcatcccaagtttatacaagtaaatatgcacatccgatattttatcatgagcgagaacatcaatatgcataaattatggttggtccgatgccaataaggctcaaactcatcccaagtttataaatatgcgcatccgattttttatcatgaacgagaatataaatatgtgtaaatcatggttggtctgatgccaataaggctcaaactcatcctaagtttatacaaataaatatccaactccaatatttgataacttagacggtccaaccccacgaggatcggactcgtctgcacaccactgatgatattttcttgacgaaaaacaagatcgatctgcttgttattcaggacggacgactcgccggcagagatgccatcagcgccggcggctctctaaggcatattgctgctgagccgcgcagcggtccgccgtctatgtgtgcttctcggtgacgacgtgtaaattgtgtatatgttggatatgggtttgtgaaactataagcagatcagagcacacagcatagttgcctacctacgtcttctcctctgccagccgcctctgcgccggggattttctcccacctcctgcgtcgtgagggacagcgccttatataagagtagaggcgacggagtcctcgcctaatcccttccgagatttcagcaagccagcgaaatcaagcgttaattctctggataagccagcgcgtctgttaatccaacgacctgcgcgtgataaaaagaattttgtgctccagataaaaagaacgtgtgtgtgctggagataatcacgaggattaacttggctaattgacggtggatcccacacctcatagggtgtgtttggataatgggaaatgaggggtgggattgggattaggaaatgaatgaagggttaggattaaatggatgagggagaataaatggttaggatttaaagatgagtgggaaatcatttcctttagacatttgccaaacactgccataaggataattaccaaccggtgaggagcagcaaacaaattaaggatatacgaggttaacactggttgatctccttcaaatgtttatatctccctaatcatatatcaaatatgaattctgttggaaccattattttccaatcaaaacatacaacaaaacgagtccaattttgaatatgtttgaacattgtatgatatttgaattttctggtcccacatgtcgtagagacatgtttcacgtgtatttcgtaaaattgggctgcaaattaatgcccaatgatatattattttttctatgaattttggtataaaaattcatcaaacagtgagatcaatcaaggtttcaatcgatagagccatttggcgatacctccggggaacgacgcgaagcaattttcaaacaaccttctcttcagacagatcatctccaaggactggagacgaaggctgaaatcctccaggtgttcgccattcttgaatcgcatggactcaaaagtttggcgcagcttctgtgctcgggactccttaacacgatctgcgcctactcgcatggatttgagcgcatcccaggcgtctttggcgctgtccttctcggcaagcggccggaccatctcagccggcaccgctcgcaagatggctgaaagcgcctggcaatcttcctgatacgggacatcgccggtgtcgacagcatcccacagaccttgagcctggagattgactcgcatcaacaccgcccaatcggagtaatttgagcgtctgagtattggatagtagacggagccatcttccttaacaatccgctgcacgacgagctgtcgcccgctcacgcgcggcggagacggcgagagccggcggcctgttcgccggtgagtgcgagacgaaccgctggcgggagcggacatggctctgataccaaatgatagcaaagcccaagattgtgaatcctcactctctctctcacgcgaattctctgaattggaaagacgatgaacacgaacagagtttttggtgtcgcgaaccaaccagcgacgttttctgatgctcatatatatagcaaatatgtacagactcaaactgacaccactacgccatcatccacgacgatgcgaccacgacactgaaatccggatgactcgcacacgacgcacgacccggaagactcggcttacaggaaaaagaaacagagaaacagacgccgaaacagagtctgacgaaactgaagaaacgacaacactagacacgttacagtaaccgataatacgacacatgattatagctgaagctaacagaaattccctaatcctttcctctccatcatcaatttcacttgttgaatgccgaaaattgaatctcttttgatgagttggatcttgtctcccggctgttcatcttttctttcttccttctcgatcggtcatcttcttcctctggccagcaggaggccgaagtcccatcagcaggaggccgaagccccatatctcatttcctcgcatgcagttcgaaccagcccgcctgcgcgcttcagctagccccggccgtgccatcacatcaccagccaaatccccggcgaaacccctccatcaattttctccaccaaagccaaaaaatgagtaaccatcatcagtcagtcacctcaatttccatcgtctcagctaaaaaaatgaataaacatcttccggctggccgctcaactccctgtcctcctctataagtagatccagcaccccctccttttccctttgcagaccaccgttcctgccacaccgtgccgtcgccgccgccggtcaacaccaaggccaaggccacctcccatgcatcttcctcacctccggcgacacgcctgcatccctccaccggccgttcgctgcgaacttgcactgccgcctctctctccatcgtcgtccaccggaccatgtcttgctgctattgctgctcactataatccggcctaggttcctgcctcgggacatcgagtagacgcggttgtgttgcagtccgatcgagtgagcaccaatgttgccgctgtcatcgcaagcacgagctgctccatgggaagatcgagccggcatgatggtcgtctcatttccagcactgctaccatcgttgggagatctctcaattaccagcgaatggcgcagcactgttatgccatccacctctgtcgtcttccccacttcctgcgccgtcttccatcaagccatccaccatcgccatcaacttgttgtcaaccacccggcattgctgccacctctctatcgtggtaagcacctgcgccgctttcacgttcttcctccctaatcatcatctagtgtgagaaaaccattttggttatattcgcagatcacaaacaatatcatcgttgcccagtttccaacatagctgccacctcaatgtcctcatcagtggttaatccccggtcctctcccatgtgttgtcgttgtcgccttcgtgcagaggtgctgctgccatcgtggaatggtgccaccctctcgccctcatgatagctgcctaaactaggattcagaactggagacacacaagatatatcgacggggatttccaacgaattccgccgccgccaatcgccactaccaagttctaaatcgataaaaaggtttacaggagttgtgtgtttagttttatcactcccactcactccccacacacgcttacagtctggcacttgggccgaataaccactcaggcttacaatgcccattctggtccacttaaacgaacattcccccttttaagtctactacctctcccttcgatcttctcctccttggcaatgtcagcatcagcacccaacgcagccttgacaatgttccccccttgaaaactggattgcccccaagccagtgctcttgggaaacgagtacgaagatcttccaagtcttcccaagttgcattggcgatcacatcatcagaccaatgtataagcacctgaggaataacagacatacctgacttgcgcaccctagtatccagaatagccacaggaacttgtttagtagaagactgaacaggaagatgaacagaagcatcccctttaaaaccttgagctgctttgagctgcgagacatgaaaaacagggtgaatagagctgctcgccggaaggactaaacggtatgctacaacaccaatcttctcttgaatttcataaggaccaaagaacttgaaactcagcttgtgattagccctggctgctactgaagtttggacatatggctgtaacttcaaatagacccaatctcccactgcaaaagctctaaaacttcttttcttgtcagcttggctcttcataaactgttgtgctctgttcaaatgttgctgcaagagttgtatcattaaccctcattcattcaacaactgctggacatttggaagttcacaagagttaacagtaatgcccaattggttaggaatatgcccatacaatact

SEQ ID NO: 7560 - DNA, 25020 bp, Oryza sativa
gtcatatatgtatcgatcggcagtcatgaataaacaagaaggaactaaatctactcgatcggctgtaggtattcacaatatatactccttgtatcgatatatacttaaatcaagtgattgggatagatcggacgccatgccgagacagtataaatcacttaaatcgaaatatatattaataatgggactacatatgttcatagcagagccgatcatatagatctagcatgtatcggctaatactccgataccactctatactaagatattaaagcaagtagaatatatcaaacaatggcctaatatacttaaatgcaataagatcttaaaataaatgccagatttaacatgtcaataaagcatatagagtaaatatagttaaatcagataagatcggctgaaactccgatgctaccctaatcggcaaccagaaggcaggctagaggttgattttctaagcatgacttaatagatcaaactcaactgatacaacattaagtatgaaaagaagaacaatatctagacaatcaagctgctggaagtttcatagagtggtagatatcttatataatctaagtcaatatcgaaatctaacctaatcggctgtcctctaccgatagatgttagccgattgtagattagatagtggtattgccagagattatgtaagatatatgatagttcgacgaattacataaacgagatcagagtatcacaaacatggaagcactaatcccgagaacacaagtcgtcataacaagttttacctcttgttgaagatcgaaaccgatgcagctcaacccgaaagcaagaactcgtcgaaataaaactaaagcaaaaagggtggcgatgcgccgaaattgtattgaacgtgtgtgttaaaagttacatagggctcgggtctatttatacccgagaattacaagatatgcccataacggacacgactaatatctttaacaaactctaagataccataagtctttacggcagacttttgcccaagcatatctctaaggaaattacataaaatatcctaattaatagatacaattgacttctcaagactctatccatgtgcggcaatcatcttgaagcgccttaattcaacccaatatcatacatcaagttgcattatcggaatcggttgtatcagcttacctagtccgactcagacccagccgatcctaatcgtagccgatctggactccagccgattcctgctctgtttctgaactcaatctccgcctccgactttgcttcgatctaatattctttcccgatgccgatattaccaaatttggttgttaacacatgccccccaagtccggaatatttggtaatgtttcggatttgctgtaaatcgaccccgagtaagttcgcactttgccgttttccgaccgttactgccatgctttaaatattaaacgtcaccctcgagaaatctcacaccgtgacttccgttttcaccgctcaagcgaaactttgtcttctctctctccagcgattcctccgacgcaaaagcgacttccaggtgacttcatcttcggcgagatttccgcctgcagcgatgtcgtcctgcaccaacccatctgatgcgccttcagccgagtatgctgaggtaagttcccgtcggcttgatcccctttcttagcagcagatcgattttctcttatcttacattgctctctttttctctgttgttttggatttgtagcatctcttcaacctagtcgcgattcccagcctttcgcacaaaatccactattttcttggcccaatcggcaacctcgaccccactgatttcatcattggtgaaaccaaccggatcccctttagactagccaaccctaacctgggtcactggaagaataccttcaagtcttggccatctctcgaaaaacccacacctgataaaagctggaccacctggtaccaacgcgtatcgtctagtaagaaagttcactgggatgagattggaatcggccaagcgcttgctctcaccatagccaattctgctaaggatgaacctctgatggctaccgccacctacttttggtccaacaccatcaatgctttcttattcaaccaagggccgatgactccaactttaatcgacatcaccatgattactggattagatgtaacttcattggctaaccctatgagtatgaacaccaagaaccaatttgacttcaagaccaaaagcataggtggctagtctggctatgtggcagcatatatgggccaagggtctgttacccctcgggaacatgtagctttcttgctcatgtggttagaaaagttccccttctatggatctagttgtggccctacaaccaacaggcaatttgtagctgaagccttagaatcaaagaaagaatttcctttgggcaaaatccatctcggctatctgtaccaaacattgaacaacgcatcggctaaaatagccgtcggctcaatagttggagcaggcggaccatggtggctgctgcaaacctggttagtcctgatagtcatgaaggttgtcaatcggccctctatgacagaagctgaattcccactgccagagccgattgcaggagacgatggagaagagcgcacccatcgcagatgcatgtcatatggagaatatgcatccacaccaaccgatgctggagcgaagctatcggctgagctacttaagaattggttctgcagctcctatgaaggttttaagaaagatgcacgaatctggtttccctatgaagactcagcagaccttgaacttccatcggactttagatttgaagacattaatcatgaaaaattccaaaaatccagagaagttcttatagctacaatcagcctatgcatcctccccgtcggcattcaccaagggagaaacatccaagtctcctacgagttttatcacccaatgagctcggccagacaacttggattgggccaactcccaatcggcttattctttgccgacaagattcaatgccgaggacaaatcacatccactctaatgatggatcggctacttaacctaccaagaccccctctgggcagcattgataatattgagttggcaggatttagaagcaaaaactttgacagatggtggggtgaatggaagctgcatctatttcatcaatcggcttcaatgtatatgacagatctattccctgacgtcataccccaggtaaactttgtcattactaaattgcataatcagttagccgattcattacttgactaatctttttctcctattttgcagacaacagagtcctcccctcctcatcaaagtaatagtggcaaggacattgaatatgctcaaggtctaattccgaatggaggtggactatctccccctgttatcagctaccatgcccccaagacttcaactcttcttcacggcctaaccagggaactagccgatgcacgcaagaaaaggaaaaccagatcatcggccatgagtaccttggtcttagctccaaagaaaaaggccaaattcaagaaaactaaaccgactgataagtcggctgatgatctacccgccttggatacatctattgaacaagctttagatgcagaggaaattggtgaagatgttgaccaggctgtagccgaaatgagtgacacagaaagaacaccatcggcttcacccaagcaaacgcctccaactccttctgcccccattcattttacaagagtaagtatctctctttgacatcttctaaaattacttccctcttcggctaattactcatagactttgtggttgcagaaaaagaaaactgctgtgaagaaaaagccagcagcaacgattgccaagtcggctccaccagtaagatgactttaattcttttacttaatcaaactcaaccggctctatataacacttgtctattctacagcctcctcttgcttctcctcctgtatagcaatcgtcaagtgaccagactccatcggctgtggggagtcatcacatcaaggaggaagaacaaccagctgctcctgctatcccagtaagttttcctttgtctcaacaattagatcggctataatttacccaactcttactttttccgaaattgtctctgcaggttctagccgatatcttctcttttgatatcagagattaccttgatgaggcagacgaagacacttcaagcaaagccctagctcccctatccgatgatgtaagaaaaacacttgaagacatctctcatcggctagaagcctcttctttagatagcttggtagttgactgtggatcaattaggtcacggctgcatgaaattcaggctctgattcccgaagatttggccgatgtcctaactccagccgcttatctcgagcaacatcagttcaagctggaaaaagccaagctaagactagccgaacgccgtgagcgcaaagagattgaggtcacaatccaagctaatcggcagcttgtgcatgaggaaaaaaccaaacttgatcagctatctgaaggtccgatcaaatccaatattgatcagcttgaagctcgcaagattgagctcttggtgcaacttgaagaatgcaatgccgcgctagatatggaacacaaaaaactagtcgatctcccaaaatcaattgaagaacaaaaaacaaggctgaaatcggctatcaagaatgttgcgaacttgaccaagtccctaaaagtcatccctggaactgatgctcaagatgcccaagctattgaagaagtagaacaaattaggcaaagggctattttggctatccagcgatacttgtctcaataacttttgtgtaataggacttagaaattttgtaatcggctaagacgttctaatactttactgtcttgacaatcctttgtgccgattaatatgatttttaatatgactttgaaattcgctcaaaaatttgcattgcattttgatatatatatgtgcccccctaattttacagtgtcaaaagcactggtaaaattataaaacaactaagggcgatataacaatatcagccactgtacatcggcaaaccacaaccgattacaccatgaaaaacaactaagggcgatataaccatatcggccgtctcaaggcgatgtaaacacatcggctgtcatgcatcggcaatgctagacgatcatgcgttaacccaaacacttgggtaatattgcttcaaatatttgccattgagcgctcgcccatagacttcaccatcaagcccttacagcatatatgctcccttagacacaactttataaatttggaacggtccttcccaattcggcgaccacttgccaaatttactatcacgagtaccaatcggcaaaaccaacttccatacaagttctccttccgaaaaatctttaggtaccactttcttattataatgccgagcaacacgttccttatccttggtaacctttgcaagggctcgcaatcgtgactgaaccagatcctccctctcatcggccataaggttgtaatactcatcgactgttaaatcgttttggaactccgttcttcgagagccgattctaacctcccacggcaaaacagcctcatgcccataaacaagtttgtaaggagggacttggatggatccatgacaagccatcctagaagaccacaacgcttcggccaaccgagcatgccattgccgaggataatcagaaattttccgcttaatcaatttgatcaaaattttattagacgcctcggcttgcccattagtttgtgcataataaggtgaagaattcaacaatttgatacccatgctatcggcaaactgaacaaactcatcggacacgaagattgaaccctgatctgtagtaatagtttaaggaataccaaatcggtagattatatgttcttgaactaattgaatggcatccccagaatcaactttcttcaaagcaatcgcctgcacccacttggtgaaataatcagttgccaccaatataaatttatgtcctttactcgatggtgggtttatcataccgatcatatcaattccccaacctccgaatggccatggcttaataataggattcatagccgacgtcggcgctcgctgaattgctccaaacttctgacaatcttgacaccccttataatatctgaaacaatcctccagcattgtcggccaaaaataccctgcacaccaaagtaaccacttcatcttatgagccaattgatgagtaccacaaattccttcatgaacttcgccgattgcaactttagcctgatcggcactcaagcacttaagtaacactccatcaatcgtccaataataaacctcatcatccaacagtgtatactttaatggcttatatcttaatttcctagaagccgattgagatggattattcaaatattgatgcacatcatacctccaatcatcggctgtcatcgctgcaatttcaactttaacatctttgatcatcggcttataccccgacgccccttgagctaaatcattagcttcaacattttgttctcgagagacatgctttaaagtaaccagccgaaactctttcattagttcgtggcacttctcataataaactatcaatgtatcattcttgcatccatactctcctgccaattgactgattattagcaaagaatcccccatgatttcaatggcatcggcttcaacttccttgagtaattgcaaccctttgagcactgcttcatactcagcttgattattagtcgcatacggtttaatagtataagcaaactcgaagcatgccccctaggggaaattataaccagaccgataccacaaccatgagtacacaccgatctatcaaagaataaagtccacggcactatatcaactgagccaattgaatcattatgatgttccacaataaaatcggccatagcttgtcccttaattgccttcaacgactcataccgaagatcaaactcggttaaggaaaatatccacttttcaacccttcctttcaatattggagccgatagcatgtccttgacaacgtgggccttgcatataacagtgcactcattggatagtagataatgcctcaaccttgtacacgaaaaatacaaacacaagcataacttctccataggggagtaccgagcttcagcatccaagagtcgacgactgagatagaatacaactcgttccttcccttccaactcctgaatcaagactgagccgattgacttctcaccggccgataaatataacctaaacggtattcctttttgtggaggaatcaaaacaggaggagagctcagatattccttaatattatccaaagccttttgctgctctgcccccaagtaaactgctgatcggctttcaatctcaaccaatggtgtaaaaggttctaactttccagacaaattagaaataaatcttctaacaaaatttatcttgccgatcatctcttgtaattctgtcttattctctggaggctaaatcttcttgatcgcattaacactcctttgagttacctcgatccccctttcatgaacaagaaatcccaaaaactggctagccgatacaccaaaagcacatttcgtcgggttcatcttcaggccatattttctggttctctcgaaaaccttcctcaaatcggttatatggtcctctatttctttagacttaacaaccacatcatcgatgtagacttcaccaaccagccgattaaattacgatgtatgtaattcatggctctttgatatgtagctccagcacttttcaagccgaaagtcatgacaacccactcaaataagccgattgcaccaggacacctaaaagctgtcttatgaatgtcttcttcggccataaaaatttgattgtatcccgcgtttccatccataaaactcaaaatcttatgtcccgaagcagcatcaactaattgatcggctactggcattgggtattcatctttcggagtggccttattcaaatttcggaaaacaatgcataccctgaccttgtcgtttttcttgataacaggaactatactagaaacccattcagtgtatcggcaaggacgaatacaaccagcatcatacaatcgtttaatctcagctttgacaggttcaagcatatcggccttgtacctcctcggaggttgttgatgcggcctaacccctagtatgataggtagccgattttcaacaatcgattggctaactccaggcatctcataatactcccaagcgaagcaatctctaaacccttttaagagctctatcagcttggttctaaactctggagataagttcttactaataaatgtcggccttggccgatcgcctggacctatgtctatttctaccagatcatcggccgacatgaaaccttgaccttgcttgtcatcgagatcatctactgtatccttagtgtagacatttgaaccctccacgacgccctcaaaataatagcttgggttctccatcttcgattggctgtatatcagaatcggacacttttagaaaatctccatcctagactttttcagataaacaatcaaggccatccatctctcaaagagctaaatcggcactggcaacattaactgacctgtcggctggcatgatctctatcttgtcgccttgccattgaatcaaacactgatgcatagttgaaggaatgcaacaattggcgtgaatccaatcccttccaagcaacaagctgtaagaacccttcccatcgatgacaaaaaacgtggtaggaatagtcttactgtcgactgtcagctccacattcagaacacctttggtttccgatggattaccaccaaagtctttgagcatcatgtttgtcttgatgaaatcctcggcatttctacccaactttctgaacgtagcataaggcatcaaatttaccgcggcctcaccatcaaccatcattttagacatcggcttcccattgacgtagccgtttatatacaatggtttaagatactgattctctgtcccctcgggtttctcgaacactgcctgttctggtgacagaaccaacttagccgattcctcttccgcctcgtcgacatcggcttgatcgatcccgaattcggctagcaaggtaaagaccatgttaaccggtgccgtcacaacactcttcccttttgccaacctctttgcctcatcggctgcaacatcatcggctacaggaaccagattcttaacacgccactcctgccttggctttgctttcttcagccgatgattaatttcttgttcaacctcctgaaggcgctccctgttcctcaatctttgaacccttctcttctgattcttcgtgaaaataccagaaggacaccattgattcttcctgattacattgtcctcttggccatgatcttgattcactggacctaatctttgatgaacggaaactcttgtctgccttagccgattacccttattatatgatcggcttgaactctcgacaatatcactgcacccaggcagttttcaatagatggcaacctcataccttcattccagcagaatctaaagaactcacaaccccaatgaggatcaaaaccatcattgtattcttcattatgcttctcctgctgcctgtcatacttcctctgatatttgttgataatcttagccgaattcacctaaaaaccccttgcacgggtcctatcggctgtttggccagctgtatgcaccatattaacaggaaaagggttaccatcgaccttcatcggctttttggaatcatcaaacctaatcttgcctccctcaatggccacctgaatctgctctctaaaaaccttgcaatcgttagtagaatgggacccagaattatgccatttgcaatacctctttttgcctaattcctcagccgatgggattgtatgaccagcagaaagttgaatttgcttctctcggagtagcagatcaaagatcttgtcagctttagtaataccaaagtcatacttctcctcttttccagaactttttacccattggcatggtatgacatttttactcctcacccattcggctgcagctatttcagaatcgtcctcgtcatcattcaacccatagatgtatggacaaacatgattaactttcttagagcttttcctaacttccgcgaacctatgttcatgcaaggttactttctgtatcggatgtgataagctatcaaagtcttcagacaagaacttctccctaatcggagcaatcataccctgaaagaccaaatcgactaactgggcatcagttaaactcaagctgaagcatttgttcctcatctccctgaatctctaaatatactcgtgcacgggttcatcatgccgctgcttaatcgctgtcaagtcagataatttcatctcatgaaccccactgtagaaatagctgtggacttgcttctccaaatcggcccaactattgatcgacccatacggcaaagaggaaaactaagtaaaagtcgatccagacaaagataaccggaacaacctaaccttcaaagcgtctatagccgatgcttcaccacactgagctaagaatcggctaatgtgctcataagttgacacaccatcttgtcccaaaaatttggataagtctggaactttgaactgattgggcagaggaactctctcaaaccagtcagggtaaggctgccgatacaagcttccagtctcttttggtttaagcccaaactgttccctcattacatcagcaattacatctgcccatggtcattgttgagctgccccttgtgactgttgctgcatgggctcgaactgaccgtattgagacgcaaactgaggttgagccaatccccctggctgatattgggcttgcggggaaggaggctgatattgataattcaagttacccccttggtaattgtgaagattcagctggatattacgtaccaagtgctcagggacaacttgaggcattaatgtgccatccggttgtacgtggtgaaccaagtgttctgggacaacttgatttaaaaattattgcaccggctgaccatcaggcgtcgcaaacccggccgatgcgcttattgaaccttggtgctggatcggctgaacaatttgctgtcttaacggcgtttgctgaatcggctgcagaggctgctgccttggtggtgtttgttgaactggttacctagcctgttgctggattggttatacaacctgctgaattgggggtgtctgctgaatcggctgctgctgaatcggctgttgctgtattggatcaacaacaggttgaggtgggagaaacatggcagcaacctgatcttgggttagccgattcgcaacctgcccactatgctgtggctgctctctcattaacaaccgagggttcaccggctggcctggcgccatggctgatgaagtaggtaggggagttgatgccggcgccgttggctgagtcgttggtgcaatggagggaaccgcctaagtagatggctgaacatcggtaatcaaagaccgataatttgggaagacacctccttgcaaataaaccgggcctacagcctcatgctcagctattgaaccatcaactattgacttcatcatgtttgataagatattgactaacaccctagactgattgatcaaagcatgatgcacaacataatcaacccgatcttggaagttattgaaaaatcctgtgccacatcgctattctgattaagatttcctccctgtagcccctgagcaccatctccatgcaccccgtcaccttgtactccacggactccttgagaattgtcgccttgatttcctagagagccgtcggtagcacctttaatactcggctgagccgagccgtctggagcttgtttcccatctccctccttagaagaactggtcctaggatcatcagcgaccacttttattttgtacttctaaacaagtgtccccttgcgggtctgcatgaatgagttcaagaactgatcccgtgcttgctgcaaaatttgcttcaaactctttcttctgctcgggtgtgaatttttcttgatcgatcggcatgacgtttccttcattgacgtcagcaatcctaacttcagcatcttgtccttaacagagtctgggcaagatggtggtggtggctatttctcagccaagaggaagaattgttggctgacttcgtaaaggtcccaccaggcatgccaaaagcgtgttgatagaaaacacgtggcttgggagatctgcttaactccagtgcaggtccaaagctcgccttcgaatgtatgagcatgccagttgatttgatcctgtaatcaacaaaaaatagaagcaaagaaaccgcggttaaatctataaatgatagtcgatcggctaggtgcagatgacatatcatttatctttgagccgatgttatatatgtatcgatcggcagtcatgaataaataagaaggaactaaatctactcgatcggctgtaagtattcacaatatatactccttgtatcgatatatacttaaatcaagtgattgggatagatcggacgccatgccgagacagtataaatcacttaaatcgaaatatatattaataatgggactacatatgttcatagcatagccgatcatatagatctagcatgtatcggctaatactccgataccactctatactaagatattaaagcaagtagaatatatcaaataaaggcctaatatacttaaatgcaataagatcttaaaataaagggcagatttaacatgtcaataaagcatatagagtaaatatagttaaatcagataagatcggctgaaactctgatgctaccctaatcagcaactagaaggcaggctagaggttgattttttaagcacgacttaatagatcaaactcaactgatacagcattaagtatgaaaagaagaacaatatctagacaatcaagctgctggaagtttcatagagtggtagatatcttatataatctacgtcaacatcgaaatctaacctaatcggctgtcctctaccgacagatgttagccgattgtagattagatagtggtattgccagagattatgtaagatatatgatagttcgacgaattacataaacgagatcagagtatcacaaagatggaagcactaatcccgagaacacaagtcgtcataacaagttttaccttttgttgaagatcgaaaccgatgcagctcaacccgaaagcaagaactcgtcgaaataaaactaaagcaaaaagggtggcgatgcgccgaaattgtattgaacgtgtgtgttaaaagttacatagggctcgggtctatttatacccgagaattacaagatatgcccataacggacacgactaatatctttaacaaactctaagatactataagtctttgcggcagacttttgcccaagcatatctctaaggaaattacataaaatatcctaattaatagatacaattgacttctcaagactctatccatgtgcggcaatcatcttgaagcgccttaattcaacccaatatcatacatcaagttgcattatcggaatcggttgtatcagcttacctagtccgactcagacccagccgatcctaatcgtagccgatctggactccagccgattcctgctctgtttctgaactcgatctccgcctcagactttgcttcgatctaatcttctttcccgatgctgatattaccaaatttggttgttaacatggtggtgtgagatgcaagcggctgggtggcggcgacgattcaacgtcccggttatcgccaaaggaacctcctctccatggatctccttccctgctaaggttagattcctgttttggtcgactgggcttggtggctggaggaacagggtggtggttcgaattcggcgatggtcattgtgtactagatgggaaagcgctagtgaaagccttgcatggcctttggctggcgtcgacaccgttaggcattattcccttccttggaagggtctttatggtgttttctatgtctctaccaatctccaagtgaaaagcttgatccagtcgctggccgacgagcggttgtagcatttcacgtcatgtcctccatggggatgctgttttggagagatctacccatgcaacgatggccgttgatggactcttgtgcttccgaagcactgtacacctaggtgtttggaatggccttagccgtcttggctactttcttgttcgtggtgggcatccagctctcttcgttcgtctttgctaggtggagtcgaagttgttacattgttacagtgcgatgaagcttggcaacgataacacattgcagtctctttctggggggtactggtgttagccgggtggaggaaatggtgcgtcgttttgttgttttggtgatgcctttgccaacgatgacgtgatctctatggagtcaaacctgttgcgtcactaggcagcaagctcaggcctcggcaacattgacacttgctttgcgaagttgaagctgtttgccgcttttttagctagcttgacattgatgtccaccgttgggtttcatcgttgtttagttggtagttggttagagttgtgtggtattccatgtgttgggttattctactagctgcgattgaggtgcttttggcgagtctcttcttgttgagagattgtttttttcttttccttgtaaagtgtctgggttttactcttgcttaattaattgaaatgaaattgacatttctcctatcggtttagtttttctttaaaaatatatcactttcacccctttctataatttttatagaaattctgaaaacttataaactaagtgagagtttcagaaatggccgtttcccccctgtaatccacggtcaaactttctatgcgctagacggctagagcctagatgtctaaaaaacaagggatagaatgacgcaccgcttggtgaagaactgaagttaatggcttccttcttccttcactacactggacaaggtcaccagtgacgggcccaaaccctcacctttgatggctttaggcttggtcagtgatcagtggtcactagtgagttcggtcacctttgacgggtggaagaccattactgatgacagtcacctctgacgtgctagaactctacggcccgtcagaggtaagtgtctgtgctaacccatgccattttgcaacccgtcatagatgactcacctgtgacggctcagagtaaaaaactatgtcacttgtgacgacatgtatgtgcaaaaccgtcactggtatggtcacctgtgacggcttttgcaatatgaaccatcagtggtgagcttacatctagaaaaaaaaataatttcccctaggatttgctaaccatgcctctggaaaaacagaacatacacatgcaatatatatgtctccagtttcagcccattgcattaaaagtttcaaactaacatcacatgaattccaagttgtcaccgaaaatccatagacattcacacacatgcattgcaagttctcaaattgagccaagccgatgcttcaaagcaccagaaataaatccagaaaaaaaagagaacatacttcgatgccaaaatactgaaaaatgagaaatacagcctaagtgccacaaacttgaacatagcatttccatctttggtttctgagcctgacgaatatggtatgacatacaaacttacaattagatcagcataagtacagcccccagtgcctgtaatgacatcattcagagaagtttaatgcaacaatatcctaacagcctaacaaccagatatatgttacagatgggatgacagtagcaggaacagcttcgatatgttacaaatgcatataactatgcaagaatagcctaacagctagataatcagcataagctgctccaaaacaacaaattaaaatggggtcactctgactgagaaggcaaaaataagtttacctcagattagtattcattagctagcttttcaaccatccttgatagtcatccatatgcatgtcagtagttaaatattatctgaaagaaacggaaatagatcaactggcagaggaagctcaccatttgtagaaagaactagcgtctaatttgttcagctagtatagaaattgggggatttgtagagtatgcaagaacacaaccaaaagaaacttctggtaagaggtctaacaaggaaaataaaaacagatttagtgatgcatcaacttaaatagaacaagaaaacaaagcgaaacaacatgcatgcccactatccaaacaaaatactagtacacaaagagcatctaactaatgatccaatagctcatgatttttgatggggttaaagctagatgcatccttggacaaggatttagccacaggaaccacaggagacgccggaattggttgactgcaagctcagatctggatgcaagagaaggaaagggtgacttctgcttagcactaaactgagtaaaatagatgaggcgacggtgactaccgaggatggggtggaaggggacagccgacgcctgctctccccacggcaggttgacctcgacgacgtggtgtggtgtggacggcggaccgcttacctcacgaacggatctggtatcgctgaagctaggaccgcaggatctggagcacccaaactcgggatggttggatccgcgacctgtgagttcagggtgtccggatctggagcccccgagttcatggttgctgggaccgtcagggggaggctgggggatgtagaagctcgtcgtcgaccggagataagcgacgatggacggaggggcttgtcgatggcgttgggcagccgcgtggtgccccattggccgatggtcctggcaccggcgttgtcttcgtctttggctcgatatgacctggatctggcgtggtggaggcgggaaggaggcggcgaccgtgggtggtgggcgaaggaggcagcgacccggaggcggtaggcgaaggagccgatgacggggtggcggagagacggcggcggcgaccatggggcggagggcgaaggaggcggcgacctttggaggtgggcgaaggaggccggcggtcggtgggaagaagagaagagagactgagaggaggaggagagagactgagcaggtggcggtgggccccatgggtggggggtgggggttccttttttatatgtcaaaattgatcacctttgacgggtgcaaacttaaaatcaatgacgggccagaagtcatatccgtcacaggtgacggcccatcacctgtgacgggttgtaactccctggcccatcacaaatgaggtcataccagtgacgggttggaagtcaaacttgtcactgtcttacctgtgacggcttaaaattctggcccgtcacaggtgaggtgatacctgtgacgggccacggctagatgcctcaccaatgacggtaaacctaacgacccgtcaaaggtgacggtcatctgtgaccaatttataaacccgtcactaatgtgccgtcatagatgtagggttctggcgtagtgcttaatcttcgctctcagctgtgatcaatgacaggaacacacacacatcatcagcccctaaaaccagcaaccatgcatgcctactctacactcaacaaataaatatacaaatcatgcatgcatgttcttcatatcggttatctggtcaatcacacaatcaccatcaaacaatgtgtgagattctcttgttacttaggtaccaagaagttatgcaagaacaagctagatcacacacataattaattatgtagctagctagccgccatgcgagcgttcaaagctatatccacgtactggatcatccacagcgcgaattcagaaatcgcaataatttaaaatattctcacgcaaaatcgtctataaattcgcatcaaaatctgaacccaaaacattccatcatcgcatgctttgcattgctctcccttctaaaaaacaatcagaagtcgcagacaagaaagagacgaaaatgtctaacacctacgtgtcccatgtcgctgtcgttgtaatcctggcaatggcttcccagtgcttcgctgccaccaccggcgccggcaatggcgtctcgggcgcggacgccggacgccgcgcgcgtgccgcgcagacggtggcggggatcctggcggtgcacaacgaggcgcggcgcgcggtgggcgtggcgccactggcgtggagcgcgggcatcgcccggtacgcgaaggggtacgcagcgtcgcggcgcggcgactgcgcgccgcggcgctcgccgctgttcaacttcggcgagaacgcgttcgtcgggaaggggcggcggtggaacgcgccggcgctggcggcggcgtgggtggacgagggccggcggcggtacgactacggcagcaacacgtgcgccggcgcggcggcggccgcgtcgtccgggtcgtcgtcgccgtgcacgcggtacacgcaggtggtgtggcggaacacgacgcaggtcgggtgcggccgcatcgtgtgcgactccggcgactcgctgctcgtctgcgactacttcccgccggggaactacggcaccggccgaccatactgatcgtgttatacatatagtgccgtgccccggagaataatcacatactcactccgtcctaaaaaaaatcaatttatacggacaaatttgaaccaatatatgtatgtgttcatctttacaagttattttttttatgggacagagagtgtaggtcgttgtgcatgcgagtgaattactattctgcccaataagccgttgtgctctaatgcttgtgcattatatatattttcttcaaatataatttaattttgaattagtacaatttgatctgtaatgtcttgagctaaattgtgaagattatgctctcgtattcatttttctgaaaaacaacgaaccaaacaatattcaaagcatagaatatcaatatatattttaaatactttagactagatatatacatgacaatttatgtttagaataggcatgaaacagtataattttatcatcaggttttgtgaagaatgtatatctatggatattattgctatactgaaggctttgtaaatgttcaaaacgatacgtttacacgacaggatgaagtaaattagaggcaatcagacagactagcatatttgtttgcaccagcgagagcggtggtgtcagacatggctgtgcctcgacgcaacctggggtatgcacagacctagcgttgccccacgaggccacgacacaaaactcaaagagatgccaaggacaaatacaagatgttacgtgtattcgaatggagattcataaatagaatgagttttttattttgtattattttgtattggtgtctattagtctgtgattgcttatgttatgtcagcatgtgggtaaggttgtttgtgagcatcatcattgggccatggatttttgacctgaagatacaaagccagaacatgatgaccataacaaccacaaacatgaaattagaggatatatcattataaacctggtagaacatttaccttgcctatctcatggaggattggaggcacaacttcatacaactttgagacctgaaaggaaataatatcaacagctcataactcccctaccctcactcttttcacagttacatgaatttattttggcttctcggattggttgtcatatagtttttttggagttgggcaaggggaaccggtggcacgccgttccagcgaccatggcattgtttcccttgtgcatggtgatcccctcgtgtccggttctgtcaactggatatgggcggtgagggcatgcatgtaggacacgcacacatgtttttttcgtaaaatcccctaataatcggagaaatcgtgaaacaatacttccaccatttacgagaaatataacataaagaaaagaatatgccgtttttagagatggcgctgaaatcctattaagaatgtccgcattattgtcattacgaacttgttcgtctcaacagtttcgactttcgagtctagtttgctcgtaaccacgagcgatcaatccaagtaataaacaacttattaacagtcattaatcaatcgaaattaacactcccccttgcataaccccggtaataaatcccatgagttaactatacaaagtaaaattcaaaagccaaacccccacaaaattaacagcagcaattaattaatcaatcaccgcagtatataataaccccgagttcaccacaacttctccacaaacaaattaatcaaccaacacaccatgtctcccttctactgctgcctcgccgccgtcctgtcgctggcgtcggcgtcgccggccgcggcgtccatctcggtgtccgccgccgcggagcctccggccaacagtttgttgccggcggagcagttcctgcgggctcacaacgaggcccgcgcggcggtgggcgtgccgccgctggcgtggaacgcgacgatcgcgctggacgcgcagcggtacgccggcgagctccgggcgagctgcgaggcgcggccggtgtgggcgtggggcaccgacggcttgtacgggcggaacctgtacagggggagcggcccgcgggtgcgcgcgggcgcggacgcgtcggcgcactgggcggagggcgcgcggtggtacgaccgcgacggcgactcgtgcgcggcgccgccggggcggtgctgcggcgagtacacgcagatggtgtggcgcgccacgacgcagatcgggtgcgcgcgctggttgtgccgctgcctgggcgacacgtgccctctcgtgttggacaccgtcgccgtctgcgagtactacccgccgggcaacatcgccggccagcgcccttactaacgcatatatatgccgcggtatatatatgtagcacatgcacgtgcgagctcataaaatgttgtggtgtaataacacgtgcgtgatcaactttcaagaacgtttttgttcttgcattggaacaaatgtttgacaaattaatactacatataaagccgtcaaaaaactgagaagcacgttctaattgttgaagaactctactccctgtttttttatatattattaaagcacagtacaagcgtggacgtttttaatgaaatgattgttacggttcgtattcctcacgccactacttaatgttctcaacgacattcaaaacaatcggtttttgcgtggacgctgccatgctggtcacttcctcctcggaagatgaaccgctatacgccgatcacgtcctccactaccatggctcgcctctctatctcccatgccacatatttttattctaataaataggggactgaggacaatgggagttttatcgccacccacttgtgctctcacttactgcgcctcatgacctcctccccattcactctagccatacagggtttcaccactccatctgcagagcatgaaaactagttaggaggataacaacagcgacaacatctcagataaaattttcaaaactttggaaattattattgtggacggcttctacagataaccgtctgcaaaattcttttttacggacaactagtccgctagtttaaatattttgaactatttaaaaacaaaccggggcccaccgatttatacaggtgacgctctgacacatctacctatgaaaagagttttcgtaggtggttattgaagacattcacttttgagaacttttttacagatgggtgtttcagacatcacttacgaaaaatcatttaaccataataatagatagtctcaagtacttcatagttctaattcctcgagtttaatccactggaaatgaccagtgctagcattatattacccgccatatctagcagtgccgccatgggtgcttggtagatacgcactctacctactcttccgctacgcctcctccacctgcactaaagcaaaggcaacgtctccacatctaggtgagggctgttttatcggatctgcacttctgtgcgcctgtacggttgtgccctgtgcaatgcgatgtcgtttgtcgagttgcctatgacgctgcaactcctctcgtctctcgggcatttctgcttctaggtaggccataggcagatactagactactagtattaggtgttggccccccaccatcatgggcccccagcgatcgcctcggctacatagccccagggccggccctggcttttcctgatccatcctgattctgcttttatcagagtatcaagcttgcttgtatgatgatagtacattgctttgttacctttttgctcgctgcctagtgctgcaatacatcgattcagtttcttgcttctatatgcttgtttatattaaatgcatgggaggaattaggaaattacggaggaaatcaattaaaggaaaaaaaatatttcactgcattttatatcttttatttggtcggtcggccacatgtgcttaataagttatgaaaatcttattgcttctacgtatgtgtatgttgtgtggatgtgataataaggttgtgatacgtgtactagcgaatcatcgtgcctaaactcttcggatattccggaattccatccctaggtcccgacattaattttattttctcctcttttattactatatctttgcgaggcaactacgaatcgggcgtcggatttttgagagaaaaatcgggtccccctcctgtgcgctcccctctacacattcattgcatgaatgctgcatgccagctacttgcttcctatgcctacatctcagctacatgcaatatccaatactaccctcactttcccctatcgatgcatatctagcttttcttaacatgtttaaattattttttctcttaaattattaatcccatatacaaataatgcaatatgattgcatagttgtatttttttaattaaatctttacaacaagatctaacataactatattttaatgaaaataattaattgatgctttatcacttataaaaaattgtttcaatttgcttcataagatgttccagagagatgcaacattcaaaatataataactgcaagaccgtcaaccattgcatatgaaagctattcacactttcacagtcggtgtagcataactcccctagtaaaaaaccatgagttaaaagtacaaattaaaagccaaaggactcacaaaacggcagccattaattaataagaacccccgctatatatatacaatcgcgagttcaccacaacttcaccccgaaaccaccatgtctccactctactgctgtctcgtcgccgtcctgtgcctcccgcgggcctccgcatcgccggtggcggcggcatccatctccgtctccgccgtgcagacccccgtcgagccgacgccggtgcagttcctgcgggtgcacaacgaggcacgcgcggcggtgggcgtgccgccgctgtcgtggaacgggacgctgcagctggatgcggcgcggtacgccggcgagctccggacggaatgcagcctgcggccgccgccgcccaccgcggcgcggggcaccggcgacggcgccgccgtctacggccggaacctgttcaaggcgtacggccggcgccacaccggcgcggaggtggcggcgttctgggcggacggccggcggtggtacgaccgcgacgccggccggtgcgcggcgccgcccggccggacctgcggcgcgtacacgcaggtggtgtggcgcgccacgacgcagctcggctgcgcgcgccgcacctgccgcaacggcgtcgacaccgtcgccgtctgcgactactacccgccgggcaacatcgtcggccagcggccatattgacaatgatctcatctgtttctgcgacacacgacacgcaatgaaatgtagtacatacgatcgatggttctggtgagtgattgagtttttggaacaaatgtttggagaaatatatgaaacatgctccaaagaaaattaaagggatactctaagataattaaatatggagatttaatgatggcagctgcgatgaggattcaaatatgtattgtcatcggagctagatttgttcgacctctccatttcccataatcttgccgaacaactctactctctcccaagtccgacccaaacacggataaatgaactttttttacaaggttatattttacctggcctctacatccaatcggatgcatgtgagcctttttaaattggaaacttaacccctcaaaacaactcaatctgaaatttactcatatggagatttgaattcagataacatttttacattaggaacttagcctatcaaacaacccaatataaaattcgctcatataaagatttgaactcagagccttgaggtgctactcaggtcacatgcccttccgcccgataaaagaacctggtgatcggtgttgcagacaccttatcactgttgcttgaataagtaggaacaacaatcttgacaaaattaaaaaaatacattttttaaaaaattggcctttttttcttttgtttggcacaaatgcaaggtagttgtgtggtttgtagcgaatccagaaattttcttatgatgtagaaggagcagctggaccagacttggcatgggccagttttcacattgaacactcatttttcacgaaaataaaacaaaacaaaatgaaattctgatggtcggtgatggctgagttaaaaatacagttatggtaatacatcattctacacattttaagggggcaaatcacacgaattccctaccttccattatgcttctagattcattgtacgtcctctatctgttgagctccgacgagtgatgaacttggcaaattttgtacatattcctcaatcttaaataaatttggttggtctatcttgaccggcccgacaaaaaaatgaacttggaagaggaagtaggaggtgttcccgacttagagggataagaggtgaggatgagagtaagggatggtgggctggtggccatggtggagtggcaaggcggtggtaccagtagcctcgacagtgggagagaaggtcggtggacttgtgttggcggggacgtgggatctagagtggttagggcgaatcgttaaggacggggaagaaggtgcaggggcactctactactgttcggaggaaagtgaagctaggggaagaggaagagaagggtggtgggtcagtggcatgctagggctggaaggcagaggaggtggggtgatcc

SEQ ID NO: 7561 - DNA, 47130 bp, Oryza sativa
aaccataatgacaaattttccgaaactttatttgtgaaaattttccctttcttccttctccataattctttgcaaatcattttatcaatctccccttcctccttcaacttgaatagttgttaagctttctggagaaacttgaagatgccaaagtcaagtcaagtgtatcgtggaacaagaagatgtggttgaactgaagaactgaagtatcgagctttcgagatggaatgaagttttggatactaccttagaatctaaaccactcttttgcaagagtataacatttgttgcttggttgtgtgtaggtatggtagcattttcatcattgacgagcgtgtaactgtactaggttgtttgcttaatcaacttgaacaatataatattttacacacatcagaccagtggaaacatggttaaggtcttatctttagtgtaacccctctccttctaccctctccaaatctacaacagatggtgaacactcgcgccagtggaaagtggaaataataacaacgatgagaacccaaccatcacacaagtcttggctcaatagactcagctcatgaacatgatgatgtagcagatggataaccagtttgaccaaggtaacaacaatcctccgccccagaaaaagttagctgaatttctttgtgtgaggccacctacattctctagcactaccaaccttattgaagctagtgactagttgcatgctatcgagaagaagttgggactgctccagtgcacggatcaggagaaagtcatttttgcttcgcatcagttgcatggacctactttagaatgatgggatcacttccgaatgaacagagtagaagaacaaccaatcaacttgactgacttcactaaaggattcaagaagacatacatacctgcaggagttgttgctttgaagaagtgcgagtttaggacactaaaacaaaaggatcacactgtgagagagtattatcttcacgagtttagctgtctagcatgttatgctccaaaagatgtgcgtactgatgaagaaagatcggagaagttcttggagggactaaatgataagatgtcagttaagttgatttccgatgactatatatgcgttgatttccgatgactatatatgctgatcactggtggatagctgcaagaggggaatgttggtttcaaaggaagcacagggtagtagccagaggcaacgtatcaagccactccaaattgaggaatcaagttctacctctcaagaatagtcgcaatagttcaagaatggtggtgagatcaactcagagaataatgcgggcaatgaagtcagcaacgagcaaactcctcaatcaataccagcttagccaaattagcctcaagaagacaacggtaatggaaggaagcagttggtgtgtttcaactgttatgagtcaagtcactttgtaagagagtgttcgaagctgaagcatcagatgtcacaaggtcaagtcaacaacattgtcgtcataggagccaatgtcgtgccaattgcgtcttcaagtgataaaactcagccatcagttccaaagcagcagtagcttccttttggccttagaataattattagagtaatgaaataagatagaatgcagtttacatatgcccttttctttctagttgttccaaatctctggacgagattcctggtaagggggtaaatctgtcacaccttgattttcgttttaaggacatataaattattcctagaattttcattaaatttcattatttacaactgaagttaaatttgggaaataaaatttcctaagtaaaacatggtctgatttaatttttgttaaattctccttgatgaactatactctctaaaaatttttcggatttttatagctcagttactaattttaataatacaaacaacatttcagtaattatttaagttaaaaaggtaataaatcctcttcccagtcttggccgagttgggcccatttccttccatctctccccgtcggcccagctcgagccagcagcccctcctcatccctcggagcaagtccgttgtcctccctccttcaaccggcccaagaaagaaacaaaagtctacttcacgttccccatgctacactgacggccctaacctccagccggcctccctcccgtgcccgtgcgccacaccaccgccttgtccgctcgattcggcttcctcattgcctcctcttccaaatttatcgcgggaatggaatccctcaatctcttcttctttaattgtcacgtccgaactaatttacacatacaattctcgtcaaagaatcaaccgaggtacacaaatcaataatttaataaacaaattcatcaatataatatcgttaaatacttacaaaagaaaagaaaacagcaccggacagatgatctagagatggcttcagctacactcccataggcagcttaagtgaggtataagccaaatgttttttgcttcgctactttcttcaactgaggtttatttattattgcaagagtgagcacatgaaatactcagcaagccacacaaatatgcaagtgcacaggaataacaaaggatggcataataaagggttcatttgcaaaagtagtatttagcaaatatttgagagtagtaaaacattagagtaattaatcatcaatattaatcaacactgaagtacaccaatgctgcacaggcctaaccatctctgaacaactaaccccagttgcacagatctaaactccataacagtagctaacaaattataatcaccaattattattattaatgaatagtgcggtactaatcacaaaaaacattgctaggcccacccatgaccgtgggcgcagcaattcgaatagttttattttggccagaggtgtacaaatttacccacaaaacactaattctacacatgttgccatgccccgaaataccgccatggtattgcaaaggggaaaactttgacaagaccatttgcataacatgcccaaccgaatgacacccactaagcatctgtctccggtagggatggccagttccctaacagggagactacctaatgcccaaacagtggacttaattgtctatcacctatcacctgtggacttagttgtctgccacgataaaaacacaacataccgtggcatctgtcgttggtcatattatactacagatctaagtcgttgcctattcttgctcgtggttaatatggttaatgcttcacaacactagctcgtaaactagtccttagttgtcatgaggacgtccaacacactatgtgctcacaactcaccattagtaaaattttatttgtcaagttaataaaccaagcactaccaatcagcactaccaatcgtcacgagatatcactaattaatcatcattaatcatgagggaagcattaattattcccacataaatgacactaaagtgtctaagcatggcaaagcaaattatactaaatactccctccatctacttttgatagtcatacttcatcttgacacacagaccaaggataagtgattctacttatcatccatttaaatatgctactagtaattcctcgtaaacaagcgattcattaatatttacatttctcgatgctcatgcaaccaatctggtgtggaagaatgaagagtcatgcattaaatctaagaaagtcattaagatgataagttgttggattgaaatatgcctattaaaaataaaattttcagatttggaaatatgactatcaaaaatagatggagggagtatctagttggaccaatgtataaagtccaaactagtcaaagtataatctaggttaacaaggaataaggtaatcagtacaaattagctatacaaaggaatatgtgttcacaccacacaatgacattaaaaaaatgaacatttgaaataaatagagaatttaaatataagatcaacatgctcaaagggattgtatatgtttgggatctgtcttgcaataatcggtcttcaattaatcttctgaaactcttccaatgcactcataaacctccaaaacgacagaattaaatgacaagctaacaggcaaaacgagaaaaaagaataaaaaaactccaaataaatagtacataaaaagtaaacaaacatgtagagcatgattttataagaattataagacttgaacagcctcattccaacttcatatgaattagttatgaattttacaaggtttaatccaattaaacctattaaagaaaagattacttcaaattaattggatggcagagggggaaaatgatgacggcagagctcggtttgactaagttgacagagtatcaacggattagatcactcgaggatggatgaagggctgacatcgattgactggattttgactatatcggacggctcagattgaactcgatctagggtttagagatggcgccacatggtgacaccggattttgacctatattggatgggagcgacgtaatggcggtgacgtggacagccacacaggctcgatggccggtcggctctagacccacacgataatttgaaaaacaacataatgcatataatttgaaacgagataaatttgtaagttgggatcaacatgttcaaaacatgttcaagggtatatttgcctttacccatgggattttcacactgaacttcacctgcaatagcaacttcctcggcggcaacgtctacatgatcttaaaagggataaaaacaaataaacaaaaagaaaaggcagaaaaataacaacaaataaaataactaattaaatcggaagatagagctcaacttttgaagaattaacttaagaaaataaacaggtcaattcggagttcggatggaggagatataacaattggaagattgaattttgagataatttggatggaaaggtaaacgaagatttgtggactgtctctttagtaattctggaacaagatattatttttggagaactgatgagcatgatccacccatcagtgggatggtatgtgcctaataggtcttatcgggaaaaaatagtggatagaaaatttggaagacacagagcacgatatgtcactattagaaaattagttgttgctgacagtcaaaatagagtttcgctggtggccagaagtgtcaccagcgactaacggccagtgaaaataatgcattttcactagcggccggctggccagcgaaaattgagtttcgcaaccggacatgcttaattagacagccgctagcaaaaatggtgcggcaagctaaagaggaccatcggtgataacaattttggggataaaaaaaatcaaaatcggtgttgcaggccgccatagccgtaaccaccactggtcgccatggctgcaaatacagcccgcggtggccaccgcctgccaaagcccacaccgcggtcaccaggtggtagaggggaggggattggaggagcccaggcgtcatcgtcgtggtagccgtcgtcgtcatcatggcagccaccgtccatggaggatccgttgttgcggcccagcggaaaagaggaggacgacgcaggaagccatggcggagaggaggaggccacgcgccgccggtgggaggcaggggaagagggagaggacccgaggggcagagaggaggagaaccgcccccgccgccagatctgtgccaccgtgaccaaccatggtcgaggtcgcttcatccatcaccgagccgcaaccctagccaccggatccgtgccacagtgacccgccactggatccacgcccctccgacttgccgccaccgaatccacccccctccaacctgccgccgctggatccatgcccctccaacctgctgccactggatccacgtcccctcccctctggctagatctgggaaagggagaggagggtcgggtcaccatcaccgctcccaggagcgtggccgcccagtcgtcgaggccacgtgcgctggaccgcgtcgctgcctcccctacactctgccgctgagctccgccacgcgctgccgcctgccgttgagatatggggagccgagagaagttgcgagagataaagagggagacaagtcgtgagagagagagagagagtcgctgctgagatggatatggggagccgagaaaaaaaagaggaagttaaaatttcagttccgcacgcgctcccacattttttgctagcggaagttaaaaggaagataaagaactgagatggatttttgctagcggtggcttaggtgggccgccagcaaaaagggtgcatcttcattgacagtcctcttaacttggccgccaacgaagatccattttcgctaacagtgctaggtgaggaagaaaaagctgagaatggaatatggctgcagaggcagtggtgcaacgatgggtggtcaacgacaaggaggtggtgccaatggacggcctatggtctacggttgatgatggcgtcgactgaaatttcggaggtagcagcctatgctctccagatgatggcaaacagcgagagacagcaccagatggtggaggtgaagccggagggttggaagatggtagaggtagtaccaggaaaaaaatggtggtggtagtgccaacaacgacgtggtttgggaacagtgaagtggcggcggtttgacaacgaggcgttggcgaggataacagtggtggcatctccgatcctttggatagtataaagaacaatgatgcacacaaccactgggatggcgttggaagaaacagagtggtgggcctggttgatgaaggagctactgctatcggaagatggaaacttagaatgaacagggaatatttttagaatgttccactggaatttctgaaataaaagtattatttttgcatgagattaatataggaagaacaagggaccagcgggtaggggtgacatagtgacgatggcacaaccaccggtagtttgatggtgctaggaacaaaagaaaagaccgacttaaggaagacaacaacgtacggtcgctagatgagaagatggaattgactaagataatgtcacttagctatgacagtggcgttgatcaatgatgtagaagaaggaagatgggagtagactgatactcaccaacgatgcaaccgccatggacgacgtgtggggatgacaactgtagcccctggcagcaggacgacgtgcgtgcgcacgatgcgtcacggtataggcgcagaaatggagaggatgcggtggcactagtcagctgatgaagatggcggatggcataggcagccaaggggatgaaggcgaagcaacggactgagtcgtcggcacatccgctacatcgggacagagatgcaatggcagcttggatcaaggcggctctagcgatggggaagaagctgacgacatctcagcgtgcgttaataaaaagaaaagggcagcagcactaggaagagaagatagcaatagggtaatcaccggtggtagaaggaacttctggagttgaggtgtcaaggctgcgttgggtgctgatgctgacattgccaaggaggagaagatcgaagggagaggtagtagacttaaaagggggaatgttcgtttaagtgggccagaatgggccttgtaagcgtgagtggttattcgacccaagtgccagactgtaagcgtgtgtggggagtgagtgggagtgataaaactgaacacgcaactcctgtaaacctttttatcgatttagaacttggcggtggcgattggcggcggcagcggcggaattcgttggaaatccccgtcgatataccttgtgtgtctccagttctgaatcctagtttaggcagctatcaatttggtatcagagccctcagatcttcttggtttcttgaattcccttggtcgagccgtaaaattccatgagataggtggggatccgctgtttacagtgatattccgcaaaagccttttggggctcccttgatctggttggctagattcggggtaggaaccagcgatcatcctggagcgacctcggtataccactaagcaagcggctcaaatcatggctcaagatgggaaactcgatctcttgttgaagatgatggaggaggccgagaaggagcgggaggagatggataggaagcgcgaggagtcggaggccctgaatcttgtggagttgcagctgttgaagcttgcgatggagtcccgcatacccttggtggagaaacaggtgagcgagttggggggttctgcgaatgatttggcgaagagggtgaattccttgcaggcaagtgtggagaaatgtcagcgggaagttcagcagaacgcgctatacaaaggggaatccagccaaggaccaactcaattcccaaatgatgatgacctcaatggaaactcaccgaatcctttcctgttcacaccccaacaaggatggcgaaatcctccgcagttcaattctgtaagcccatttactcctgagaactcgggttgtccaatctttgattctggaatggctagtattggtggcaatgtcccttctatgtcttgccctcagtttgatggagaaaatccccagatgtggagagataactgtgaaatttattttgaggtctatggggtacatcctgctaattgggttaaggttgctctgctgaatttcactggaagtgcttcgttctggttgcaatctgttaggaatgagttggtagggatttcctggttggagttatgtgatagagtgtgccgtaagtttacaagggataggcaagaaattcttattagactgtggtttcatgtagcgcagacaggcagtgtgactgagtatgtggagagatttgatagtctcatgcatcagctgttggcgtatgacaatgcccttacaccaaggtacttcctaactaagtttgtggatggcttgaaggatgacattagaggggcagttatgcttcagagaccggtggaccttatggagcttgcttaatggcattgctacaggaagaaatattggaaggaagcagaaaaccaagttacaggaaatctgatggaaccaatttcaacaaggtgttttcccgacctactcagccaactgtttggccaaaaagtcctgctcagactactggagatgacaggaagctgattgagtcagggaagataaggtcttggctctgaaatcttacaggagggctgaagggttgtgttttacatgtggagaacgatggagtaaggaccacaaatgttcccaaactgtgcagttgcatgtggtagaggaattgttggaagcatttcaaggtgatatggaagaagaagttaatggacttgattcctcccagaaagactccttgatggcgcttttggctagtgcttgtaacggcacagattctactcattctttcagagtcaaggggttgatacaggggactaaattactgatgcttattgactctggcagttctcattccttcttagatgagaatattgttcagacaatgcaaggagttacatcccttccacaacctgttaaggttaaggttgctagtggtgaagttctgatttgtgacaaacaattaccggattatgcttggtggcttcaggggagatgttatagaaccaactttaaattgctttccctgcctgggtatgatgccatcctggggatagactggttacaagggctgggagtcatgagaataatttgggttcaaaagtggttggaatatgagatcaatggaagtccagttaggattcaaggggtgatgcccaaggttgatgcctgtcctctaatatctggagataaactcatgggcttgtgcaaaatgggagctcttatgcatctgtttcagattaccagtgaaaccgacatacataaacctgagattcccattatgatacaagaagtgatgaatgaattcaattcagtttttgaagaaccacaaggactgccacctaggaggcgttgtgaccattccattccattaattcctgggtctaagccggtcaaccttcggccctatggatacaatccagcccagaaggatgaaattgaacagcaagtacgagatatgttaaagtctggagttattcatcctagtgttagtccgtattcatctctggcattgctagttaataagaaagatggcacctggaggctttgtgtggatcatagactgcttaatgctatcaccatcaagagcaaataccccctgcctgttattgatgaacttttagatgaattggccggcacaggttggttttctaagttggatttgagggcgggatatcatcaaatcaggttggttgctggagaggaacctaagaccgcctttcaaactcattttgggcactttgagtatcgggtgatgtcctttgggttgacaggggcacttgcaaccttccaaggagctatgaatgaaaccttggcttcggtcttaaggaagtgcgccttggtgttctttgatgacatactgatttacagtccaaccttggaagctcatgctcaagatcttagaactgtcttgcaactcttgcaggatcatcagtggaaggtgaaattgagcaagtgctcttttgctctgaaggaactcaattatttagggcatactattggagtggctggagtttccactgaccctagcaaggtacaagatattgtcaattgggctattcctactaccttaaagaagttgaggggattcttgggaatagctgggtattatcacaaattcgtgaagaattttggtgtgattagtaaaccactcacaaacctgttaagaaaaggggttgagtttgtgtggactccggaggtgcatgagtccttcgagcaatttaagaaagctttggcttcagctcctgttcttgctcttccggattttactaaaccttctgtcattgagactgatgctagtgagatcggaattggtgcagttttgtcccaggataaacaccccattgcttatatgagtaaggcattgggtcctcgtactagggggttatccacttatgaaaaagaatgcttggcaatcctattggcaattgagcattggcggtcctaccttcagtatgcagagttcactatactcactgaccacaagagcttgatgaatcttactgatcagcgcttgcatactccttggcaacaaaaggcctatacaaagttgctagggctgcagttcaaaatttgttacaagaaaggaatccacaatgaagcagctgatgcccggtccagatgtgaccataactcttctttggaggtggttgctatttcggtttgtaagcccacttggctggaagaggttgttaatgggtatttgaaggatgccaaggctacttagttactgtctgaattagccattcactctaaggctgactctccataccaacttaaggatggtcttattcgatacagaggacgaatctggttgggacagaatattgagttgcaatagaaaatttttagtgccttgcatgacagtagcatcggtgggcattccggatttcctgtgacttatcgaaggatcaaggccctttttgcttggcctggtatgaagaaacagatcaagctcaaggtgaaggagtgctctatttgtcagcaagcgaagccggatcgttctaagtaccccgggttattgcaacccttgccggttccattgggagctggcaaatgtcacgatggattttatcgaagggcttccaacctccaggcgattcaactgtattatggtggtggttgataagctatctaggtatgcccattttttacggctagctcatccattatctgccgcagacgttgctcagttgtacatggaaggagtttttagactgcatggtttacccctggccatagtttctgatagagatcgcatctttactagccacttttggaagcagctgtttaacagtgtgggcactaaacttcatatgagtactgcataccaccctcagacggatggacagactgaacgtgtgaatcagtgcttggagacttatttgcgttgttttactcattcctgtccaactaaatggtccacctggctatatttgggctgagtattggtacaatactagctatcactccacactgaataaaacccctttcgaagtattgtatgggcatattcctaaccaattgggcattactgttaactcttgtgaacttccaaatgtccagcagttgttgaatgaatgagggttaatgatacaactcttgcagcaacatttgaacagagcacaacagtttatgaagagccaagctgacaagaaaagaagttttagagcttttgcagtgggagattgggtctatttgaagttacagccatatgtccaaacttcagtagcagccagggctaatcacaagctgagtttcaagttctttggtccttatgaaattcaagagaagattggtgttgtagcataccgtttagtccttccggcgagcagctctattcaccctgtttttcatgtctcgcagctcaaagcagctcaaggttttaaaggggatgcttctgttcatcttcctgttcagtcttctactaaacaagttcctgtggctattctggatactagggtgcgcaagtcaggtatgtctgttattcctcaggtgcttatacattggtctgatgatgtgatcgccaatgcaacttgggaagacttggaagatcttcgtactcgtttcccaagagcactggcttgggggcaatccagttttcaaggggggaacattgtcaaggctgcgttgggtgctgatgctgacattgccaaggaggagaagatcgaagggagaggtagtagacttaaaagggggaatgttcgtttaagtggaccagaatgggcattgtaagcctgagtggttattcggcccaagtgccagactgtaagcgtgtgtggggagtgagtgggagtgataaaactaaacacacaactcctgtaaacctttttatcgatttagaacttggtagtggcgattggcggcggcggaattcgttggaaatccccgtcgatatatcttgtgtgtctccagttctgaatcctagtttaggcagctatcatgagggcgagagggtggcaccattccacgatggcagcagcacctctgcacgaaggcgacaacgacaacacatgggagaggaccggggattaaccactgatgaggacattgaggtggcagctatgttggaaactgggcaacgatgatattgtttgtgatctgcgaatataaccaaaatggttttctcacactagatgatgattagggaggaagaacgtgaaagcggcgcaggtgcttaccacgatagagaggtggcagcaatgccgggtggttgacaacaagttgatggcgatggtggatggcttgatggaagacggcgcaggaagtggggaagacgacagaggtggatggcataacagtgctgcgccattcgctggtaattgagagatctcccaacgatggtagcagtgctggaaatgagacgaccatcatgccggctcgatcttcccatggagcagctcgtgcttgcgatgacagcggcaacattggtgctcactcgatcggactgcaacacaaccgcgtctactcgatgtcccgaggcaggaacctaggccggattatagtgagcagcaatagcagcaagacatggtccggtggacgacgatggagagagaggcggcagtgcaagttcgcagcgaacggccggtggagggatgcaggcgtgtcgccggaggtgaggaagatgcatgggaggtggccttggccttggtgttgaccggcggcggcgacggcacggtgtggcaggaacggtggtctgcaaagggaaaaggagggggtgctggatctacttatagaggaggacagggagttgagcggccagccggaagatgtttattcatttttttagctgagacgatggaaattgaggtgactgactgatgatggttactcattttttggctttggtggagaaaattgatggaggggtttcgccggggatttggctggtgatgtgatggcacggccggggctagctgaagcgcgcaggcgggctggttcgaactgcatgcgaggaaatgagatatggggcttcggcctcctgctgatgggacttcggcctcctgctggccagaggaagaagatgaccgatcgagaaggaagaaagaaaagatgaacagccgggagacaagatccaactcatcaaaagagattcaattttcggcattcaacaagtgaaattgatgatggagaggaaaggattagggaatttctgttagcttcagctataatcatgtgtcgtattatcggttactgtaacgtgtctagtgttgtcgtttcttcagtttcgtcagactctgtttcggcgtctgtttctctgtttctttttcctgtaagccgagtcttccgggtcgtgcgtcgtgtgcgagtcatccggatttcagtgtcgtggtcgcatcgtcgtggatgatggcgtagtggtgtcagtttgagtctgtacatatttgctatatatatgagcatcagaaaacgtcgctggttggttcgcgacaccaaaaactctgttcgtgttcatcgtctttccaattcagagaattcgcgtgagagagagagtgaggattcacaatcttgggctttgctatcatttggtatcagagccatgtccgctcccgccagcggttcgtctcgcactcaccggcgaacaggccgccggctctcgccgtctccgccgcgcgtgagcgggcgacagctcgtcgtgcagcggattgttaaggaagatggctccgtctactatccaatactcagacgctcaaattactccgattgggcggtgttgatgcgagtcaatctccaggctcaaggtctgtgggatgctgtcgacaccggcgatgtcccgtatcaggaagattgccaggcgctttcagccatcttgcgagcggtgccggctgagatggtccggccgcttgccgagaaggacagcgccaaagacgcctgggatgcgctcaaatccatgcgagtaggcgcagatcgtgttaaggagtcccgagcacagaagctgcgccaaacttttgagtccatgcgattcaagaatggcgaacacctggaggatttcagccttcgtctccagtccttggagatgatctgtctgaagagaaggttgtttgaaaattgcttcgcgtcgttccccggaggtatcgccaaatggctctatcgattgaaaccttgattgatctcactgtttgatgaatttttataccaaaattcatagaaaaaataatatatcattgggcattaatttgcagcccaattttacgaaatacacgtgaaacatgtctctacgacatgtgggaccagaaaattcaaatatcatacaatgttcaaacatattcaaaattggactcgttttgttgtatgttttgattggaaaataatggttccaacagaattcatatttgatatatgattagggagatataaacatttgaaggagatcaaccagtgttaacctcgtatatccttaatttgtttgctgctcctcaccggttggtaattatccttatggcagtgtttggcaaatgtctaaaggaaatgatttcccactcatctttaaatcctaaccatttattctccctcatccatttaatcctaacccttcattcatttcctaatcccaatcccacccctcatttcccattatccaaacacaccctatgaggtgtgggatccaccgtcaattagccaagttaatcctcgtgattatctccagcacacacacgttctttttatctggagcacaaaattctttttatcacgcgcaggtcgttggattaacagacgcgctggcttatccagagaattaacgcttgatttcgctggcttgctgaaatctcggaagggattaggcgaggactccgtcgcctctactcttatataaggcgctgtccctcacgacgcaggaggtgggagaaaatccccggcgcagaggcggctggcagaggagaagacgtaggtaggcaactatgctgtgtgctctgatctgcttatagtttcacaaacccatatccaacatatacacaatttacacgtcgtcaccgagaagcacacatagacggcggaccgctgcgcggctcagcagcaatatgccttagagagccgccggcgctgatggcatctctgccggcgagtcgtccgtcctgaataacaagcagatcgatcttgtttttcgtcaagaaaatatcatcagtggtgtgcagacgagtccgatcctcgtggggttggaccgtctaagttatcaaatattggagttggatatttatttgtataaacttaggatgagtttgagccttattggcatcagaccaaccatgatttacacatatttatattctcgttcatgataaaaaatcggatgcgcatatttataaacttgggatgagtttgagccttattggcatcggaccaaccataatttatgcatattgatgttctcgctcatgataaaatatcggatgtgcatatttacttgtataaacttgggatgagtttgagtctaatcggcatcggaccaaccatgatttatacatatttatattcataccggaacaattatagatttgccttgtgcatgtcatgtgcgggagcaattccttctctctctaaattctaccagatggatgggagcaactctcaaaattcttgaagacaacaaaaacaatgctcgccaggagggcaaggcatgcagatttacaacacacgtcgacatcatggccgagtgtcgacgagatgaaatggccaatttatcaatatttgtgctatgtccgagaccgacgagtccggataacatattggctaaagctgacaaggctgcagtcattaactcattccatttgtctatgaccgacgaggttagatgaaaccatggccgagtgtcgacaaggccaggtcactatactattaacacgtctaaaatggacgggaactggatataccgttgctgggcaccgacgaggcaaaagcaatcacaaaatccatgtttgatgaaggccggggcacatgagtgggcaccgatgaggcaaaggtcacccgcttcaccaaattccctccgtatactaacatgatgatagtgtattgtgactgggttttggcaaaacaaagccatcagttccacattcactatattcaccgttaaatctgaaccaacctcaaccttcggcgagcaaccaaattttgatgttgacgatcacaaagcgcagcttaatcggaggtgttccataggctcgctcctatagatgtaattaaccggccgcctcattgctagcgccgggaatcagcggactgcacggaatctcctgtcaagatacctctccattaagcattcctcacgaaggcaaaaggcgaactcctacaggagccctcatgtatttgtaaacattcatgttaatgaatcatgattaataaaaaggcaatacagggtttccctattttctgtgtgttcgttgttttgttttcatcaaacactgaccttgctttctattgaggatctgactggccggcttctcaccgtcgacgatcaccccgactctgatggcgaggacgcgggtcaggtgctcttcagcgaaaaggaggcccctgctcactcaaacaaggaagctgggcagaactcagccggggggagggcgtccagctcacggcaaccacaccgcagcaggcgcgagcgcgacggcaacggctccgacggcaagtcaggttcgtcccaagcggcaaaccgcaatgtgtccaaggacaaatgccggtactgtggcaaacttggtcactgggccaaggactgttgcaaggcgaagcgagaccgcgagaaactggctcaggcaaaccttctcatcaccgagcctgctcaagccgcggacgaaggggagccgacactgctgatggcgcaagtgtgcgagcttgcccctgctaccgatcctgtcattactgacggggaggtgacactgaaggaggaacgtgctcacgtttctcttcaggatgaaggaaagcccgttgatctagactggatccttgacacgggcgcttcaaatcacatgacgggctaccgtgatgtgttctccgagcttcacaccaccgtgcgcggcactgtcaagtttggtgatgcgtcgagagtctggattgaaggacgaggcatggtgctgttcgcttgcaagaatggtgaccactgcgcgctcactagcgtctactacatccccaagcttcggagcaacatggtcagccttggctagcttgatgaggcgcattgcaagacggtgatcgaggatggtgttctcactttgcatgatccacagcgacagctgctgtgtagggtgcgccaaggagttgggcgcctctacgttctccacgtcgagctggcgcaaccggtttcccttctcgcaaaggggaaggatcaagcctgggtctggcacgctagatacggtgtcacgcccagaaattttcgaatagaattccaagcagaatgtgcattaaaatccccgtccaggaccggccggggtacacaaacgacaaagttgacatacagatccacgtcttacaaacattataaaagttttacataaatgcagcggaaaaacaaaagataactggagctaagccttgacttgaactacagcgggaacaccactccacaggcatcctcgatggcacggacgaagcctactcctcggagaaaccaccatctgacgcatactcaaactctggggtttggggaaaatagagcaagactgagtattaccaactgtactcagcaagtcataccggaataggggtatgatgcagggaattatcaagggatagctataatggttcatttgcataaaacgagcatttataaacagaagttgaaagcagtaaagcagttgtaacaattaatcaatattaatcatccactgtccaacgctataccacattgcaacaggcccaaccatccacctatactatccaatttcattagactaaactagggtgagactaatcacggtgaatctggttgatcgcccataaccacgggcacggccatttgaatagttttactctgatcagaggtgtacaactgtacccacaagacacaaccccacgacacgttttcgtgcgccggcatgccaccacgacatactagaaagaggccgtgacaggacccttcgcataaccccctctaaccaagcacaccacacctcaggtttcacccccactcctcgcaaggccgtgggcagtcccctctcgtgcctagatgaatccggaagccgcataggccatcgcaggacccatccaaactccatcacgcccacccttgcctggatgcgtcaggtagaggaaagctacactacaagcccagccgttgcccacactggcttgtggtaagtatgataagttcttacagggcatcccgcgaaccggtccttaactgctatgggtgcgaccaacaaaaccatgcacccacagcccaccatgtgatttattttaattaaccaataccgaagcggtggcactaatccaacattaccattagaatctacagtctatacattaataggattttcccctttgtgtgctagttgaacaaagcatggctaagcaatccctagtccaatatctagtcatgttataacccaagctaacaaaggagcatggtaccaaaatagcatggctgtaacagtaggtaaacatcacatagtattattgtaaaacaatgcagtatttgaaggaaaacattagaacatttgcaatataggatcaacatgttcaagtgaccggcatgacttgccttgctctactgctggaggaacctcgacgactatctcgaagtacaccggagcgtcggaagagccggaatctaagtgacatacatagcaaacaatacaaacacgctataatactactgaaacagagaacaaaaccaattttaatggattctacatatttttcttgatttactaagacttgaatgggtttaaacggagctcggatgaattagttatgaattttagaagattcactgtgtttttactataaacagaaaaatccttaattgaattattgcgcaataaatgcccagggctgacgtcatcaaagggagcgggtggcgccgacatgcggggcccgcatgtcagcggcgcaaggggagagggagggggcgccggcacgtgggccccacgggtcagcggcacaaagcggccggtccaccgtggactggggccacgcgggtggtccaccgccggtccacgggaccgacggtccggatcggcctcgggccgatcggacggcgcagggagcagccgccgggcttggctcggcttcaaagccggccggccggccatggctagaggcggcggcgtgcatgaccaccggcggcgaccggcggcggcggacggcgcgaaggcggcggcgcacagccggagcagcggcgcggccaaaagcaatggcgcacgcgggaaggggaaggaaaggaagggggagggattcctcaccggaggggacggcggcgaccggcggcagaaaacgagggaggcggcgaagtccggcgatgccgaggtgcggacgagtgacggcgacacctaggggaggggaggacaggaattagcgcagaggaaaaaaccccacggtggccatccatgtcggccggagtcggaggggagaggggactcaccggcgacgcgagggaaatgtggtcttggtgggatttcggcaacgcaaggcggcggctgggaaagatcttgcggcggcgaagctagtggtgacggcggcttagcgcggcggcggctctagcgggggcagcacgtggccgtagtgcggtggcaagcggtggcgctggcggcgagcggcgcgagctcggtaggaagcacgggagggagcggcgagagcggaaagggaaagaggaggctcggggcagcgatttataggtgcgggatgggtggaaacggccgggaaagcctcctttttgacctgcgacgtggggtggagagagagataatggggggattcaaaatgcgaatcccgccccttgcgagcgcgcgcgcgggccgggagacgcgggggagacggcggcgacgtggggaggacgcggggacggcgcggcgtgggcgcggcaggagcggaggaggtgggtgcggcggtttcggcggcggttgccgacctggggcgggcggccggaggaaggggacgacctcgacaggtgggacccacctgtcggcgtcccggagagagagaggggcggcttgggccggcccacaaggaggaaaagagcgcgcgcagcggcgggcggactaggccgacggcccaagaagaggaaaaaggagggaaaagaaaaagaaaaggaagaaaggatttatcctgggatttaaaattgcatgtgctcaattttaattggttaaaattatttctagggctctcaaaattccactaaaaatcttgttagcaaatttcgacatgtagaactcaagaaaaattccacatgccaattccgattattatttgcattggtttattagggtttactcttgcttttacaccgatattttcttgggaccatttataaattcaatttaggcttgggaggagaacttcagggtgtgacaaacctacccccttaaacggaatctcggccccgagattcggaggagctggcgaagaggtgcggatgggcggccttcaactcatcttctctttcccaggttgcttcctcctctgaatggtggctccactaaacccggcaaaacctggtgaccttgtttctagtcctcctttcgctggtctcaaggatgcgaactggcttctccacgtaggtcagatcttcctggatatcgatgtgctctgaatcggcttgttcttcgggtaccctcaagcacttctttaattgggacacgtggaacacgtcatggataccgatcatattgaatggaagttctagctgataagcaacttctcctcttcgttccaagattttgtatggtcccacgaagcgtggtgccaacttgcctttggtttgaaaacggtgtactccccggagcggagtaacacgaaggtacacgtaatccccggcttcaaaagtgagctcccttcggcggttgtccgcgtagctcttctgtcgagactgggcaattcttagcctctctctgacggtcctgactttctcttccgcttccgttagcacttatgttccgaacagttgacgttcgcctgtttgatatcagaagagaggtgtgcggcacttccggccgtacaacgcttcgaacggtgccatttgaagactagcctggtagctgttgttgtaagagaactccgcatacggcaagcttttgtcccaagctccaccaaaatcaagtgcacaagcccttaacatgtcctccaatatttgattgactcgctcggtctgaccatcggtctgcggatggtaggctgtgctgaaattcaaccgggttcccaattcctcttgcaatttctgccagaactttgaagtgaattggctccctcgatcagatactatctttttgggtactccatgtagacacatgattcgcaagaggtagagctctgccaaccttttgcccgtataagtagtgtgcactgggatgaaatgagcgactttggtaagccgatccacaactacctatatcgaatcgtggccagatcatgtcctgggcagacctgttatgaaatccattccaatttcttcccatttccattccgggatctgaagaggttgtaatagtcctgcgggcctctgatgttctgttttaactcgctgacaaacatcgcagagcgtgacgaattcagctatttccctcctcatgctggcccaccaaaatttttatttgagatcttgatacatcttggtactacccggatgaatggagtattgagtctgatgagcctcggtgagtatcagatccttcagctctttgtcatcaggcatgtgcaatctttctcccatccagactgtgccatgttcatcctcaaggaagtcccgggcttttccgaccctcatattctttttcagttcagctatctcaagatccgtcacttgagctgctctgacttgatccacgagcgtaggccgtgcttctagagtggctacgaacctgtgttcaacgattcccacgttgagacgttcaagctcctgctgcaattcttcacacatgtcctcggtgcatagggcattgcagtagcttttcctgcttaaagcatctgccaccacattggctttacccggatggtagtgaatgctcatgtcataatctttgattagttccagccatcttcgttgtcggagatttagatccggttgggtgaagatgtatttcagactcttgtggtccgtatatacttcacagcggttgccaatcagatagtgcctccagatcttcaaagcatgtaccactgctgccaattccaggtcatgagttggataattcccttcatgtggacgcaactgccgcgaggcataagcgaccactctgccctcttgcattagaacacatccaagcccgtggcgagatgcgttgcaatagactcggaagtcttttgtctagtcgggcagaatcagaactacggcggatactaatttcttcttgagctcctcaaaactcttgtcacactcagctgtccatttaaacttctcatctttctaaagcaactgagtgatgggtcgggcgatcctggagaagttttcaatgaatcggcggtaataacccgcaagtccaagaaaactctgaatctgtgacacggtcttaggtggggtccatttggtaactgactccacattcgatggatcaactgccacgccttgagctgtaataacgtgacccagaaatttgacttccgacaaccagaagtcacacttgctgaacttggcatataactggtgctccttcaacttctcgagtacccgacagagatgttgctcatgttcttcttcggactttgaatagataagtatgtcgtcgatgaataccacaacaaacttgtccagaaattccatgaacactttgttcatcagattcatgaagaatgcgggtgcgttggtaagtccgaaagacataagcgtgcactcatacaacccataccgagtggtgaaggctttcttcggaatatcctcttcccgaattctcaactggtgatagcctgatcgcaggtctatcttagaaaacactttagctcttttcagctgatcaaacaaatcatcgatccgcggcaaaggatatttgttcttgattgtgacctcattgagtgcgcggtaatcgacacacattctcttcgtcttgtccttcttctccacaaaaatgaccggagcaccccaaggtgaaatacttggtcgaatgtaccctttctgcagctgctcatcaacctgcttcttgacctctgctagctcgttgactgccatcctgtacggtctcttgtaaattggagcggttcccggtgccaaatcaatccggaattcaatctctctcttgggtggcatggtagtgaggtcttcagtaaacacttctgggtactcgcagactatggggatatcttccaatttcctcgaactcttcccctcggtgaccactgggatttccacctcaatctgattcaaggagaccccttgctttggtgagactagtgatttgtgttggcaacattttgtgacaagtcgacaagcacaatcgcaacacctaaacgccttgcggtgacatggagtcgccaaccacctcgatctagccaaaggaccaaatcaagatgggttttgtagaaagaaaagctaaaccggctagcggagccgatttagagatcaaaatcagcctctaggccgatttagatcgatatgaggataactacccgtctcgtgggcaaaacggaagttttacaggacaaacctacaaagaggtgtcgcactctcgctgcggcggcggatggtttacagcgcaaaccgacaaagatggactaaactagggtaaaatagaaaacatagttaaaaaacgattcaagtagattgtattcgggggttttacaatgaaccggccttgtcccttatataggggttggtcttgccctctacaggccctccttcacgtccaattcgggatagaaaccaatggaaacacgaaacatgccttcctgagcaaggaaacccgagacccgacgaaaacagagtcggactcagaccctcacggtctgaccgcctacataactgcggtcagaccggccctactagccggtcagaccgcccacatacctatggtctgaccggccctagtgaaggaaacccgacactttccaaactttggcaatttttccctatttcgtccataggtgccaaatttgggtgtaaacacatgcccccctgcctttttggtgaacatacgtgaacctaaaagcatagaacatgttatctcagggcgataatccaattaccggccataggacttcctaagcatcttaccaaatgctcgggaagtatttcttcaagctatttcccattaattgctctttgaaaacaccgtcttgaagtgtcttcatctccttcaaagtctttaaacgcttgtcgatgacgtcttcaaaattgcttcccatcaaggtcttgtaatcgtcaaccgacaagtcgtcttgcttgaaataccgaagagagccaagatttacctcaactggcaaaacggcaattttaacaatgttttattactcgactcggcttatccattagcctgagcgtagtaaagagaagaactcaacaacttaatatcataagattcggcaaaacttctcacttccttggacataaaagaagctcctttaatgtttgaggaataccgaatctatgaacgatatgcttcaaaataaagccaattacctccgtagtaatattctcgagcggcacggcttcggctcacttagtgaagtaacccattgcaactagcacgaaccaatgcccttttgatgacgaaggataaatttgaccaatgaaatccaaagcccaaccttggaacggccatggtttgatgataatattcaatatagtgataggcgctaatttgaacattgtcgatccgttaacaagcttcactccctctatagcatttgaaacaatcatcaattattttcggccaatgaaactccactctcctaagcaaccaatttatcttacggccgattgatgaattccacgaattccttcatgtacctctcccatagccactttagattgatcttcatctaagcactttaacaagacaccatctatgtttcggcgatacaatatttgaacacttgccaccgaatctttcgatcaaccttaagtgtaggatcttttaaatatctaatcaaaggaattctccaagctatttctaactcatgggcacaaatgtccgaataattaattcggccttttaatcaattgtaacgtgccccccagcctcctgtctgggatcggtcagaccggacacgcaatgccggtcagaccaccctgtctgcccggtcagaccggccatgcagagccggttagaccgcgggtaccaccagtcagaccggccgtgcaatgccggtcagaccacccctgatctatgactttgccaacttcatccaaacttttgaaatcaagcatcggcctttagtatataatttttcttcacataatagccagatgcttagtgtatcaaattattggaccaaaattccttctctctatacatatgaaaaatcataacattcaactaatatgtctagatgaatactaattcaattggctgttgaaacaataatcatcatggcatcacaacacttagccaattgaagtatgatcaataatgaatcaccaaagtcatatgtgtcacatgcatagattccaataaactaaaaatgtaagtaatcggcttgagcatgtatgcaaaatattaacaatgccaatgttcctaaagaaaaccactctagagcaaaccatcacagtgaccattgatattagccgaattactagtaggcaaaactttcatggtgcaataaatatgaaatctatatcttatatggtgatccataaaaacacatatgatttggctttaaataaatatcaaagagtcatgagccaaatcatacctcaaacaaattatatgccatcctaccaattctacttcctagaactggcatttgcaacatgtatgtataatatcaatttgataagcaaaaacacacatgttctagatagcaagcaatattctaataacatggcataggcatataatataatggtaaacacaataaacccatatcttgccttagcatccaacaaacggcggctcaaagatatgatgtcgtatccatcgccgttcatcttctcttggttccttcacgagcatattaatgtcttgccccccaagcaaaatcggctttcttgattgcacgatttcgaaggcaagatgaataccgtactaacatccatagcatcatgtgaaggagacttatctctaatgaccgatgattcttctctcatcaaattggatttatcactactactatgggaaatcaccggtctcttaacttttacttctttagatctccacacttgcttaggtgtcgttcgaagctctaaattgttacatgttttgttctccacatctttggcctccttttctttttgacctatggcccgaagacgctgtagcctcctcttttgagagcgagataagccagaaggtatccacttcggctgtggttgttttccaggagctaaacaatgattcttgatattttttgtcgaagtggaagctcctatgttgctctcaattttcccactcttctccaatgccccccggtcagaccggcctctgagcccggtcagaccggccacaagccgtcggtcagaccggccggtaaggtcggttagaccggccatagactggcggttagaccggccagctgtctcggttagacccccaatgttggcagtcacggcatcagcttcaatctcctttgcctgcgtggtttccaccgcatctccagtaggtacatgaacctcttgagactcctctttggcagcaacgacctccggagctttggcttctttcctcacccacaccttcttcacctttttcatttttttcacctttgatccaccggaccgattctcttgtggaaaacagtcttgtcttgagttagatgaacgatttggcactgtcctaggtgattccttccactcctgataatgcggcataagtggttgatgcatccacggcacgtaatacataaaaggataaccaaacggtgacattggatatggataccatggcatcacaaccggaggtttatatggagttggtatggttgatggctccgattgctttaatgtttgactaaatctcttcctacgagatgatcttggtcttttcgaatcactagtttggttatcaaatcgttaaccggctaatcctttcttgtatttagccataagcatctcaaaagtgagcttcggctttttggtcttttgggaattagatgacccatcctttgcaactttatgatattcggcattcgcattttttatcctattcttgggccgaagatccccaataataacacttttccctttctttttgtctacatcaataggactaacagggagagaatcactaacaattccggtcttaggcatagatgtaaccgaaatagtttcacaagtgaccggtgaagtatcaatcggtctttgctccattaagcttgcatctttgaaataaccatgaaactcatgctccatttgtgaccatgtagaaattgaattaggagcaagtaaactataccatgtagatgcaaagtttgacaaagaaagaggaaacaactttaacttaagcaaatcatcattaccggccttaccacattgatcaataaattggccgatatgctccattgttgttctagcatcctcacctgtgaattttgtgaagttgggcaccttaaatccttgcgggtatgggaccgaatctacgtgttcaggatacgatctttgatatgtatgcatagttactttggattctatctcactactatcctgcaagacattgtcactatcttttccaacatctacatgaccgatttgtaattcggtcttaggtgacaatgctatttcacttgagcttgtaatacaatccgaaccgtcatttagttcggctatatcttcgatggcattattctctaagctagcaacacaatccgaaccattacttggttcggctattccatcattgtctaaactagtgacacaatccaaaccaacacttggttcggctatattgattattgcgttatcatccaaactagtaagacagtccggaccaacatttgattcggctatacttgtcacggcatcattgcacaaattattaacacaatccgaattatcgctaggttcggctatacatgttattgcactatcatctaaactagcatttaagctattgtcatccactcggctttcctgagtcagagcttcatgcaacacatgatcaatatcaagaaatatctggccattcaatttctctttaatagaatcaagcaatccatcatatgaaatgttggccaaatctttgtcagttattttcaaactaaaacatcggcttttaatttctctaaacctttcaatataatcaacgacagattcattgtatttttgcctaaccgatgttatatcagacaacctatgctcagttttaccagtgcaaaaatgatcatgaaattgttcttctaattgagcccaagtatgaatagaatttgccggtaaagaagtaaaccatgtaaaagcattaccggataaagataaagaaaacaagcgcaatttaaaagtatcactattagcctcaccacattgcgctaaaaattgacctacatgctcccatgtggtcttaccatcctcaccactaaatttggcaaattcgggaactctataatttctaggaaacggcacattatcataataatcaggatatggctttttgtaagctctagcacgattcctagtttcaatcccgaatctatttctcataatatcactaatcacattctctatgttattaggcccttgtggatttggtggtgggtttggtagcctaataggctgggtttgtggcgcaatatgattatattggccttgcctagtatcgggaggatatcccctagaaacatcattataagcattaggaatatgtgggggaacttgaggattaatagtagcagtagatacaggaggatcaaatgttctaaagtggtacaaataactagcgttagtcgttggatctataccctgaatcgggacaattgcaccggtctgaccggcccagggcccggtctgaccagcgtcctgttgcgcggtcggaccggcctgagagccggtctgaccggccgtctggccggtcggaccgacggctatgttatggtctgaccggccgtcaggcccggtcggaccgaccgtgaataccgtcgcgtcggttttactacccatcggatctataggagattgatcaacagtggtataggctttatcctttaatgtgtaatcatccataaaagcacctagcctactccttaaaaacccatcaaccttctccttaaacattaaatctaatctatctttaaaattagccatagatgaatcttttgtagatgcaatttgttcgttgatagattgcgatacctcgtcattacttaccacgtcgggagcgagcataggacgtggcccgggcttgatgatcacaacttgatgagtcctagtagttaatctcatcaacgcctcccgtgtgagctcgttgatgtactcctccacagctttacgatcctctccttcgaagtcatccaatgtgaccggcatcacattagatggctccacctccgttctggatgatggcttcgtcatggcgaagtcgaagtcgagttgacgatgaacggatctcgtccccagcggagtcgccaaaaatcatgttggcacctttttgtgacaagtcgacaagcacgatcgcaacacctaaacgccttgcggtgatatggagtcgccaaccacctcgatctagccaaagagccaaatcaagatgggttttgtataaagaaaagctaaaccggctagtggagccgatttagagatcaaaatcagcctctaggccgatttagatcgatatgaggataactacccgtctcgtgggtaaaacggaaggttttcaggagaaacctacaaagaggtgtcgcactctcgcagcggcggcagactgtttacagcgcaaaccgacaaagatggactaaactagggtaaaatagaaaacatagtaaaagaacgattcaagtagattgtatgtcacgaccggaaataacccaacgggcgttccttacgtgagtgcattattccttgtcccaggaggcaaggtacaccaaaagttgatacagatcagagttcaacaagcggaagcgtaaatagttaatttattacatgggcagcgaaggcccagcacacacaaagacaaacgagaaacagcggaagactagggcgacgaccacaggcgtttgacggcaggcacgagctagacaccaaaaccttcatcttccagagactcctcttctgggtttgggaaaaaaattgagcaagactgagtacaaccaccgtactcaacaagacacacccacaagtgcataataaatgcaagggagtacaagggagttataatataaagggttagggttgcagtaaacagcatttaaagatacttagttgctcaaagctattttgtaaacacgattctagaactatacaatattatttatcaaggccgtgaacccacacgaacctgccttaacccaaggcctacgatgattcagaccgaaccggcaacccgaccctgggtcccagctcgtcccaagccaacccaggccaaccattccacattttagttgttaagcaggttttaagaattaaaacactaacttgggtacattgctcggcttgcccataaccgagggcgcggctattcgaatagattatactctgatcagaggtgtacatctttacccacaagacacatcttcctcacatgcaaccacgtgccacataccaccacggtatacagacggaagacgtgacatagtttccaacccatcctagccatagacaagagtaccgacccaatcccacctacggccggaacccccgggacaggtaggcaggactgagcccctagcagcaggacaccgaccctgtgccatgacatctcgactaccgggccgcagctcgtgtagccttcatttgccctggagatgtccatcgacccccgacttcgtccatctccatccgtgtacttttgtttataaccagactgagccacaaactaagccttacccactagacatgtgaaagtacggtagtgctttgcaacagaggcccgaagaccggtccttatttggccgaggtgctactatcaaaaccatgcaccccgagcccagcctaaaaccatttttggggattttgaatagagggggcggtgtgaatccaattccacaatactccaacaattccaaagtgtccaggtgatatgaatatcccaaagtctagagttgtaaaaccgcctaatgttacctaattaaatagcgaagcatctacctaaaatcatactagtggtaccatgagtagagtgtccactagctggggttttgtttattctagggtgaacaaggaaataataacaataacaataataaggtcataacaaaggtaaataggcatggctagataaaacagtgataacgcgggaatttaaataaagcgataatgcaataattttaaagcaacataattttataaactgggattcaatatgttcaaggatgatgtgacttgccttgctcgctttcccaaacgccggcttcaacttccacgaagagcggatcttccaaagctgcagcgtctacacgatcaacggaaaagaaaaggcttttactctaataaactccatataacaagcagaaacaaagcacaaaaatgggttcttggcttcttaaggaaaaattagagacttgaacggtccaattccgagttcaaatggccaagttatggccatttgaagtttatatgctctttaaatggatatttatgaatttcttcatttaaattttaatttaaaatcggatttattgcgtcagccgaggggaggggcgcgcggaccgggtccacgggagtggggcccacgcggcagcctcacggtccacggtggaccgggtgcacgcggcttacgccggccggcgccgtgggtcccacgcgtcagccgcacccgagggcgcgggcggctgacggccgggccccacatggcagccgcggggcgcgcccgaaggcggccacgccggcacagccgacgggaggcggcgcacccgcgccccgatggtcgccgccggcgaccaccggagcggcggagcggcgcccgagagaggggagggaaggggaaagtgaaacggcggtccacggctcaccccgggtcgacggcgacgacgggaacggcgaccggagcggaggaaggcggcggcgcggctcgggtcgacgaggacggcggagttccggcggtcggcgggcgaaacggaggggtggacgaggtcggcgaggttgcggtgaacccgaagaaggcgacgccgaaacgggagagggtccggggcaacgacggcggcggaccggagctcggcggcgacggcagagagagagaacgacggcgcgagctcgattccgaaggggacagagagcggcgagtggcggaaacggtggagggaggcacggggagtgtttatatagtgttgggagggggagagaacggccggatgagggggaatcggccgcggaaggtccggccgccattgatgcgccggcgaagttagggggaaactttccgaacgaatccgagggagagagagagggaaaagtggggggaaagagggagggaatcacggggagtgatttccctctctttattgcgcgcggggacggcgggaggcggcgggattcgcggcggcggcggcgctagggcacgggcgaggcggcgggagcagcgggaggaaggggatgacgggtgggccccacccgtcagcgagggtggcgggcgggcccgcccgtcagcggcacgcgcgcgcggggagggggccgattgggccgcgggggagaggagagagagggagggaggtgggccgagccggcccaagagggagagggggagggaaaagaaactttttagggtttttctttttataaaacctttttaactttgtttatttcttcttaattattatttgtgctctgaaaattccactaaaatttatttacgcattttaggcttttaggaaatatacaaaaatcctccaagccttattcgacttttaactttgcacattttaattgttggaggctttcacatggattttacttattctatgcacaattttgaggatgtattttagagtcgttttgggacacgacagtactaagctcttcttttcttaacccatgcatccccacaaatttctttgaaatgaaagaatgcgttgcaccagaatcaaaaagtactattgcagggattgagttaacaggaaacgtacccagtacgacctctggtgctgcttgcgcctcctctgcggacgcgtggttgacacgagcctggacaaaccttagcccggcacgccttggcttcgggcatttgtcagcgaagtggccaagctcgccatagttgaagcaggaccctggctttgtcccagcctccatcttggcttgagcggatggaactgactgtgctggtgccattggtgggcgcggagctgcactgaggttgggctgacctccctggtggttctggctgccactggcgccctggtggaagctgcttgagttgaaagggcggtgctggaggacgatcatggtggtaggtccaccttgctgtccgggagtgaagcgcggttgctggtggctcccttggttggaccggaactgcgccgcctttctcttcctgtccattttgttgcgctgatcctcctgacggattgccttgtcaaccagcctctcaaagtcggcgtagtctccagagattaactggttggtcagctcgtcatccaggcctcctaggaacttctcctgcttctctgcgtcagtgcggacatcctctggtgcatatcgcgctaggcgattgaactcatggagatactcagtcactgtcctgttgccctggtggagtgcccggaattccctcttcttctgtgccacgaccgcgtctggcacctgcgcctttctgaagctgcgacagaactccgcccaagtgacttcagtgcctggcgggcgggtggccatgtgattgtcccaccaagctgacgcggaaccctggagctggtgtgtggcaaaggcgaccttctcctgatcattgcactgcaggagatttagtttcttctctatggcatggagccagtcattcgcctccatggggttggtggtgcaagagaaggtgggtggcctgacgcgtagaaactccggcaacttggactgagggggagggggaccaaactgctgctgctgttgctcgtcttgctgctgcatcctctggtgcatctgctggtgctgctgctgcatcatggctgccatcatctgagtctgatgagccattacttgggccagagtcggattctcggggagtggtggcggaccattgctggaatcgctgttgggatgcacaccgtcagtgcgttctttgccgttgctgccctcgcctgttgtgcggctaccattcctggtgtagaccatctggaggaagagcagacgggggggtagaaaagaagaaaaacagatgctcaggaactaagctttattatataggaatttaaactgcaattgttctgatctgaattaaaacacttaaaacagcaagcaaaatccttattaagacagccatatcataggcacatgatatcgaccgtcgactgacccacaagcgagcagacctaaacacacaaactaacaggcaaatactaaacagtcgataaactaatggaaagcgagcctaatgctcggaacggctcctgcggtcggtggagtcgaaggcgtcctcctgcttgtcaccaggtccctctgagcggctcctggagtctggcagatacgtctcgccgctgcccggctctgagccactggaactgctgctgctgtggtcgcggctgccactgggagtggcaggcaaccaaccgccgttgccactggctgggcccctgacggctgatgctggagcgaaggagagagcggacacgggagctgacactggaacatgagctgggactggctctggagctgcaggagctgcggcaactgtggggcagaactggaggagctgcgggagctgcaggcggaggtgggttcctgggcgcaagttgaatgcacacgggtgccgtcgtcgacttgccgggcgtggtgcggatcaggactcctcttggcgcggggagacccttcaactgagcattctccttcttcaggcgtgctatctcatccttcagagctatgatcctcacgagcttcccaccattcaaggccttagacgccttgtgcagatccgagtgcatcctgtccattcccctcatcacggtgcacatgtggccgaaggtggtgtcgttctcaccagctatcgggcggaaggtgctgatatcatcgccacttgctcgacgagggtggaagcggtacaccgtgttgcagaagatgtagttgtgctgatcacgaagcctggccatcagcagatatgctgcctcctgacaggcgtgatctgctgtgcctccggatgcctcaaccacaatgttagcgaggcaggtacccacatagccatggacctccaggcgaacacggtgaggaagctcgccactgagcggtggaacagtcgagtactctggcacgttggggtagcccaccaccagtgtcatgcgagccaattctgccacaaaatcatccatgccttctccgcggtggttgggtgggtgctcggccatctagagaagacaaaggggtaggatcaatgcatgctcaaatccaattttaaataaagcagtaaaggactcaaataagagaagcgaataagagcggaattttatgcatagatcatttgcatgagagcgaataaataagacagacttacatagcgataaaatagtgagaaaattaggtacatactaataataacaataaaagcataaacaccttgcaacccatattcctgagctaggacctaatgcataccacccatcaaatcccgactaactgtcgaatatatctcaaataattttactaaaaccctagacttacttgtttcgacaaatctcacttaaacgagcgaccaagatttttcccttgaaccacaagaacagatcccaatttctcacggaacaaatccaattgcaaagaacatatgcaatgaaaaggattcagagggctcttaggttttccatttggcttgtcctacggtcaaggtcggctctgataccaacttgtcacgcccagaaattcccgaatagaattccaagcagaatgtgcattaaaatccccgtccaggaccggccggggtacacaaacgacaaagttgacatacagatccacgtcttacaaacattataaaagtcttacataaatacagcggaaaaacaaaagataactggagctaagccttgacttgaactgcagcgggaacaccactccacaggcatcctcgatggcacggacgaagcctactcctcggagaaaccaccatctgacgcatactcaaactctggggtttggggaaaatagagcaagactgagtactacccactgtactcagcaagtcataccggaatagggctatgatgcagggaattatcaagggatagctataatggttcatttgcataaaacgggcatttataaacagaagttgaaagcagtaaagcagttgtaacaattaatcaatattaatcatccactgtccaacgctataccatgttgcaacaggcccaaccatccacctatactatccaatttcatcagactaaactagggtgagactaatcacggtgaatctggttgaccgcccataaccgtgggcacggctattcgaatagttttactctgattagaggtgtacaactgtacccacaagacacagccccacgacacgttttcgtgcgccggcatgccaccacgacataccggaaagaggccgtgacaggacccttcgcataaccccctctaaccaagcacaccacacctcaggtatcacccccactcctcgcaaggcagcgggcagtcccctctcgtgcctagatgaatccggaagccgcataggccgtcgcaggacccatccaaactccatcacggccacccttgcctagatgcgtcagctagaggaaagctacactacaagcccagcagttgcccacactagcttgtggtaagtacgataagttcttccagggcatcctgtgaaccggtccttaactgccatgggcgcgaccaacaaaatcatgcacccacagcccaccatgtgatttattttaattaaccaacaccgaagcggtggcactaatccaacattaccattagaacctacagtctatacattaataggattttcccctttgtgtgctagttgaactaagcatggctaagcaatccctagtccaatatctagtcatgttataacccaagctaacaaaggagcatggtaccaaaatagcatggctgtaacagtaggtaaacatcccatagtattattgtaaaacaatgcagtatttgaaggaaaacattagaacatttgcaatataggatcaacatgttcaagtgacaggcatgacttgccttgctctgctgctggaggaacctcggtgactatctcgaagtacaccggagcgttggaagagctggaatctaagcgacatacaaagcaaacaatacaaacaggctataagactactgaaacagagaacaaaaccatttttaatggattctacacatttttcttgatttactgagacttgaatgggcttaaacggagctcggatgaattagttatgaattttagaagattcactgtgtttttacaataaacagaaaaatccttaattgaattattgcacaataaatgcctagggctgacgtcatcaaagggagcgggcggcgccgacatgcttggcccgcatgtcagcggcgcaaggggagagggagggggcgccggcacgtgggccccacgggtcagcggcacaaagcggccggtccaccgtggaccgggaccacgcgggtggtccaccgccggtccacgggaccgatggtccggatcggcctcgggccgatcggacggcgcggggagcagccgccgggttcggctcggcttcaaagccggccggccggccatggctagaggcggcggcgtgcacgaccaccggcggcgaccggtggcggcggacggcgcaaaggcggcagcgcacagctggagcaacggcgcggccaaaagcgacggcgcacgcgggaaggggaaggaaaggaagggggagggagtcctcaccagagagggcggcggcgaccggcggcggaaaacgagggaggcggcgaagtccggcgatgccgaggtgcggacgagcgacggcgacacctaggggaggggaggagaggaattagggcggaggaaaaaaccccacggcggccgtccatgttggctggagttgaaggggagaggggactcaccggcgacgcgagggaaatggggtctcggtgggattccggtgacgcaaggcggcggttgggaaagatcttgtggcggcgaagctagtggtggcggcggcttagcgcggcggtggcacgcggctggagtgcggtggcaagcggcggcgctggcggagagcggcgcgagctcggtaggaagcacgggagggagcggcgagagcggaaagggaaagaggaggctcgggggagcgatttataggtgcgggacgggtggaaacggccgggaaagcctcctatttgaccggcgacgtggggtggagagagagataatggggggattcaaaatgcgaatcccgccccttgcgagcgcgcgcgggccgggagacgcgggggagagggcggcgacgtgggaaggacgcgggggcggcgcggcgtgggcgcgggaggagcggaggaggtgggcgcggcggtttcggcggcggttgccgacgtcgggcgggcggccgggggaaggggacgaccccgactggtgggacccacctgtcggcgtcccggagagagagggaggggcggcttgggccggcccacaaggaggaaaagggcgcgcgcggcggcgggcggactgggccgacggcccaagaagaggaaaaaggagggaaaagaaaaagaaaaggaagaaaggatttttcctggatttaaaattgcatgtgctcaattttaattggttaaaattatttctagggctctcaaaattccactaaaaatcttgttagcaaatttcgacatgtagaactcaagaaaaattctaatgccaattccgattattatttgcattggtttattagggtttactcttgcttttacaccgatattttcttgggaccatttataaattcaatttaggcttaggaggagaacttcagggtgtgacatacgggcacctcaacttcgacgctctccgctcactggcgagccgcggcatggtgcgcggcattcccactctggagcgggttaccaaggtctgcgacggctgcctaataagcaagcagcgacgagcgccgttcccaacggcggcattgcatcgcgccactatccatcttgatctggtgcacggggacatctgtggacccatcacatcgtcgacacatggcagtaaaaaatacttcctacttctgattgatgatctaactcgctacatgtggttgtttctgttaacatcaaaaagcgaggctcccgctaccatcaagcggttcaaggcaggagtggaggtggagaccggctgcaagctgcgcgttctccacactgatcgaggaggggaattcacctctgtcgagttcgggctatactgcacgaacgaaggcgtcgccaggcagctaacgacgccatactctccacagcaaaacagcgtcatcgagcaccgcaaccaaacggttgtggccatggccagatgcatgatgaaggccaagaacatgccgggggagttctagggcgaggcggtcaccactgccgtctacatcctcaaccgggcgccgacaaagagcgtccgcgacaagacaccgttcgagtcatggcacggtcaaacacctgttgtgcactactttcacacatttggctgcgtcgtctacgtcaaggaggtgaaaccacacatcaagaacttgatgatcggagcaaggtgatggtctttctcggctacgagccgggttcaaaggcatatcgtatatacgacccggtggccaagcgcatcgtcgtgagccgtgacgccgtgttcgatgaggcggcatcatggccatgggcgtcacccggggaggaggacgggggaacgtctcctcaggaaaccttcaccgtgcgctacgaggtagtggcggtggacgtgccgtcccgccactccgactccatgtcgtcgccggctcacatgggaacaccagtgccatcaatctctgcgtcaccgggtgtcctagcggtggagtttgtgtcgctgcctgcggaaacacctgatgtcgacgacgacagcacagggccacgtcgtttttggatggtggccaaaatccttgacactacctcgccaattgagctcgactccgacgagcttcatgtggctgctgccgaggaaccaagcaaccacgctgaggcggcacaggacgcactctggatgcgagcgatgcaggagtaactcaagtccatcgaggagaacaacacgtggactctcgctgatctccctgctgacaagcgtcccattggcctgaaatgggtgttcaagctcaagaaggacgagacgggcgcaattgtcaagcacaaggcccgcctggtcgctaagggttacgttcagcggcaggggattgatttcgacgaagtattcgcccctgtcgccagaatggaatccgtgcggctgctactcgccattgcagctcaccttgggtcgtctgtgcatcacatgaatgtgaagtcagccttcctgaacggagagctagaggaggaggtgtacgtcgcccagccactaggcttcatcgacgacaagcacccacatcaagtcctgcgcctaaacagagcactttatggtctgcgtcaagctcctcgtgcctggaacgcgaagctggatgttagtcttcatgaactcgggttcacacggggcatcacagaacatgctgtgtacacgcgcgggaccgggaacgcgcggctaattatcggcatatacgtcgacgatctcatcatcaccggcgctcactctaaaacaattcagagtttcaaggaggagatgcactccctattccggatgagtgatcttggattactcagctactacctcggcatcgaggttcatcaaggcaacgatgggatcacaataaaccaatccacttatgcgcagaagcttttgaagatgggtggcctggcggcttcagcttccgttccaatggaacccagattgaaactgacgaagaacagcgatcgaccaagtgttgattcaaccttttatcgcggcttagtggggagtttgcggtacctggtgcattcacggccagacattgctttcgcggtgggttacgtcagccgattcatggagtcaccgcgcaatgatcatctcacggcggtgaagcacattctgcgctatgttgcaggtactatgaactatggttgcaaatttgtaaattcaggagaagagggaatccatttgctaggattttctgacagtgatttggggggagatgcgcacgatcggaagagtacctgtggtgctctcttcttcctcggctcaagcccgattgtatggcagtcccagaagcagaaagtggtcgctctttcctccagtaaagctgaatatatcgccgccactggagcagcgtgtctcggcatatggctggctcgattgctagctgaggtgctgggaagtgatccagggaaggctctcctcaaggtcgacaacaagtcggcgatctccctgtgcaagaatccggttttccatgaccggagtaaacacatcgatacaaggtaccactttatcaggcaatgcattgaggagaaaaagttgaggtggagttcgttccttcggacgaataggttgccgacattctcacgaagccactcggacgaatcaagtttcaagagtttcgcagtcaggcgggcgtcgtgcatattgtcacccggcgacaggattagggggagtttgttagcttcagctataatcctgtgccgtattatcggttactgtaacgcgtctagtgttgctgtttcttcagtttcgttagactctgtttcggcgtctgtttctctgtttctttttcctgtaagccgagtcttccgggtcgtgtgtcgtgtgcgagtcatccggatttcagcatcgtggtcgcatcgtcgtggatgatggcgtagtggtgtcagtttgagtctgtacatatttgctatatatatgagcatcagaaaacgtcgctggtttgttcgcgacaccaaaaactctattcgtgttcatcgtctttccaattcagagaattcgcgtgagagagagatagtgaggattcacaatcttgggctttgctatcaatttcgacgaagaagcagaaaagaagcatgtgcaacgaggggccacgaccacgacacaagatggaaaaatggatcaagctcatcaggaatgtttaacttttggtattgaagagagaaactgatggagcagaagaagaagaagaagaagaagaagaagaagggatcagtgaggagattggaagagacgttgctgcttaatttcatgcagcaggagaaacgttccttcattgcagaccaaacagaaacgacgtcgccgtgtccctgccgtggcgaggatggcggcatgggctggcctggaaccagggacaggtagcgtgtgctgctgggtgcaaagaagagaaagagagatcgatagagagagagagatacagaaaaattgaacttggaggcatcgggaacaacaagaaaagcaaaaaagaaaagaaaataataaaaagagaggaaaaaggtaaggagaaatgaggaacaagaaggataatagggttctcaatctagaaaaattcctcaagaatcccaatcctgtaaattatttggatttgttcaggagttttttggatagagaataattcacataattgagctccacttccaaacttaaataaaaatcaaataactccaattaatgaacgataaaataaaatgtataattagtttatttagtcaaattaaacactttttaattttcagaattttcattaagccatttcagacgaataaacacgaatgtgaatttttgaaattaggcaaattaagaaatacgaaaaatgggacgtaacacggcagcttccactcaggatgggaatggttaagtttggcccatttaaccactgaacctatccacaaatatgttttattgggcctttaggttgattcaaaactctaaatggggcaaatggtttgaacccttgaaacctaggaaacatcggattgatccagaccaccatcaacatcttgttctcgaggacctcgggtcctccttggcatggcggcagcgctccagcaccgtcttgttctcaagtcctcatcctccttggcgtggcggtgacgctccggcgacaagtaggtagtgctagtcctcaagagcgatggggaagaaagggaagtgggagagagaggaggaagaagagttgatcgttgacatgtgggatccatatgggtctcactcgtcacgctagcttgaattagacactataatgtcttgggacctcgagtataccggttttgcaagataaaaatgcattatatatggtactgcggtcgaaggacgtaattcaaacttggcgtcaagataaaggaccacaagtgaacttagtccactcagtaaataagcatgcatagcatacgctgggccaaaccggggcaaccatccatctgatcagtaagcatgcaatattggctactgggccgggcccaaaaaactcatcctattaattagtagtaatatatttcgatcaattttgctatatatttgtcgacaaattttctcgaaaaatttgacagatgtaattacagtacaatcacagtgtaattacactgtaacttgcatgtaattacactgtaactatagtgtaacttgtatgtaactttcaaaaatctctctgtaatatgttatttcggtaaaatagaggttgtgggaacaaatccttacacatatatatgcgctgtgatttttttcttcctcaccaaaacaaatcttgtaatagatttaactgttcaaaattacatgaaacttatatacaagtaacattgtagttacatgcaagctacaatgtaaatacatataagttacagtgtaattacactacgattgtaatataattacatttgttaaatttttaggagaaaatttgtcgacaaatgttactaagaaaatctgactaaagtgctccactaataataaaaaaataataaaatttattggtagttaggtaagtggtgttgaaaacgggagtacaagttttaactcagctagctagacagctaggccaagagaaacctaactggtggtatttctataattatattccctctatccataatagttgcacgtattatgtttctaatttttccaaatactaagttgaacttattagtagtgttagtagttaacaggatggccatagtcgggttaatccattttgtagctcgagggggtcgtcggcgtccggctcctagcttcatcctggttgcttctaccatggatgtcctcgtgggcttctctacgttgatggctccctatcaatcattttccaggttcaccatcaatgcctgaagctaagagcgcggcgagtttgttcaaaacaaggcagcgccggagtttgtttcttctctagttctccgcgagttttttttctgcatccgcggtgatcttcttcctcctctccagcgacaattttacaaggtacaggtgaaatgtttctccgtttgccttaggtgtttcaacctccatcttagtgaggctccttttgggttcgcacctaggcatcactatatgcagctagccatggcttctctgctcctattgtcgtccagtgtgtgtcgatccggccatattgttgtggacaaggcaaagagaaggacccgattgcttttcctgtttctttttaggtccttctttccatattgcagggttaaagtgtaattttcccatctgtcagggacctctctgttgtaagacttgctgtactctcagcttatctatctatcttctatctattatatactaaaagtctattaaacttcctacaaacgctctcaagacgccacatgggattcctacaaacgctcctaaatcgccacgtggcaatctaataaattggtggacccattatttcttactatttaatttatcaaatctatcttaacaaaaaaaaacataacccacctccctatctttcctgcccggcccacaccttccaatgtgtaccgtacgacgtacgtaaggtacttacatgcctcctccctcccctcctgctctcccccttcttctttttctttagttattaaaatattaaaaaattaataaatttaaaataaccataatttataaaaaatgtggttaatttttaattacacataaaactttttattcttccgtattattctatccattgtggtccattaacgattcaaaaggcaatataatctgtaatttaacttgtaagaaatatttagtttttatcatatccatgctattaaaattattatataaaatagaaaaacatgataatgtatcatttcacaaaacatgcataaataaattagatctactatacgaaaaaataaaaaacttatccatcacatggtattctaataaattagagaaaaattctgaaaaaaaatatataaccatcagttttcatttaaaatggtggacccgataatattaaccattagataaaaaataaatctccttcacccttccctcctagccggtactaaaagtccattaaatttcctacaaacactcttaagctattatgtggctttctacgaacgctcatac

SEQ ID NO: 7562 - DNA, 22179 bp, Oryza sativa
ctgctctttgccgttgcagcagagggggcggcaacggtgggctcgcggcactgctgctcctactcctcactgttgcgtaagagaggaggaggcgacgaggggagtatttggccagctattggcaagtggctgtggctaaccaaatttagccagccgggaggaatatttgtgttggcaacttttttgacaagtcgacaagcacgatcgcaacacctaaacgccttgcggtgatatggagtcgccaaccacctcgatctagccaaagggccaaatcaagatgggttttgcaaaaagaaaagctaaaccagctagcggagccgatttagagatcaaaatcagcctctaggccgatttagattgatatgaggataactacccgtctcgtgggcacaacggaaggttttcaggacaaacctacaaagaggtaccgcactctcgtagcggcggcagacggtttacggcgcaaaccgacaaagatggactaaaactaaggtaaaatagaaaacatagtaaaagaacgattcaaatagattgtattcgggggttttacaatggaccggccttgtcccttaaataggggttggtcttgctctctacaggcccttctctacatccaactcgggatagaaaccaaagaaaacacaaaacctgccttcccgagtaaggaaacccgtcactttccaaactttaacaattttcccctatttcgtccataggtgccaaatttaggtgtaaacaatttggtcagccatatagtctagctagctggatggagatgttgttgaaggctaattttttccttcgctagataaaatttggcttggagagccccttaggaaatgctcttataaatattatgcacgtgctaactaacttaggcgtcaacgtcaacgtgcacgttgattttctagtatatagtctggttgaaaactgagttggtatagctagagataaaaatgcaaatgagtatgacaattttcaatcgaagttgcgtgtcaattatttatttttgggtcggacgttcccgggacaaaggaagagtcaaactgcaaattaagctggaatttacaaagacacgatggtacatttattgaatcacacaatggcgggcgtacgacgacgaccgattcatgttgaccgaccctgccggtcgtgaggtgaccaaattaagaaccgatggattatccggtcccacgaaacagtgacttgagcttcctgatctccaggtcgtccagcacggtgaccttgctcaggacatcggttgggaggttgttggcgaagagcgcgaagtccatgatctgcaggccggggttggagctgctgtagaaggagaccgccatggccgccgtcgcgttgttgccgtcgccgccgccaccgttgtcgttgatctggaagtgcaggaggccctgcgggaacaccatgaggtcgcccttgcggagcgtgctggtgtacaccttgttggatgtagagctgatgaatccggcggacagggtcccctcaacgacgtagatgagctcggtgccgctcgggtgggagtgcagcggcacgatgccgccgggggagaagtcgacacgtgcggcggagatgtcgagcccgttcacgccgggaaacctggtttgcactttcgatttcggtcaaaaatttcggtaacattttgaattttacaaaattttagtacttttaactaaatcttaacaaattttgatcaatttaaaaaaactaaaaaattccgatgagataatcattaggatagggggaggagccaggtgtcctaatttacgataatttcgagccgaaattgtaatcatttacctagtggagaaggccgaggacagggcgatgttgaaggggttgacggtcgggccggtggtgactaggccgcggtagcagaagtcttcggcggtgacggtggcctcgggcttgcacgggtagccggccggcgtgtcgccgcgggccaggtcgccgacgcagaagtcctggttcagggccagggagccggaggacatgatcagggagagcaagggcaggagcagcagcatggcgttgcccatggtttgtgacttgtgagcatgcaatgccattgtacgcagtgtctagtgtcgtacttataagagagtgcaaagtaccgacggatgaccgtctaaaccagtactccctccgttctattttaaacgtagtcatgagtttacgtattcaattttgattgtccgtcttatataatttttttttaaaaaaataaaaaatagaagccatgcataaattactattcatatttttatcatctaataacaataaaaatactaatcataaaaaaattaaataaaacgaactattaaagttggacacgaaaactcatgacggcttaaatgggacaatgggacagagatgactacgtttaaaatgggatggatgtggtagcttagtagtccaattcatcacacacgtacaattctatatacaaataagtttcatgtactgaactacatatttaatccaacttgaaattgattaagtgatcctctagcttcttggagaagtcaacaaacagggtaggtaaacgactaatccaatttgaaaatgatttagtgacgtagtactctatctttctctggcgaagttaacactgctaaaaaaacatttttgtaagccgtcgataactcgtatccgcatgtgttcttcgaaccacctgcgactaagggatggcgcgcagaaatcgagattttcttgcacatgcgcatttccatggaaaatatcaaatatagacaaaccctataatcagttgtattatattgtattgcattgactacagagagaagataaaaactggtgtaaaatatatgctagaatagatttatctctatgattataccttgtatccatggttcgtgtttgactctaactctaactacacatatatgcacttttaacgatctccttctattgtaatgggagcgaagagaacgaatatgtttccatgagaattctatatgcaaataagtttggcaacatttattataggacattaaaaaacgtgtaatcagcttgaagacattgcaagaacacatatctgttgtgggacatcgtaaaaaactggtagttagctactgagcacatgcaatattattttattataactagagcaaatgaagagagaaatagtcatgaaagtatgattttgcccttatttgccatgtgtgtctcgcatatagcactgacgtcgtggtggccaagacatgaaccaggaggtggtccacgttgcgctcgcctgcaagtgtggtgtgtggcagagcatgagcgccaacgtggccctcgcgctgaagtagcgacgagtgtgggaatgatgcgtagtccgtgcctaggtgtgcatactccctcccccccctcccccacacctgaaacaccagagagtcgcctagccggcgacggcgactgggggtgcagttgctatatgcgagtagggcttggcaggcaaggataaaatcatacttttgtaactgtttctctctcatttttcttagatattataaaataatgtcatgggtgtccagcaggctaattaccagttttttcggtgtcccacagcatgtacgcgttcttgcggtgtacctcagctaattatatattttttggatgtctcatagcaaattttgccaataagcttcatcacacatatacaattctatatgcatataagtttgatgtactgaacaacttatataatccaactagaaatttattaagtgatcctctagattcctggggaagttaacaagctaccttagtgttccatggaatcgtgattgttcccttcaggggcaggcccaggattttaagattgggtattcgaaatggaaagggggtaaaaaaatttttttacaacatgagcacaatatttggtacgtataatcaacaatatggcgacaaaactcgatccggtttctgaacgaacacgctacttagccccgcaaatcgcagcaccacgtctcatctggttatcaaccgtgccgaaacccggttaatctcgccgagaaggctaatccctacatgcgaatcgaagaacacaagcaagaacgagatagattgcaacacaattgcatatgaatgattaagcactcgaatttggggttccacaaaccgatctagcggcgatactattcttgacagattaatctaagcaaaaaccgacttaaaacgatgacgactactgaacaaatataattagggatgtcctagggttgccctagggcgcacacccccttgggctaagtccatgacacaattacaaggcccaaaacccaaatcagattcggactggatgaaatacgtggcttattttgcagattcccggcagctcggtaggaattttaacacgggaccaaaaccatatgaaagtagactccataagctttctaacaagtactcataggcaccgaaaatccttctagatcagcggttaggtccatttgaagttgatgctatcaggaggcccgaatccgaatgcaaaacgtgtaaaactttatctcttgtcttctatagaccaaaagtgacatggtgagatggaagtagacttggagaaggtcttagtttggtccccaatcaacttctttgatcatccatgcattcgttacgctcggtctcttttccttcaccaaagcaagtatctctgtaaacaaaaaaaacacacgaaactcattgtgtagcaatgtttgttcaaatatataacaagtaaatccaatatagaacatatgcacatttggttgagtaatacataagatagtcaaggttatatccgagctagttgtgtcctcatcatgaaggacgaaaatcggatttggtgtaaagttaagggacctcaaatgaatttattccacatataaatgcagaaaaaaaagcccaaggcctagcggcatagtctgactcaccagcacacaaatccatcgggcatgcacgtgcgcttgtagggtacttcactagttttctctgtttctcatctccagtctcgtactttcctgttggccatttggcggcgtggcacggcgcatgcgaatttactttctctggatgattcatattcatgaaatgtgaaaacaataagttcaaagaggacctaggtttgtgatttagattaaattgaatcgatcaaatgagcgttcgttttccttgtaggaagataaaaatgaagatgatcaagtgcataaagattagtaacgtcattgagagaaattttctttaagattagacatgaatgaatgatgatgcgtgcaagcaatttctaagctacaaaaaccatcttataaacataatttcttttcattgtttgtcttatgtaagacatgacctacactatctattccatacttgggggtaaactaagatcttttaccctatttgtgtacttgtgtgtatgagtgactctgattcggctcttgaggattgtgtgggcacacccacgacaaaatacctaggtccgccacttggtggtgagatcgagctgcatattgatgagatggatgtcgagacacagtggaagatttatcgatctgcaacaactccaacaagaatcgacgggctgcaaattgttgaacggtgaaaatgctgatgtcattgatgctttcttggctaacaatagtgatgatgtgctgatgaagtgtacaacggtgaggtggtaatggcaatagtaatagcaacatgctttgttcttggctcctgttagctctccagtaatcaaatcacatattgttcattgaacagcttgccacactttttttccattaaatagtctcgacgtctagtagtgtctatcacaataaaccgtctgtcagataaaataaaatctgatctgacaatagagaatgagatgagggtagtgttatcacaatgttgctagaagccgagaaccatgatgtaaaaaaccacatggagtattgtgggagcggaaaaatagacaaaaatgatagaaaaattaagtagacacgtctactctagtttctacatgatatggcaatctcgtacatcaccgccggacccttgtgtattgcttaatttgtacgttcagattgcttggtagcattctgcattggtaagttagctctttgctgcataaattgatatcgagttcttccagagatggtgggaggccctcttctggcaaccttgtgatgcgagtacaatgccaaatctccaacctcttgagtgagggaaggcggtgtaatccggcaggaaaatctatgaattcgctgcacgcaaatttgagctcttgcagggacgagaggtgctgaagcgctttctcttgctcatccaatagtctctcctctccgcgtctgtgtttttcaagctctaggcgtttgagggagccaaggtacttgaagaacgatgtagaaaggattctgggatcatcgatctctagtctttccaatcgagggaataactcatcaacccgccctggaaaccaaagaaaagatggggacaagctggggcatttgtatactttcaaaaacctgagattgcagagggattgcgagacctctattttggtgagctgtgaacattctcgaatctccaactcttcaagtgccgtgcagcattgcaactgcagacattccaaacttgcgttgttctgcactagtaattttttgaggcggacgggcttccctataaaacagggtagcgccgtttgtagggaataatcatgtacgctcgcctggtcatcatttttgccgttatgcacagaagacaagctgaaattgcgagatttgtctgaacaactgcaatgaatcttcttcagagaggagacgagatttaacggaattcgcaggagtccgtcttcagctgagcttatcgaagcgtcacttggatgtcttgacgaggaagcctcaagatctaacaaaagctctagttgacacttttcctcctctcccatcgatagtctcgttaccgccaggcaatttcttaatgtcaattcctgtacgccctgcacatgttgcagtatctgagatagccacttccccgttattccacattctgtaatactgacaagttcaagagatgggcggtcattgcgatttccaattccagctaccatgtcttcacgggtagaagtaggctcttgcggaacatctgaagagaaaagattttgacactcgtctatcttcagcctcttcaaatggatcagttgcctgagtccttccaacgaaatatatctcagatttcggcattgtgatatatgcaaagtagttacaaacctactaaggttgtggtagggcaacactgttttatccatcgctgtcagcttatcagaaaatgagttactcctaatataaaatattccttcgtttgacctcatcgttggaagtgttgaaattccattgatgaagaactctgaaacagtagttgaagggggaaaaggatgaggcacagtgaaatcaggacaatcatcgatggtgaggttgctgaggtggggcaaccatgagcaccccaagttacggcagttctcaaacaacggaaagaccttcagaaccgggcaccttttaatcttcaggatccttaaactggagttgaagtccaccatggaagtgcaagagcacgtatgcaagttttgcattccaattaaaataatatcctgcggtgaacggattgagagcaccgatgcattcttcatctcgatcaacacaagctttctaagcaatgatagcccttctaaagaaagtgtatgccattctgcacaattttctagacgaagtgtttgcagataggtaagtgaagtggaaagccaagttggggctttagttccattgtaccaagatatccgtagatacttgaggttgtgatggggttcaagaccttcaagctcctcacttgctatgtctagaatatgatctaaactaggggcaccattgctatcactcatttgcaatctctccccttctgtttctgagtgcatagaaggttcggatatcatgttaccatcgcattcattttcagagctcccaccactgtcgtatctattcccgtcactgtcatatccattccgtacacccttccagaacaaatgtagtccctccaagcaatggttgcttttcaggcttgctccactggcctcttgctgagttgtaacgttttcaagtcgagacacacccggttctacgggctcgctcatgcattgaagttgtgttatctcaaagccaatagaattctcaaccttgaaatttgttagcttctgaagtgaggccatttctcctatgctagcaatggaagaacacactcccttttgggcaagatgccgcaggctgacaagattatttatgtcatcaggtataaggggacttccatatgaaccaatatctagtacttgaagatggtagcacttgctcagagcatggggcaaagcttcgtgggtcactctttctaagagaagatgaaaagctccatgggactctttgttcttaaatcttagatacctgagatgggtagtgttcgccaaactggaaaggaaggaatcaagatcagcataagctgcagtgatatgcagcagtcgcaaatgctgagcctccctgaaagcatcttggaaggatttaaaaaaatgatggttatattgcccaattagtaccaatgtcctcaacttactccttgacataactttcatcaaacttttctcaaattcctcattacgagataattttccattttgatacttgcagtatgcagaattagttactatcgacaaatgacgtatactcggtgctaactctctgcactctgatccatctatagttgcacattctgtttgtgaaaccagtcgtgctaaatcatgcataagatcatgcataacaaaaactactgatgaagaccaccaactttcagcttgctgaaagaaacccgagttcaccaactcagttagatattcccatcctttgtgctcgaacttctcactggatttttccacaaatccttgagcaatccatatttttatcagttgtgctttactgaaagagtaacccttggggaaaagagaacaataagagaaagattgctgtagctggttaggtagataatcataactgaacttcagcacatgcatgatgccatcagtatgtttcagggattgccattctttgttctctataatgttgatccaatggtcttcagtaagatttcttcgtagtagggagcccacagtttttgctgccaaggggttgccttttagctccttaattgttttcctcccaagattctctaaattttgattactaccatgttgatcagtactaaatgcatatgctttaaatagtgaccatatatcaccatcttccagagcttctaaatttattgatcctgccgttccacacctttgagcgacagtcagtattcgagttgtcacaatgatcatattacctgtcacttctgatgcattcacatgattaggtcttaaaggacccagtagtttgttccaacagtcttctgtagtgacatcccagacatcatccaaaacaatcagaaacttcttagatttcatgtgtttctcaagatcctgctgaagcatgttaaagttgcttattccttggtaacttcggttggagacacaccctaaaatctcccttgtgatcctaaccacatcaaatttatcagatacatggacccatatcttgatctcaaactgatttccgatttccggatcattataaacatgttgggacagagtggttttccctatccctcctatgcctacaattggtaggacggttatgtcattggatttatttcccatgattagatttttgatggattccatctctgcatctctcccatacattttgggctcaagaggataagatgatgttattgcatttggggccaggggtgtactctcacacctctgatttaaacttgcatacccacatagcctcataaccccatttacagcctcttgtaactgatgagtcatatgttggatcatgttggagagttcacccctgttccaaggatgcgtgctaactgcctcgtggagtgttgaagtgccatccatcctcatcctttttctgccaactgaattaccaggtgcatttggtgcaccctcaccggcactgcaaaagaatgtgatcgtggttcggcaattagcaaagtcagcgatataacacgatcttaagcagataaacgcagacggttaactcagcggaattaagagctactccctccgtttcataatgtaagtcattttaccatttcccacattcatattgatgttaatgaatctagatctagattcattaacatcaatatgaatatagtaaatgctagaatgacttatattgtggaacggaggaagtacgtgccttatgtggctacgtaaacattctattgaagattacagagcttcaattctccgtttttatatttgacttttattaccatgatctacatcataatggctgacgcgctaaaacgcatctacatatgcgataacttaaaaagatgttccttatatagaaataaaatttttaaagcgggttacatcatcctcaaattactcttatcgcaccctttttttattagtagtggtcatagtaaaatctttaatgcattagttgactattaatccataccaaagggcaaatggacttattatagttactaggaatgtagcctgtgtatacgcacggacatgttgtttaatgttgttagaatttttattacgaatatttatgtgtggatgatatttttgaaatatttatttaatctattttaaacgtgtatttgttaataactggtttggtcgtattactactagaaactgtatatccttaaatttcttagaaacaaacgtgtcacaataatggagttggttcgtagctatttgtattatgtgtgattctatttttaaaatttttcgagtttccgaacttatataacattttttattttgtatgccatagattactttaagtagcattttaattttattatatatttctaaaatatattttctattaaaaatatacttcatccattttatattataagactttctagcattgcccacatttatataaatgttaatgaatctagacacctatcaatctagacacataggtgtctagattcattaacatctatatcaatgtgggcaatagctaatgatactacttcatctagccaaagatgatttatattacttatacttcctctgtcacataaatcggaggagttaaattttattctaaaacaatagaataatttatatgtaactgagacaaagtaattttttaaaatactagcacgataatctccaaagtaccgtattatatttttgacagatatctatagtgtaatgcacgttagttcagtgtctggtttcttttcaacacctattctttctaacgacatgagacacctttagtaatttggagaatacgtatgtacatttaaattagcattgtatattcatcaagtttttttacacctaagatatgatgtgaaattattatcatagcgttaattattacttgtcggttccatatgttttgatgtattttgggctatagacattatcaatttattgatttaaaggaatacaacgggatcacaaattggatatataattttaaaataatttaaaagatagaacacttaaaaagcattgattggacattttatattatatttgtgtaaatttcaagattattatattttatctttaaattgaacaaaactagttgggcagcccgcgcaattgcgcggctagcatcaatttaaaatcatatatttttacatataattttatttaaaattttattcccttgattctaataattttatattttctttaaaagccatgctagtcgctaccccttactcttttgacactttttttttgcttactcgatctacctctgtttctattcatcctctttagaactttataaattaggccttatagtttttagagtttattgtcttgttgggtttcgttttcataatttttagaagtatctttaaacatcaccaatttactactctacggccgtccactaccacctctctttattgtcatttggattttaaaattagaatataattattgtttgtattccttttttactttttataagtctcatcaaatcgttagtggcttcgccactatactcatctacagcccgcctgctgcctgccctccttattgttgtagagattttaaaaatccttaattattacttgtcggttccatatgttttgatgtatttagggctatagacattatcaatttattgatttaaaggaatacaacgggatcacaaattggatatataattttaaaataatttaaaagatagaacacttaaaaagcattgattggacattttatattatatttgtgtaaatttcaagattattatattttatctttaaattgaacaaaattctatttttaggactcccaatctttttggctttattataagtatgttttctattgttccggcaaatgatacgtaatcatcattgttctttaaatcatatgtacgtatggagtactttttctggttaatagctatatgtttctcatgtatccgtatatacgataatttttttatttttaaataataaatctaatataatggtgtaaaataaaaaaactaaattgtgttgttttcatttctacatatgtatatttaaattagcgttgcatatttatatttgtgatatttgagaccctaaaatatgatatgaaataaaattagcatcacattagaaatagatatgcatatttatttgcgaggagtagcggtgggctcctgctcgtgtgccatttttgagcctggcagacgccacgtcacctgatctaagggcaaaatgactatcttgtccttcttcttaattcatttctcctccccttcctcagtcccttttacatctttccttttccttgccagtgagctgcttaggctccggcgagctccccgccttgtgctcctccctccctcactcgactccctacatccccagcccctcctctattcctactgccaacgtcatcaaggatcagcgggcatggctgtccggcaatgtgatgccattgctggtgcctcactccatcatcgatgtcatcgttgtcctctgagcacagagcgtcgtcctcctctcggatcttctccactctcccccgacgtcgacggctgcgtcagacccagccttagggcttcccctgcctcattgttcgctgcccgatgcaggaggtgagggtgcacattgggtggtagaagagccaggggccgttcgtctcctccatagccattcggcagcgggacgctcgaggtcctcttcacgtcgtcctggccttggcttgatggtttggcattggtggtgatggcatcaccagctcatgcgcaggaagaaggttgaaggagagagaccccaagctggaggaagaagaaaggcaaaatggtcattttgccctcatatctggtgacgtagcgcctcaccagctcaaaaatggccaatgagaaagaaatcatctctctccaatggtaaaaaaagcaaagttctttggaagagtggcatttgagaacacgccatccgggaaagtggcaaatagtccaaaatcccttggaccgcagcattgctgggccgcgcgcgcttcatgggctatgtgcgtgaataccctagcaagccggcgggggtccgacaaggccttttttttcctttcgatttttcttttctttttttagaactttctttctttatttcagaatatattttcttaaagggctcatatcatgaaaaactaaaccctaatcagataatatttttatcttggatataatttttgtttacccgttccaacgcatgggcattttttctagtctaattttgaatttaattttgttttaattctaaatttaaatctgtcgacgagtgatactcgtagaccggataagtagagtattggggtacattggaacgagggtctatgtagtacgacatcaagcagacaaaagacaaagattatactggttcagggcccttatcaggtaatagccctagtccagtttatatggaattgatgatgatgagaacacattacaaagagagtagtcgaaacagatggtaccgacgagatcgtagtcgagagattcgacgagatctcccactgagttggctccgtgtactccggcttcataaacttcgggaggtgtgttgaagatgagatacgattccctgaacccctcccaggggtcccttttataccgtggatcatcttgccccccaagaaaagcttgaggatatcggacctggtacagtataacagaaactctatcctttccgagtaggattttggaaatcacttgacccgtagagatattttctataatttgaagtagtttccatgtgacatttacaggaacaatccatatacgcgaaggtatacctaatcgatatatctcgtaagtcgtaggacatgaggtatgccttatctgtaaccctaacaaattcaatcccgagttgggctttagaaggactgttttttttcaactttcgttatttctattccaaatttaagttatttataaattgtatttctacttaattttttttctaatttaggaatttattttattgtttattttgaattttaattaaactcgtgttgtgttcgattattatttcaataatattcttttatttcgaattttagtcatttcaaaattgtattcctactcaaactcttttttttttccttttcaaatcccagaaaaaatattttggattttaattaatcacatattatgttcttatatggactcttttttcagtattgcttatttttaattcttaattcagttatttattagattgtattcttacattgactaaattttagttatttaaaaattgtattcctcttaaactctcatttcttttcctaatataagaatttattttattttttattttaaattttaattaaactcgtgttgggttctagattgattgttttttttcactattttctatttcgaattttagttatttcaaaattatattcctactaaaactctcttttttatttttcttttcataattttctaatttttattccgaattttaattaataaagtattaatgcattattataaggactcttattccaatattgcttatgtttaattccgaattttaattattatttttaatactgtattcctacttgaacaaaatcttagtcatttataaattgtattcgtacaaaaactcgcttttttatttttctgatttaggatttttttttattttttattttgaattttagttatttcaaaatttattcctacttgaactttcttctttctttttctaatttcagaattttttctgaaatttaatttatggattcttatatggattcttcttccaatattacttatttttaatttcgaatttcaattgttttttagattgtatttctatttgtactattcttttctttttcatagccaacatgggaatttctagccttcatagctatcgtgttgtctttttttatatatatagatagatagatagatatgggaatttctagaaatctaaaggcagtatggtgtctctttttagctatcattcacagattggtagtatacctggaagggtctggtggcggaccaattgcttcacgtttcttcttacaattgtcactcttcagatggttgtgtaaaactgacgtccctttgtcggaaccgcacttgaccaccgtgtgacagtggatacatctggccttcaccgcctttccgttttccttttccgtgatatcgaagtcctcccaagccttggatcgttttttgccaccactgctactcgctatgccagcgttgcaactcggtctcgctgcttgctctactccatgttcatccgcgcatgaatctgaaccaagattaaaacgtgcaacggaaattggaatcaagtgtactacctcttttcaggttacaagactttctagcattgtccacatctatctattctatctattatattattaaaatagctctaaaagaagacaccacgttcgctgtgggggctagaaatttccacattaatcgaagaaaaagagaaactattttgatcgttagattatagctgtttagatttttcaatggtgcagattaacacatgaaaaatattggagtccaactagaaaacgactacagaaaattgggaccgacctatattctatatagagtgatggcaagttaattaaacctttatgattaggattaggagtcggacatatttgcatggagatcctgtaatcaaatacagagtacaaatctaaccagtgtaggacacgttaactcaaggtagaaataaaaaaaaatcaaataaccaatacagttggaataaaacaatgtaagaatatcattatgcatgagcaaatggaccaggaacgtaacattaggcgtgcaagtaggaatacattttaaaaataactaaaattcggaataaacaataagtaatattgaaagaagattacatataagaatccaatacgatattaattaaaatttagaataaaaataaaataaaacccaaaattagaaaaataaaggacataagagtttaagtaggaatacaaattaaaaataattgaaattcgaaactaaaaataagcaatattaaatgaagagtccatataagaacctaatacaatattaattagaattcagaataaaatataaaataaaaataacataagtttaattaaaatttgaaataaaaatcaaattaaattctgaaaatataaaaataattataggagttcaagtataaatataatttataaataatataatatcggaataaaaaatatgaaattttcaataaacaccatccatctataaaacgcaacaatgacgaataacaataaagagggaagaagcaacaaagtcgtaaaggaattaagtgacagcagttgatgggacatctaaaaactataaacaaaacccaaatagaatcccaatggcgatcaaaaggagggacgacggataggccgttaagtagtacgatcacggtggttggctggatttctagaaagtaaaaaaataaacctcaatgatattaaagagggaagacaacaagggtaaaaacaataaacaaaaccacaaatagaatcccaatgacgggtaacctgttaagcagcacaaacacgatggttagcaggaaagtaaaaaaataaaccataatgagaatcatgttcgaattttaaaatcacaatgacaattaaaagggaagacatcgggcgggccatataggagtataatggctaagctgctgacggtttggtgggacttctacaaagttaaaagtgaacaccgacgatcattatatttgaattttaaaacccaaatgacgataaagagagaaggagacggacgggcataagtggagtagagtggcggcgtttgatgggacttctaaaaattataaaaatgaaagccaatgagttgattaagtctaaaatttataaggttctattttaaagttcaaaggaggacgaatagatgccgtagtagatcgaacaagcaaataaatgggtgaaaaagagcaagaggtagcggcaagtgtgactttaaaaaactataaaattagaaaaatagagatgataaggttagtcttttaaagtcctaatatacaaggaagctatttaacaaattttaagtaaactcatatgtaaataattttgtatggatactatccgcgcaattgcgtaggccaccttgctagttcatatagatggatgttaaagattctaggcatatgggtaatataaaaaattcttataatatgaaacagagaaagtacgtacgacgtcctgcgttacgaagaagggaagaacaatgtattttttatgtacacgctttacctccttggagctgatgctggagcctgtagtattcgagctcgtcgaccgcgtcgtcggcgtcgtacagcacctcccttagacgaccgagtgatcgggccagcggtttgttcgcgatcgccctccccttgacagcaccgaccaccacctccaccctctcgacctcagaccggagcttttcggtgtcatcggcgagcccgacctggctaatccacgcgccaaacttgtcgttgtccaggttctccactatggtatccgccagccatccaatcgaggactccagcaaattaccttctatctcctccatccgcaaatgagaagttattagtaactcttaaccgatggtctatggttataagcaaaatacgcgaatgatatttgggaacgggagcaccggagcagccgagaagagaagaacaaacaacgacaacaaagtacaattacagccggggggactcaccgcagcccgcatataaaagcagtacagaagtcagaactcagaagtccgacatggttttggaccgagtgagagacgatgactttgctctccccatattcaaaaggataaacctcgagcaagcctttcaaaccgcacgcattttagatttcgcgtcgtcagatttgcatatgttatcattacgcatacgactgcagcaatttgactgaggatataaacattgtaatgaatgaacttttagagttgaaataatccctccccgacacggctgactcagaagctctgcagtacgcaaataaaacaatttggagaaccgcacgctgaaagcggaagatggattctaatccctcaggccttgttcggttgctagggattaaatcctaaggggaagcaaaccagggagggattgagtgaatccccccaatttcactcaaaccctgtggggactaaatcccttgtttcttccaatccctctcttagaaactctgtgttcgttttgacagggactatagcagctattggcagggaatataggagcgtattgctagctctctttatgatctggacttgtattactactattagtacatttggttaccactatttacctaaaaccagtagtgctagtaccctgtgacggcagcgtaggagcaagatcaaaagtaccattagtccatttcagagaaaactagaaaacaatatacacgcatgttacaacttcctggatcaagaaagttgatgccaatgtagtgccagccaaaattacaggaaatgcttgtaatattccaattatatgatataataaaaagattgttctgattccatttaactgcttgaaaggttgttaaagatggctgaatgaactgcattcaggcattgttgaagatctgacatgtcacaatgtcaacaattacacctgatcaagaaataagctattttcagttggaggcatagtgttattatccaaaattaatcattcattcgatggttaattagtggccactggtttctttagcacacacatcagtagacactgatactgagcaagttgaatccatctgtggcgacttcgatgattgattagtctaaatgcacaacaaaatccaaacttctcccaacatccctaaaatgacacatcagtaatacccttcattggatagttaattagtctataaatgacaccatcacgaaactgctaccatcaaagaaattctatggaacatccctaccagtcaatttcaaggagtctgcaaggaaaatcagtgagtagacatcagtttacctatcacagaaatagagaagaaaacaaaactactaccatccaattattctttttccttctactagacataacgcaatgaacattataatgcacaaagtttcagaatcaattgtatagtagatgtgaatcttgagttgcctgaattttaagaagatatagaaatcatgtatagtggatagacagatatatttccgagttgagctcgcttccgtgtggaccgtgtaaaaaaatggcataacagtgaacccaaatccatcaccaattcacaatcggctcaaatctgatttgaggagctgggcatagccgcaaccagcagttgggttcttcatacgcaatcgacaagcagcaccatgttcaaggccttgttcttgatggtggatgaggaggagcccttgcagttggagacggagataaaccaagaaacaaggaccaagaaccaaaccctaggtaggataggaagaagagaggagaaggaagagagactcaaaagtgagaaggtggccagcggaggagacggtcgccggaggggagagcgccgcgtcgtcggagcgccgtcgaatcccagtcacgtccgtgtcaaggagcaaccactgtccgagggcgctaagtcagttgcagaagacgctggagatgatgctgattccggaaggagggaagatgaacttgaagcagctgaaggagaagtggtgcgccgtgcaacaaggcccgtcaagataaacctgaagtactatgggcctgactgggccgtgtaattaagtctaattcctgtaatagttcttcgtgcgagaggggaaagaactgagtaggtgaggaagataagagagagagaacacgaggtgaactctgtctttggcgaccatggtggcgtaggcggcggtggctccattcctgtcggaatcggagaaatatctcagtaatagagttgccaattccttcgtgttctaatccgtgcgttcattctggattgcttttcctgtgcaagttcgttaacaattggtatcagagcctctacgctccaagaattccttggcgcggttgtaaaattccagggggaggattggaattgttcttagaacagattccacaataaggcaacttgccttctcttggttaactgagttcgggaaggagcgggggattctagatctagttgggttcgctcacaaattccaggatgtcgcaggagagtaaacttgatgtcttgttgagaactattgaggagaatgagaagaagagaatggaggcggaggcgaggactcgggatgatctcgctgatctgaagaagatggtggagatttgtcttcccaagatggaggagaaggtggaaaaactcagcgagtccgtgcagacactaagccacaaggtggagctgatggaaggtggcgcgatcaaacaagaaaccgctgcagatgcttcagcacaaggaactccatggttgcatggtaagcggaatcctcctcccatctcacctagtccattttctccggattctactgtgcaatcaccaacttcttctagcatcacaccgatctgagtactagtcttcctcctatgacttgccctaagtttgatggtgagaacccacagatgtggaagagcaattgtgagcaatactttgatatctatggtattaatcctatgcattgggtcaaggtggccacactcaatttcagtggtaatgcagcattttggcttcagtcgatccgttctcaaattatgggtattacttggcaaactctgtgtgacttgatctgtgctagattcactagagatatacaggaagcactaattagaaaatggttccatgcgcaacagaacagcacagtcactgaatatgttgaacaatttgacagtatcatgcaccagctaatggcatatgacagtgctctcacccctgtgtattttgttactaagttcattgaagggctcagggatgatgtcaggggtgcagttatgctacagagaccccaggaccttgactcagcttgttcaattgccttgctccaagaagaaatcctggaaagtaataagtctactacacacagaaggtctgataatcacattgcgttcaggccagtaccaaaactcaacaattatgtgccagtgcctccaggacagagatctgtagctgttagtgcacatgatgacaaaaagggagtggaatctgctaagtccagagaggacaaatttgcttctcttaagtcttacagaagggctaagggtctttgttttgtctgtggtgaaagatgggggagagaccataaatgtgctacttctgtccagctccatgttgtccaagaattattggaagcaatgcgctctgagtgtaattctgatgacatcctgacagctaaagaccctattgaatcagtagaggcaattgatggaggattgatggctatatctcagcaagctttgtgggggtacagaatcatccaaatctattagattaaggggatgggttcaaggaacagagattcttatgttgattgactcaggcagtacacactccttcatagatgagagcattggcag

SEQ ID NO: 7563 - DNA, 41432 bp, Oryza sativa
ctcaatcgggcattagtatggagcccgtcaccgatgagtcatctgtgacgggccctacggcaaagcccgattgagatagattaatctctatcggccgtaaactaaggcccgtcaccaatgactcattttccatctttcatttgttgtgggtgcaaaatatatagcagctgtgtaataattcattttattagtcataatacattttcggatagtaaaagatttcaaatggaaatatggtcaacaacaaagttgtagagcctttcaagatctactatttttattttggtcattattctatataatttttttcccaatagcttgaaattgatttcgacaatatgacaaatctaattaacagcatttgtaaatactaaatgatttcaaattgaaatatggtcaacaacaaagttgatcatctcatcaagatctacaacttttattttggtcatttgtaataaaacaaaattagccatattaatgactacatatatcaagtctttgcaataaaacaaaatactccattcattacaatagataagtataaatgcatcagtcataaggttatgccttcggtatgatctgaacgagcatatgccacagactcttggggatcatcgtcaaggtcaatgtgaggtcttacatgaagattatggttgtattcttcttcatcgacgacgttgtcaactcctacaatttggcgctttccatccctcacgatgtgcatcttcttgtttgaagggtcttttgtgtagaatatctgctcgacctgtttcgcaagtacaaatggttcatcggcgtatcccaccttagatagatctactaaagtgaaaccttccttgtcggctttgacactagtgcgtagattcacccaacggcagtggaacaaaggaaccttgaacttgacgtagtttagctcccagatctcctcaatgcggccgtagtatgtgtttgacccaacttgatcctggaatgcatctatacggacgccgctgttttgcactgtgcttttgtcatcttgtttgacggtgtaaaatgtgtatccatttatatcgtatccttgccatgtgtctatggtccaagacggtcccatccccaacaattgtactgtctcatttgggacatccgtggacattgtcacacgattcttgaaccattcgttgaaccgagaattatgttctctgttaatccatgcatcagatcgccccaagttctcatctcggattttcgctaagtgctcctcaaagtatgggacaacttctgccatatgttggagcacagcataatgagcctgcacgtacgacgcttgatcgggcctaattcttttccttccaattgtgccaacacctgacaaccttccctcgtgacgagacgctggaactccgataggatcggcatcggacatgtaattgacacagaactcaatagcctcctcggtcgtgtaacctttaatgatgctcccctcgggtttagctctgctacgaatgtacgactttagaactcccatgtacctttcaaacggccacatttcccttagaaaagccggaccacatagttttgtttgcttcaccagatgaacagagagatgaaccattatatcaaagaaagacagtgggaaaaacatctccaggtgacagagggtattcacaatatcggtctgcagcccatctagatcttcaggatctataaccttctgtccaattgcattgaagaaggcgcacagacgttggatcgtgtgacgcactttcggtggtagaatgcctctgatagcaactggcaagatttgtgtgattagcacgtggcaatcgtgagacttcattccaacaagttttagatcgtccaatttaacatacttacttatcctcgctgaatagcccgatggaactttaatatccttcaagcatgataacattgcgatcttctcatcctccgacagtgtgtggcaggctggagggaggtacactttacctatctctgcatctcgtttgggctggagttcgctgcgaatattcatgtcctgtagatcaaggcgcgcgttcaacccgtcctttgtcttcccgggaatattcaacatcaggccaaccaaactctcacacacattcttttctacatgcatgagatcaatgcaatgacggacatcaagatctttccagtaaggtagccgccaaaatatggatttttttcttccacatacccttctcctttgtcttgctacgttttcttttcttcccaaactcattgcttatgtccttgaccatattgtggacctcatctccggacaaatctttgggagcaggctgaagttctctcttaccattaaaaattttcttctttcttctaaatgtgtgacgtaccgggagcaacctccggtgacccatgtataccatctttcgtgatttcttcagccaccggtttcgtggatgttccttgcaatcggagcatgccttctttccttttatagtttgtccggaaagattaccgagtgcagggtagtcattaatggtgcagaacaatagaactcttagcttgaagttctcctgaccatatgcatcccaagtttccacactttctttccaaagaatctccagatcgtcgataacaggctccaggaatacatcgatatcattgccgggttgccttggaccttagattaacaagcacaacataatatatttctgtttaaagcataaccatagcgggaggttatagttcgcaataagaactggccaaatgctgtgagtactactcatgtcaccgaaaggattcatgccatccgtacaaagacatatcctcatgtttctagggtcggcagcaaagtctttgtgttttcgatctatattcctccattcaatcgaatccgctgggtgtctaagcataccatcattccttctttccgtggcgtgccaacgtactaacttcgcttcgttcgggttggcaaagattcttttgaaacgatcaatgataggtagataccacacaacctttgccggaccacccctctttgacttatttccttcgtcagcacttttctttcgcttgtatcgtgaaaccttgcagacaggacaagcatccaagtccgcatattgcttgtggtacaatatgcagtcgttgggacaagcgtgaattctacggacctctaaccccagtggacacagaacctgctttgcttcgtatgtcgtctcgggcaatgtgttctcaacaggatgcatagccttcaaaattcctaaaagatctgtgaaactcttgtctgtccatccactacttgcctttaccttcattaggttcaaggtaactgacaacttagtgtgttttgctttgcatccagcgtacaaaggcgtctcggaatcacttaccaacctgctgaatttcattccatctctctcattctgggctaggtcctcaacatcacgtaacatgtcttgcagcagatcgtgatccacatcaaccatttcaccgcccaatggagaaggtataaacatgtcatgctcattttcatcttcctgattatgcacacacttctgtctgctgctgctccacttcctgattcttgctctccatgcttcacccaacatgtatagccctccatgaatcctcgttgtatcagatgaccgtgtacgtcctctccgctatcaaacatattctcattcttgcaatctgcacatggacaacaaatgtaatcactgtttcttcttatccgatcctcctccgcggcgttcataaaatttattacgccctttcggtactccgtacaatgacgtttcaattttttggcatacatccaacttcgatcaattgctaaaaaaaacaaattagaggcacatattataagatcagtattgcaaaagtaagatgtgatgaaattgctcaattaatgatttatattactcacttgattgatccattttgatcacttttgggaatttaatttctgttttccttggaaaaaggacaaaaaatcgccccctacagcctcccaccaaaatagtgaacagtgggatacagttacactaggtggtggggggtatttatactgtgcaacaaatatctgtaacggccctaaaacaatcaaccatgacgggcatacaagtaatctctatcgggccttaataaaaggccgtcaaaaaagagtgtcatctgtgacgggcaataaacttatctcaatcgggcctctagttggagcccgtcacagatgaccctcatctgtgacgggcttcttttagggcccgattgagatatggtaccctcatctcaatcgggcctcaactatagcccgtcacagataagtgtcatccgtgatgggctttagttttatgccgatataccatggctgtgcgaccatatctcaatcgggcgaaacttcggcccgattgaaattacttccttgtgacggcccgcaaattccagtcttgttatgggccgtcacagatggaaggatctgtactagtgtaaggtagcccaagtggcgaatccaggataaaaattgaggataggctggactagaagtctaaatttaagttgataatgctaaaataaggcacatgccattatcaattcaaatgtaacacttacatgatttaatagaaaaatatacttataaaagaataccttgagtccttgacttaagatgctaattttcttgggccttagcaaagagtaaagtgagcagccacctgaatatataaatgagcaaaattagtattgcataaatggtagaagtaaacaaatgctaactaaaagaagcaacataccacataccactaagctgttacaatttattcacgaggaaaggatattttgggggttttcaaggcttggaatcgcttcatgattgcattatcatcaatacttttgaatatctctcgctcagtatagcataccatcaaatcattaagccaatcgtctgatatcttattggcaatcgcacgccgtcgacggctcgacgccaaaaaaaacggaaaaagtacaccgaaggtccctcaacttatcatcgagttacaaaatcattcctcaactgcaaaaccagatatccggtgccccttaactaatcaaaaccggtcacaataggtctttcggcggttttgaccctggttttattctatgtggcggctgagtcagcgtgggaccaacatgggacccatatgtctggctaccacctcagcctcctctctctctctcttcccctcttctctcccttcctcatctctctctcccttctttgactcagccggtgagaggacgagggcatcggcggccggccacgggcgatgcagcggtggtgaggggaggagctgtgggcgggcggtgggagaggggcagcgcacaggtgggcggtggaagcggggacgtccacctcagtggtagcggccgcatgctcatttcggcggtggcatggaggtccctggcgacgacgaattccgacttcgccgcagggctctcgctgacgctcgctgcgtctctcggagacgcagctcggcgagctccatgtcttgccgtgctcgtgccttctcggcttgcgccttctccaagcttcgtcttagctcatcaagaaggcgcattggtgccgcctaggtccttcaccgcatgtgccttgccggcctccgcttcttctgatctcttgtggcactcggtggcctcatcctgcaccaggtcaagctcaccctgcacttgtttgtgcctctgcacgcagcagtcgacactagaaacgggcaaatcacaagaaaatcaaaatgctaatcactgtctaagcttaaccacaagacaagatcagtagcaatggagatcgatgtaatttacttctctccaatcaacagttcatccgaacttggtaacggcgcccttgacggaatcgatgggcgcagtacggtgtcgatgttcttttgatttcttgttaaatatgtgatccgaattttgggcccacaatatattcggattagtttcctagtagcactttatgtctatcctattaggtgtctttcttttatcccctatatatactcttgtaagccgtacaggaaggggtgacgttcccattgttattcccctacgtttgtaatcaactcctctataatgatgattgccagtcggcgcccgtggttttttcccgtaagggttttccacgtaaaatttgtgtctccgttgtgcatcgatttttataacatctctgaacgaagcgattgtcgatctccgacgccgtcgccgggggccgaccgcctataggcggccacacgcggccatggccgaagcaccacgttcaggtactccaagaactcaccctccatctcatcaaacgaattcgccacggcgccccaagcttaggaattgagcaggaagctttcccgcatgagctcctactgtggatcgcatgagtccgtggtgccgccgccgcgttattccggagggaaatactatgtaaccgcgtccgtgtcgccaccggccgccggacctcctcccacctcgctccagtgaccttctccccacccgccagccggattgcccggagaagagaaaaagttagagagagagagaggaggaaggaaggggagggggaaaagagagggtgctgaatcctaacatgtggggctcacgtgggtcccacgctgactcagctgccacgtcggataaaaccggggtcaaaaccatttaaggacattaagtgaacggttttgtaagttgagagatgtcatatatatggttttatggttagggacgattttgtaactcgatgacaagttgagggaccttcggtgtactttttccacaaaaaaaaatccccacagggcaaagccaaggccagcagccacgcccacgcagcctccagactccaaaaccctaagtcaatggataaaatagacaaatgggccaagtgggcttttgctaaagtgataaatgggccattttatgcatactgcgtaccggttcagctacctccatcgctcctgatcttcttcctcgcgccaacagagacagttcttcacctcttctcttctccaagccttctccagctactcccatgggatagatgctatataattaattttttttttgcaaaaatcagatggtaggctcgagcctgatgaagcctacctcttggatccgtcctgcatgaagggtgaaggctggttgaagcgcgtgaaacgaggtgttgaggcggagcaactgcggccttacatgctaccggtggggagggttaacctggtggcctttgccagatatggctaccacatcatcggctagagcattgcttggtgcctcgtcgccgcccccacaactagtgctgcatcgtcaccactacctcctcgacacccctagttggcgtcgcctcgtcttgccttcccgtcgctgccacaggccgcagccgacgccctcagcccacctcctcgccgccatggctgctgtcaagcttacggataaggcatgcctcctatcctacgactcatcgaatatacgccctcagcccacctcctcgccgccatggctgctgtcaagcttacggataaggcatgcctcctatcctacgactcatcgaatatacatatacggtataccttcgcgcattcggttcgttcacgtatacattaagaaagtttatctctaattatggaaaatatctccacgagtcaagtgatttccaaagttctacttggagaggataaggtttatgttatatcgtaccagatccgatgtctcgaggtttgacttagagattaagatgatccacgctataaaaggaacccctaggcgtgggtggaagagatcgaccaaaaccgccaacacacccatcatagtttacgaagccggagtactcggagccaagtggccgtgagatctcgttgatccccatcgattacaatctcgtcggaatcgtcagtttcgtctacttctttgtaatatgtggtattttcatataatcccatactaactggactagggctattacccatcgaggggcctgaaccagtataatctgtctcttttgcttgtttgatgtcatacaacgcaaatccctgttccaacgtaccccaatactcaaatcatccggtccatgagtattactcgtcgacagtgacgcgccaggtagggagggcttggtgcttaaggatctgccaatacaacttcaaaccatcctgacggcagtaccaacaccggcgtcaaccaaggagtttcagcctcgacaccgctggtctggactcatgtcggaaccattgtctttccaatctacaccgctacaccaccacatggcgccacctccgccattcacctcgtcatcaccaccgtgatgccttgatggaggagagactgagtgcaggggagagagaggggaggagggagagaggagaccacagagagagcagggggaagagagaaggtaggagtaggagagttagaatgataggttgggccactttcatttttgtcacgtacgtaagagtctagtcaacatgagtggactaggtcaaattgccatatcagtaaaactaaccttccatactattagaggacttaatttgaactgtttttgtaagttgggggtattgcggtttagggatgcaaattaaattcgagataaaaattacagccggaaagtggacttattcctcgtaacatgcatgcgtccggaatgcaggccggccttctctgatgggttaatctaaactaaactttcaactctccccaggtaattatgaacatgaaagttcttatatttgagtttgaaaattttacaattttagttgaaaattattcgatttgacagttcaataattcgtgtagagagttgtccgagaaatacaaaattttatggataattaccttaattaccatttcgaggagaaaatctgttcaaattgatttgccgaaaactgagaaaaaccagtggaaaccaaacgacatttatagggataccaactaaaacggctcggttttataaggaataagttcatctgaggtcccttaacttgtcaacgaatccgattttcgtccctcaactgaaaaaccatacacaatgagtccctcaactatcataaccggtacagatgaggtccctcggtggttttgatgacggttttggttaacgtgacatctacatggctaatttgactcggttttcatctgacgcgacgcttatgtggcaattcgatccagaaaaataataaaacccgtgggacccgcatgtcagtttcacacacgaaataataaaaaaaatcgtaggacctgcgtgagccccacatgtcatcctcactcctccctcctctctctattctctctctcccctcctctctatccgttctctctctccgaccgatggagcagggcgagcggcggctggcaaaagcgggcgacaggcgggacggagcggctggccggtggagcagggcggggctgcatcgggcgtcgcgacggacctcgccgcggggccggggctagccgccgccgccgccggcaatccgaatgacgatgggggagatggaggccgccatcgccgccctccccgcgaagaaggaggcgctgcaggagaatggctggccgcagggaatcctccagttcacccacggcgctgcttctgcttctgctgttgctgtttctgcatcatcttgccctgttaaaaagacacagtgcccttgttctttcgcaattgcaactagcatctccttctctacttctactcacttcacacctcagctcagctcatctcctgtcatctcagctcagctcagctcagagagagagagagagagctgcaggtgtgagctgatcaccaggaagcagaggcttttttcagattacagttatatatctgaaacaaccagattcagaatcaatcagcaaaggtagatggagtttcttgtttcttttgtactactacatgactatatccatatctctttttcttctacttcttgtcttttgtttggttttgtgtgttgttgctgtgtgtttcaacaagtcaactggatagatagattcatagatattatagtttttatctgaggttggaggtttcccctctcacccaccacacattttggcaccccaatcctgaatttactgttcagttctcttcttcttctttatcgattgatcgtccatgcatgcatactggtatatagtgctagtgctcaagtgatcatccttcctgatggtgaatctcttttgagaaaagaaaagaagaatatctctcttatcttggctttttcctgatgatctgagcactgcaatggccacgtcgtcatgcagacaggcgccgcggaagccaccgaggccggaaaggacgacgatgatggcgatggcgatggcggaggatgggtcggcgtcgtggtttcagtactcagaggagatgctcctgccgatgccgccgacgcccttctgcacaacgccggcagtcgccgccgtctgcgctctatggccccgcgtgccgcggacctgacctagcccgctgtcccgcgtgtcgatacccgggggggggccggactcaagggattcattctttttcgcactaatggaggacatgaattctgggcaaattatctatgttacagtctattaaaaaaaggacttctaataagaaattcttctgctaaagaataggctcgcctataaatagaagcttcggcgcactctatattttgcgggacaagaaagaaagagtcaaagccatggatatcgctgcaagactatcagcgattcctcaagaaatcgctgatatagaaaacactaagctcgaactagagcaaatgctgggtgtcctcggggagcctttatttctggctttcgtcgatccagcagtgatcatacaagatgatatagttcttgttcagaaccaaatccgcattcttgaaaacaggaagaaggcgctgctggaagaacagcaatcgctcatcgtgatggctgcccaccacggtgactaaaatagaaaaaggtagttactcgtctatctcaacgtaaatgaacgaagtcacttaaggcttcctactactactgctccttcttacttattttccttaaatcataatatctgactatcaatacttgtatataatgaaataaaacatggtgtccaacttagtggtaaggattattactaattatttccactagtgttggtgaaatatgtatatacaggtattttgagaagaaaacacatccgtcgagcgacaaactgcacctctgtgcattcaggatacatttacacgtattggaggccccataagtcaattaaaaaactgcaaatgggcccaaccatcatgccaatgggctgagggtctcaaaattagtgtccaggaggaaaaacaggtccaacggagccctcctgggttcggccgaaccacttatgaggctgttgatcgcgagattcgacgtggacggccctgattacttcctgatggtggttccggggtagcttggttatttcgcataggctgtaacagtcatacctgcctataaaaggaggagcctactctcatttccaacacacaactttgagctgaattacaagagactctattgtatcttttgttcattagaataaggtagagagtgaggggaagctctcgaggagtgcccggaagtttggcgctcatccgacttctacctcgatgagtgtagcttcttaggaggaattccggaggagtaccggagctgtcggtacactctgctccaggttcggagaacttcttctataaagtaagtattcgtgttcctttcttatgttatttaattactttgtctaagtaaaataagatttccatctctgcgggttcattgtttagtatttgtactaagtgctctagtactaggactctggatagagaaggaagttcctgcgcaagtattagagtagtaattaataacttagacgtggtgtctaggttagagattaccttcccacggatttgtcagagataggcggcaggtggtgacagccttaaattccgtcccagtaatcctccatattcggatacatcataaagctatagccggaaccacgctggcagaccagcaggggtcggtgcccgaagcaacagatagaaaattacctttgcttagcttatataattaacactcatagaaagtcctctctagcctacctaccatcagttgttgtccttggatagccttagccttaggtagattatacgcgttccctgagttcgatatccttttggggtcacccgaaggttaagtgctacagtggtattccgtgctcttgcggatttatctgtggacgtaagaaataccaacacccgccgtcggccgctgcccgcccagctcctccccgcgcgacgcccgcttctgccgaccgccgctcgcccctctccatcagccggagagagagaagggatagggagaagaggggagagagaggatcacatgtggagcctacgtgggtcccaccattttttattattttatgtgtggagctgacatgtgggtcccatgggttttattatttttccagattaaattgccacgtaggcgctacatcagtgccacgtcagatgaagaccaagtcaaattagccacgtaggcgccacgtcagctaaaaccgccctcaaaactgccaagggatcttatctgcaccggttttgatagttaagggaccgttgtgtttggttttccagctgagggacggaaatcggattcgtcgacaagttaagagatctcagatgagcttattcgttttttataaaccgatcagtagggtgaacctgtttaacacacaggccgtgaacctggcccaaatccggactctcggcctatccacgtgagtgggtcgcgggattcaggcccttcaaaagaacagatgcctccgttgtagaaaaaatgaaagaaaataagaaaggaagaaacaaagatggtatatatccatttgatcgatggctacgtgtagaaaaaactcgcgtgttaataagaaaaggcatgcaagtccaacctaacacttctcaatccaactatggaataaaactagacttggactagtataaattttccttgctacactagtcaagagtagaaggcgaggccatccacatcatctatggataaattcagctgctccctctgcccgtagtacaagaattttgtctttgcactaatttatcataaaatataaaatgtaaaggctagatttttgtggtcctgggactttatatactattactatagtttctttttcacctatcaaattaagtattattattttgcccactgtagtatttttttaccatgacttatcgttctgttacattgttaatttttttttcaaaaatggtataatcaacataggaaggagtagctaggccattacccacaaggcaaaatactccgaggatgaagtattagttccttgtacaatggtttgtttaaaaccaaagctgagtgatgtatacagattgattttttccgtttggctaaaatcaatttttgcatgtggacgtgccagatccgctccaccattgcccaggccagatccgctccgctaccgctggatccgcatgcatgaggggcggagcagtggccacatccggcctggagggagaggggggaaccagatccgctggtgccacgtctcccgcccgccgcattcccgctcggcggtggaggaggagcctcccgccagccagcacaagtctctcttgcctcgctcccgcccgactgtgcaagaggagaagccgaggagcatcctgctgctcctgccaccatcactcccacccagcggtggagtaggaagtgggagaggaggagagaaaaatgagtgggggagggagtaaggagataaggtgagagggtgtggaaaaatgaaaagaagagagaggagaagaggtgaaaaaaatttgaagtggctaagtgggaaaagagaggaggggagaaaaaaaattttggacgagaggaagtttttttttcttgcggatcacttaagacgcccgcatgcaaaaataggctcatttttgcatgtggccccttaataggtccaccaacgaaaatatatttttgcatacgagcctcttgagaagctgcatgcgaaaatagaggttgatttttgcagaagcaaccaattatgatctgcctacaacctataggggtcctcgtacattaaaattgtttttgtattaatggaaattagcacaaaacaaatacattaaaatcgttcttgtattaatggaaaatcgtttttcgtttttgtattaacgaaaaatccctagcaccagccacaaatatactggtaaggcttgtgagcgaacattcccccatcgataatctcgcgaatggatctatatatacgaggatgattacaggacgcgccatgaagtagtattgttctattcccaattttccatttcttttcacatgatcctcctatacatatcaagcttttttgttttttccgcttccttttttcatatttatttctttcgttagtcttttttatagttttattaatggaatttttaatatgaattattttttatagttttattaatggaatttttaatatgaattatttttttatagttttattaatggaatttttaatacaaattatttttgtggatacttagaatttagcaagaaaaaaactttaaattaccaacgaaaaatccttagcaccagcaacaaatacatcggtagggcttgtgagtgaactttcacccaccgataatctcgcaaacggatctatacgaggatgattagaggatgaaccatgaagtggtattgttctattcccagttttccatttcttttcacgtgatcctcctatacatataaaccttttttgttttttccacttcctttttttcatatttctttcttttgttagtcttttttatagttctattaatggaattttttaatatgaattatttttgtggagactttcttcatacattaactttatatatgcgaagcccaaaatatagactttacatatatagagtttctatatagattttatgtatatgaactttcaatatatagactttatatataaaatgtttctatatagacttcatgtccataataaaatttatatttgcaattagaaagtttagtgcataaactttaatagatattaaaaatgctgatcatgcagcacccaatattttttttgaaaaaaagaatccaattgaacgaatctagtaaagtaaaatttgtgtggcagcatggatttggtttataactgaagaaacaaaaaaagtaatcacataattaggcatgaagagatgttatgccatgctagacccaccccaaatacatagcatactcaaaccccactaccatgatatgttttatttcgttgcctgtcacgtggcgtgctgcgactcgacttttttactcatgataatgtaacttttgtggggctaacaacaaatcagtcgaccaataaaaacaatatgatatcgggcgctcgctctttgtacagcttctttcttcttgatttttcctcctctgctgcatgcatgctaatacaacaactttctttttcgtatttcttcatgcatgtgtaactcaacatgtttcttctttttctaatataaacctttctcaaactttaaactatttttaatggtaaattaatgattcaatctgtgacccaattacaccattgtgttctttgatattaaatcgtacaacaagctctcacatgactatatattgaataatatatataccatatttctaattgaaacatttttatattatacttgaaacatttaatatataattattgaaacatcataaaatatttactgaaacatataacaccattacgtgtaacattttaaaatgctctagtgaaatatcataatatatttatttaaacatctaaatacacatgatgtgaaacattagccaaataactattgcaacataaaaaacttaaaaaatatgcaattaacatagtcagtttctaggtgaaacattgacttcaactatcgaaacatgtatattttttcatcgaaatatatttgagtgatatcttattgtaaatatttaattgtgacaaaaataacggtataatcgaataatcgattggataagtaacatatgagataaaatcattttacgaaaacatagggcatccaatgtgaacataacaagggtcataaggttgagttggcagcttgtgactagccttaggttgtgttcggcagcctatgttcccaatacctctcccgcatattctacgcgcgcgcttttcaaacggctaaacagtgtattttttataaaaagtttctatacaagaattgcttaaaaaatcatattgctccatttttgagaaaaaatagctaatacttaattaatcacaagctaatggaccactccgttttctatgcgtaggagatttgttcccatattctccaaatgatctcagccttaaatattgtggaacgtaacaataggccattaaatgctaaagttgaccgtaagcttatggcttggtcacaagagaaaaaaaaaagaataaaagtactgcacaaaggagggagtcaattcattccttgagtaatactacctccgtcctaaaatagttgtcgttttgagttttttttttataatttgtggtcattcgtcttattaaaaaaatatgaaattattatttattttatttgtgacttgctttattatcataagtactttgagtgtaacttattattttttatatttgcattaatttttcatacatgaagaatggccaaacattataagaaaaaagtcaaagtgatcactaattagggatggaggtagtagaagacttcaaagaagcactgtattttgactaagtgggacccatcttatttcctcccataggttttaaccattgtggagtttgttatagctagttctttttcactgagcccgaccgttatattactacccattgttacatgtacattgagaatgcccttacacccaccaataaggttgtctatttgctttgctactccgtagcagtagtactctacagactcattatgcaagcacgcgagcattctggtctccgaattttggtgtcgacctcaggcgaccggacagaagtaatctccaacttttgttggaaattaataattatgtgggacccaactgagaactgtctaactgcgatcaaaatcatcgtggcagtaagtcaagatgcctggttaactaattagggcgtatgaacaagtcatcgtggcagtgcaactgcactgcaaccacgtacggtagcaccattccatggctgtcctcctaaacccttcgtcttcctcaagcagcaaagcaacgccgcggccgccgcagcagcagcagctactactactcttgctccacttgctgctcgttgccgtccccgccacctctctcaccttcagctatgacgcggactccttcgtctccgaagatttcaggcaggaggacgacgccatggtcaccgccggccggatcgagctgctcggtgaggagttcgcggcgcgggccaggggacgcgcgctgtacaagcggccggtgcagctctgggacggcgccaccggcgaggaggccagcttcgccgcgagcttcaacttcaccatccggtcggtggctggcaggggcaacgccctcgccggccacggcatgacgttcttcctcgcgccgttcatgcccgacatgccgcaggagtgctacgagggatgcctcggcctcttcgaccagagcttgacgaggaacacggcgagcgccaccatgggcaacgcctcaggcgccgccagcttcgtcgccgtcgagttcgacacgcacatggacgggtgggacccgagcggccggcacgtcggcgtcgacatcaacaacgtcgactcgcgccgcgggaactacgtggtcttgccggaggacagcctcgtcgacgccggcgtgatgtccgccacggtgtcctacgacagcggcgcgaggcggctcgacgtcgccctcgccatcggcggcggcgccgcaaccgcaacgtacaacctctccgcggccgtccacctgcgaagcgtgctgccggagcaggtcgccgtaggcttctcggcggccaccggcgaccagttcgccagcaaccacaccgtgctctccttcaccttcagctcgacgctgccgacgaggacgaccaacccgccgccgccatccacctcgtcagccaagacggctcatctcagcgccgccgtggccgcagccggcatagcactgttactcctcgtcctcgccatcaccatcctcattcgccgagcgaggaaacgccgccgacgcgacgacggcgtctcctacgacgactccctcgacgacgacgacgaggaggacatggagtcgggcacggggccacggcgaatcccgtacgcgcagctggcggcggcgacgggcgggttcgcggagatcggcaagctcggggagggtgggtcggggtctgtgtacggcgggcacgtgagggagctcgggcgggacgtggcgatcaaggtgttcacccggggggcgtccatggaagggaggaaggagtacaggtcggaggtgacggtgatcagccggctgcggcaccggaacctggtgcagctgatggggtggtgccatggccgccgccggctgctgctggtgtacgagctggtgcgcaacggcagcctcgacggccacctctacagcaacaaggagaccttgacctggccgctcaggtacgtacgtatgtgcccatgttaccatcgatcaggcgtgttcctaccttgacgaagtggcttttgtggggcccacatcttggccgcatttacgatagcgctgcctgtagattccatcaacagggcaatttggctggactgatgaaaatacattaaccatggatggtgacgtgtccccgagtcccggcgtccgggtgcatgaattatgagtagatgattgctccagtccggcggattgtaccggtaggtaatagtatcggaaggtacaaaatcaaatctagtcgtctaaattgggaaccggaaaagagaatagggaagggtattgaacatttgaagtcactcaaattatagtaatcagtaaatgacagaggagagctgctggatgggagtaaatctcttatgattaacaaggaagggagcccgcccatttacgtgggcatgtatcgtagattgtatttcaaaacactataaggatggaatataaatcagaaaacattttcaaaatataaactgaaaataaagcccgcagagatacactgacatcttatttgttgttcaagaaaaagaatggtaaaataaatcatacatcactatatatatatatatatatatatatatatatatatatatatatatatatatatatatatatatactgtaagggaatgtaaattttcttacaataaaaaagaaatatatttaccgtaaaatagatggtatattttaatatactactaaatatgataagaataagaatacatctcatatttaaataaaaatcattttgtcgtggtcatatataaactcctctattgttattgttttaaaagctatgtgcatttttaataaatgaaactgtattagtaccactaaaataaattatatattattaatacactaaaaaataatctacactacttaactcgatgttcatcacttatttccacatcatcgactgtatctaccaaagctttcttatataatgccctgaaacattggttccacatcgacgtagccgtgaccctaaagaccagcctatggcaccattttaacacttagttcactatgagcacacccacaaaggattgcattagtaagaatgtcactttagatacattgcctatagtgatcttttactgacgccaccttaactcaaccatatgtatatgcctgtaatatttacgatggcatagtaaacactagacgctgcattgaaggacatggagggacaaaaaggaggaggtgatgaaaatagttataatttttgccccctacttatttttgtatagtattatttttaacaaaatcatagttgaaaggctattgacaacaataagtgccggtgtttatgatttttgttgattagtatttctttccgattttactattaatatattgatatattttttgatttatcgtttttctccgtagtatatgaggtagataattaagttttgtcttttcactggtggagaaaccatctttggtcggtcggcccaattccgtagtatatgaggtagattgatttttagtcccggttatttgaaccgggactaaagatagcgatctttagtcccggattcgtagtcccggttggaaaaccgggactacagggggttatgaaccgggactagaaagcatttctccaccagtgttttctggaaagtgagacgattataaatataggtagtttggttttccatctaataagtgagaaagaaaaaagaaaaaaaaaggaatgatgtgggcccagtgtacgtatcaaagtatggacgtacttgttgtttttgggaatacctatacgtgcacgtactatgcgagtttttgagataaatttaattatattttttataatagatctaatggctagaaataatgggcctatcggattttaaaattttttaaagcgccacatagcgacttaggagtgtttttaggagtgctatgtggcggcttagaagagtttgtaggaagtttaatgaacttttagtatataatagatagatgttgatgattcttgtcctacgagaaccataaactactccatcttagattataattcgttttgaatttgatcaaaatcattttactctaaatttaattaagtttataaacaatataataagacaccaaattattttcattaaatctataattgaatatatttttttaatatatttgtcttatgttaaaaatgttactatttttttataaatttggttaaacttagagtagtttaactttgatcaaaactccttataatttgaaaggtgggagtaattactactgcctctatggctctatcccaattaatcataccctaaaatttgtacgtcttagtttctaaatcgatcattatctaactgttatctatttgcttattcgtgtagaagtaaataacattgttctatatatgttcgtttaggtgtgcagtagtaaatgacatcgttgtatatatgttcgttcatctgtgtatgagtaaatgacatcgttgcatacctcacattaattcaactacacgttttcatatccacatacatgcctagtacaacatcatgaccgatgaggtttacttctaaaaggagtgatattttttgcgttgatctcggtaacatttgcaaatatgatagatcaaattggaaaggacggggaaaaatgagtagtactctgatcgaaagttcgattttatcttcgcataacagttagtaataaggtgatgtattatacaaattaccacatcacatttatattcgtactatcgtaatagttaggagttaatttggagtttttctctaaaaagaatgctataaattcacaataactcatatgatctaaaaaaatccgaaattaagcgcggtattgcacgtaaactcatatgtaaattctctgtgaaaatcaaatatactttccctgtatctgtgtatcatattatgtgactaatttttgtcaggtaccagattattaatggactagcctccgcggtgctgtacctccaccaggaatgggatcagtgcgtcgtccatggcgacatcaagcccagcaacatcatgctcgacgaatccttcaacgccaagctcggcgacttcggcctcgcgcgcctcatcgaccacggcatgagcctccagaccatgaccgccgttgccggcacgccgggctacctcgacccggagtgcgtcatcaccggcaaggcctccaccgagtccgacatgtacagcttcggcatcgtcctgctcgaggtggcaagcgggaggcgaccaatggtagtgacacctcgtgcagccgctgccaccgcgggtggtgggaaggacgacgacgacggcggcggacaggtgttccgcctggtggagtgggcgtgggagctctacggccggggtgatgatgatcagtcgtcgctcgacgccatcgccgacacacggctcggcggcgcgttcgaccggtgggagatggagcgtgtggtgggcgtcgggctgtggtgcgcgcaccccgacccgaaggcgcggccggcgatcaggcaggcggcggaggcgttgcagtcgaggaagttcaggatgccggtgctgccgccgaggatgccggtggcagtgtacctgcagccgttcgcggcttccaccatgaagtactacggcgacagcatgacctccgttgggtcggaggttgttggttactcgtcgaccagccttgcgacggcgacgctgtcgtccagctctagcttgccatcggccatggctaacaatgacagcttgagcccaagagaatgagggttttggttatattagaagttggtcagttggtactgccgtactggtagatggcacatggtagataaaggatatactcccatgttgcaataactcattccaatctgcttgtaatatttgaatgaactggtgtccttctgctccactagtggtgaaatacccaaggcaaaatttgctacaagacacctaaagtttgtggcatttgctgtgagacatccaaagaacgtgtattttctcgtggacaccgtaaaaatgtggtaattagctgctggatatctgcctcattattttattatcccttttattattttcggtggaaatggagagagaaagagcattgaaagtaccaaaacacccctgacactgtttttcttccagcttctgttcttctttcttctcctctcacactgccatgccacagcagaccaacggctccatctggcaagggcaagcacgatggcatccaggtacatgctagccccgtgtagcagatgtccccgttggcctcgttctggaacgtatgtattgacacctgcagcagcagcaatgccaagccgagccgtgtgcaaactggaaaacggcgttgattcgataccccttagcgagtgcgagcagcaccagcaggagcaggaagggccccaaggggagtaggtatgcagtatgcccctgatttcgctcgcactactgctccttgcgaggtcaaggacggagaggaagaacagaagaggggatctcaaaagggaaaaaaaatgaaaaaatgagccatccctgtcgatccacccgtggcggaaatggcggacggggcatgcgtcccgcgcaaggatttggccgacggcggcggtgcccacttcgccgctaccccatccgaagcggagccctggggaggactcctagcagcggcgcgccgccccgtgctccagcccagccagtcccgcaccgccccgtgctccagcccagccagctccgcgccgccctgtgctctagttgctgctgcagcggcggcgcccacttcgccgttgccccatccgaagccgcaggaggaagaagatgaacagagaaagagggattgacaagtgggctcatggacaaatctgtctttaaccaatgtctctctccgtttctatcgaaaataataaaataatgagacgagtgtctagcagctaattaccacatttttacagtgtccacgagagaatacacgttctttgggtgtcttacagcaaacgccacaaactttgagtgtcctgtagcaaattttgccaatacccaatgttaacaccaaaatttagtatggctttttagtgaattcaattaaggaaagaggtcgattcatgtatgaaagtttaccaagatcaaactgacttcaaagaaaaaccgtgaagacagcgactaggcggtttcatatttttaagtatatccttaaatagactggatttgttattttcctttggtcttattttagagagccacatgggagtttaatagcgtttgtaggatgttaatggacttttagttttttaaatatataataggtagatagattaacacagtaaaaaattaattggactaattgtaacaatgaattatatagctaatttttcaaagaaagtcaactcttctactatataggtacatcagtatatttgctttacaagtaggcccatccttggtcatgcagttaattttctcggcgctgcattttgttctttttttagtatttcgtttgttgctactcctaacttccatgtttgagggaatacactggaattttccagaacatttttttactgctttttacccaccaaatccaacggttttgccatctcctttttctctatccaatggtgattacgtggaacaatctggtgaagtttcaagatttaggacccatttgaatcaaaggatttatataaaaattttataggattcaaatttcatacaaaatttttctatttcgtcctttgattcaaacgattgaaacttttcaaatcctatgaaattcctatggaatgacacatagcatatagattttggaggaaacttagcaagaggtccaacctcttggaaaatttcctttgaatctatctctctcatatgatttctgtgtttttaccgcggtccaatcaaacgatcatttttgtatttttcctatgttttgcaatcctctgttttacacttcaattcctattagaatcctgtgttttttctattcctccaatcttttcaactctgcgattcaaaggggtccttaccgttcacttttatagataaatatatagatatatactccctctgtcccaaaaaatgccaacttctggctatgtattcggatatagcctatatcgtagatacacagctagaggttgattctttttgggacataggaagtatgtaacatcttttgagaagtaaaagtgtaaaaacatgtaaagtgggcatccctttgaggccttgttaggttggcccgggtttggccgggattgggctgcaatccccgtggattggatagacgcggattgaaacccggcccacagaaaagtttgcattcggttaatcccgtcgcggattgaatcgaggccgatccggcctttccccctcgtcctaggttgggaaagaaacagctacccatatggagtggaaaaaaaccctcgcgcacaggagaagagcagcgcgcagggaaagcggtggcggtggagcggacggttaacgaactcgcacaggaaaagcaatccagaacgaacgcacggattagagcacgaaggaattggcaactctattactgagatatttctccgattccgacatgaatggagccaccgccgcctatgccaccatggtcgccaaagacagagttcacctcgtgttctctctctcttatcttcctcacctactcagttcttccccctctcgcacgaagaactattacaggaattagacttaattacttggcctagttaggcccatagtacttctggtttatcttgacgggccttgttgcacggcgcaccacttctccttcagctgcttcaagttcatcttccctccttccggaatcagcatcatctccagcgtctttagcaactgacttagcgccctcggacagtggttgctccttgacaatcccctccccttgaaatttggcttgtccccaagccaaagcagtaggaaatcgagtgcgtaagtcctccatgttttcccaagtggcatcctcggctgcagaatcagaccagcggatcagcacttgaagaacagcatcggtagccctcttgaccaccctgctatcaagaatctgagaaggaacttgcagagcagagttagctttaggcaactgaagtgatgaaagctctttataacccttagccgcccttaactgagatacatgaaagacaggatgcacactggcagttgcaggaagctgaagtttatatgctactgtgccaattttccgtaacacctaaaagggaccaaaaaacttgaaggccaatttatgattagctcggagtgccactgaggattgccgataaggttgaagtttcaggtatacccaatctccaactgcaaaagatctgaaacttctcttcttgtcagccatatgcttcatttgctgatttgctctatgtaaatgctgttgcaccaatgcttgcatcagtttcctctcctttagccattcttgcaaatcaggaatttcacaagtgtccacattgattccaaaatgcctaggagagtgcccatataggacttcaaatggggaagtctttaaagaggaatggtaagaagtattgtaccaatattcagccaagtgcaaccatgtgacccatttagaaggattggcatgagcaaaacaccgcagataaatctcaaggcactggtttactcgttccgtctgtcgatcagactggggatggtaagaagtgctcagattaagttttgttccagaagcagagaaaagataagtccatagctggctagtaaaaattttgtcacgatctgatataatcaccaatggtagaccatgcaacttataaatattcaacatgaacaccttggctacttcaagagcagtgaaagggtgggccaaaggcaagaaatgtgcatatttagaaaatttatccaccacaaccattatgcagttataagatctttgacttaggcaaaccttcaataaagtccatgatgatgacttcccaagatccatcaggaacaggtaatggttgtagaagccctgggtacttagatctgtcaggttttgcttgcagacaagtttgacattgctgtacaaaatcctttacttgagatttcataccctgccaagcaaacagtttcttgatcttactgtaagtgactggaaaaccagagtgtccccccattggactagcatggaactcagcaatcaattgtgactagagagaaggatgattaccaatccaaatgcgccccttgtacttaataattccagactgcaactgaaatccaggtttgcagtcaagctgaacagacaaggctgaaagcagatcagaagaatagggatcatgttcataccccttagcaacctcttgcaaccaactgggaacacaactagagatgatggacaactcagaatcactttgaaactttcttgatagagcatctgcagcagcattgctggtccctttacgatagcaaattttatagtttaagcccaataacttggtgaaagccttgtgctgccatggggtatgtaaacgctgatcagataagtgcatcaagctatggtgatcagttagaattataaattccccaagttgcaagtatgacctccagtgatcaactgctaacaagatagccatacattccttctcataagttgatagcctgtcacaccctaaaaattcaaaatatataaattgttgtttaaatggaatttttagaaattattttaaaagcctagaaaagaagatctaattttaattaataaattccaatataaagtggggccagataaaatttcattaaatactttgcttaattctataattcctagatttttctgggatttatttgagctaaggaagtatttttaataaatggaattgcatttaagaaataatttaaattgaaaaaggttttaaaaagtctcttttggctttgggccgaaagtcggcccaaaacccctctctctctctcctcggcccagccggcccagtccgcagccgcagccgcccgcgcgagcgcgctgtcgctgacaggtgggtcccacctgtcgggatcgtcgtcttcctccggccgaaaccctagcgcgtcgccgccgctttccaattcggccgatcctttccttctccggccgaatcaatagaagggaaatgatcttcgagatctcctctaccttttctcctttggaaacatcggctaaatcgtttggaaattcgtggattcgagtttgtttcggattcgattttcccgaactttccttctcgtcgccggccgacgtgggccttcgccgttgcctcctagcccctttaaaaggctccccggtgtctcctctacccgccgccacctttgccttcgcctctcgtcgtcggaaacgccctagcgccgtgtgccctagcgccgccgtcgccgccgtcgctccagccgtgcgccgccgccgttccagccgtcgccgtcgctcgggaagaccgccgtcgtggtcgccaagtcgccgccgtcctcgtccactccttcgccgccgccgaagaccgccggagcaccgtcgccgccgtcaacccgaagtttgccgccgcttcctcctcgtcgccgtcaccgtccgttcctcttccgccatcgctttggtcgccggtgagttcgccgtgccgtccgctacccgttggtgtcctccgttcgtgccgaagcgccgccgttcgccggcgagcgtgcgccgtccgagccgccgagccgccgccgccggtggtgacgtcatcgccgacgtcatcgtcgccctctcccgtgagccggtcgtggaccgatcgatctcggccgtctgttttggatcaagtcgatctcggccgtccgttcgcgtgaaccgccgccgtgcgctcggtccaccgaaaccctagcccgctgacgcaataaatcctcttttccttttcaaaaaataattcattattgcgtcataattcaattaaaatcagtttaagtgttttaatccgatttaatctttaaaaattcataactaattcatcttagatccgatttagttggttcaagtctctaaatttttctaaaattgagatctacatgttaaaaatatccacatgtactgttcatgcttgtttatgtgctgttttggtgattttgctcttttctgcttagattccgtcgtttccggagagtccgttttcgccggagaagagtttgaagagttccaaggccagcaaggcaagtcacacagatcccaaacaaccctttgagcatgttgatcccgtttaaagctattgtttctattcaactattgcatttattttcgaatgtcattgggtggaattaacctattgtttgttatagcccttttgttcttgattactttattccttgataccttgggttattataacttgactagttgagctttatttattggttcaactagatattagatataattgcttagccctgattagaaacattagcacactattgggataacttatgactcactattatttaatgatggcttaatgatagttcacgatggtcaatcgtgattggttaattaattaatgtgccaactaaaacctggtaatggtgggttgtgagcacatggttttgatggtcgtgctcatgacaattaaggaccggttcacgagtttcggttgtgaaacattaaccgtgccaaccacaagccagcgtgggcaacggctttatcttttgtatagcatggttcattgcggggcaccagactgagaagtggcggagataagcccacgggggtcgctggggagtccatgccttgtttataagggggtgattatgatccaggaaggtgcgctgcagtggattgtgttatgcaaggggtattgtcacaactcttttccgaggtaccgtggtggtattgaggcacatggtgacatgatgtggggttgtgtcttgtgggtacagtggtacacctctgatcagagtaaaactattcgaatagccgtgcccgcggttatgggcgggtctaacaatgtctgtcgtgattagtcccacacttctcaccatagtaaatgatgctataattggtaataatttgattagctcctggtttggaatggtacattcctggtttggagatagaactgtgcagccgggatggttgttcagaatggttgggcctatacaacagggtatgttgtgtagcgttggattaatattgtttaatacttaactgttttattaaattctgaaatgtttgctaaatgctgcttttgcaaatgaaaccctactatgccatcctttgttatcctgtgcatttgcatatttgctgcgtggcttgctgagtatgtcatatactcaccttgcaatcattcatcagaggaagagttcttcaatgaggctgatggtgtggaggattaggtgtagccttggtcaagctgcctgtggagtggagccgtctgcgccgtttatcttatttttccgctgcttagatctttattgtttgagaggaactatctacctctgtaatgacattttattcgcttattaattagagtaataattgtactctattatcaatttgttattgtgtgcctcggctgattcctggacgagggttcacacacatgtaagcgtttggaattttggatagaaattccgggcgtgacatagccctcgatttcggggaccaagtgccttgctaatgtaggctattgggtgtttgttctgagacaggacagccccaatccctgaatctgaagcatcaatttcgacagtaaaaggcaaactaaaatcaggtaatgccagcactggggcagaaaccagagcttgtttcaattgttggaaggcagtttcagtctccaaagtccatttatatggcaccccttttcgtagtaactgagtgattggtttactgattaatccaaatcctttcacaaactttctgtaatagccagccaaacccaagaatcccctgagtttctttttggttgttggtgtttcccaattaacaatctcttgaatcttgcttggatcagtagataccccctctgcacttatgacatgacctaagtaggtaagttgctgttgtgcaaaagaacacttggataactttacttgccaatgatgttgctgcagcagggttaacacttgcttgaggtggtcaaggtgtgagggcaaatcagggctataaataagaatgtcatcaaaaaataccagagcaaacctcctcaggactgatttaaatgtctcattcatggcaccctgaaaggttgctggagctcctgtcagtccaaaggacatgaccttgtattcataatgaccagtatgagtgtgaaaggctgttttatattcatctccttccttcatccttatctgatgataaccagcctgttttatattcatctccttccttcatccttatttgatgataaccagccctaaggtcaagttttgaaaaccatttagccccaggtaattcatctagcaattcatcaatcacaggcatggggtaggaacacttgacagtgatggcattcagttgtctgtaatcaattactagcctccaagtgccatccttcttcctgactagaagggctggagatgcaaaggcactctgactcggttggataacaccactttgcaacatctctgaaatttgtgcctcaatttcatccttgagggctggattgaatctataagggcgaaggttaacaggcttggacccaggaagtaaaggaatgtgatgatcacatattctctttgggggtaatcccttgggtctaggattgactgaatgtcatcagggatttcagtcttttcagaatgagatatagacatcaactgtaccataaatagcagtgacccaaccttagccattcccaaacattgatcaggagtaatagaggagcatctgtcggtttgatgagtaacaccatacagtctgacaggctgcccatcaatcacaacctctagccatttgttaacccaatccacctgcataggactaaattgttctagccagtccatgccaagaatagcatcataagagcccaaattcaacagcttgaagtcgctcttgaaataatgaccttgagtccaccaacgacaccccagaatttgctgtgtgcacttcatagtaccaccatctgctattttcacagttacagatctacttaaaggaatgaggcccacaagcttgctgccaatgctctcatctatgaaggagtgtgtactgcctgagtcaatcaacataagaatctctgttccttgaacccatccccttaatctaatagatttggatgattctgtacccccacaaagcttgctgagatatagccatcaatcctccatcaattgcctctactgattcaatagggtctttagctgtcaggatgtcatcagaattacactcagagcgcattgcttccaataattcttggacaacatggagctggacagaagtagcacatttatggtctctcccccatctttcaccacagacaaaacaaagacccttagcccttctgtaagacttaagagaagcaaatttgtcctctctggacttagcagattccactccctttttgtcatcatgtgcactaacagctacagatctctgtcctggaggcactggcacataattgttgagttttggtactggcctgaacgcaatgtgattatcagaccttctgtgtgtagtagacttattactttccaggatttcttcttggagcaaggcaattgaacaagctgagtcaaggtcctggggtctctgtagcataactgcacccctgacatcatccctgagcccttcaatgaacttagtaacaaaatacacaggggtgagagcactgtcatatgccattagctggtgcatgatactgtcaaattgttcaacatattcagtgactgtgctgttctgttgcgcatggaaccattttctaattagtgcttcctgtatatctctagtgaatctagcacagatcaagtcacacagagtttgccaagtaatacccataatttgagaacggatcgactgaagccaaaatgctgcattaccactgaaattgagtgtggccaccttgacccaatgcataggattaataccatagatatcaaagtattgctcacaattgctcttccacatctgtgggttctcaccatcaaacttagggcaagtcataggaggaagactagtactcagatcggtgtgatgctagaagaagttggtgattgcacagtagaatccggagaaaatggactaggtgagatgggaggaggattccgcttaccatgcaaccatggagttccttgtgctgaagcatctgcagcggtttcttgtttgatcgcgccaccttccatcagctccaccttgtggcttagtgtctgcacggactcgctgagtttttccaccttctcctccatcttgggaagacaaatctccaccatcttcttcagatcagcgagatcatcccgagtcctcgcctccgcctccattctcttcttctcattctcctcaatagttctcaacaagacatcaagtttactctcctgcgacatcctggaatttgtgagcgaacccaactagatctagaatcccccgctccttcccgaactcagttaaccaagagaaggcaagttgccttattgtggaatctgttctaagaacaattccaatcctccccctggaattttacaaccgcgccaaggaattcttggagcgtagaggctctgataccaattgttaacgaacttgcacaggaaaagcaatccagaatgaacgcacggattagaacacgaaggaattggcaactctattactgagatatttctccgattccgacaggaatggagccaccgccgcctacgccaccatggtcgccaaagacagagttcacctcgtgttctctctctcttatcttcctcacctactcagttctttcccctctcgcacgaagaactattacaggaattagacttaattacacggcccagtcaggcccatagtacttcaggtttatcttgacgggccttgttgcacggcgcaccacttctccttcagctgcttcaagttcatcttccctccttccggaatcagcatcatctccagcgtcttctgcaactgacttagcgccctcggacagtggttgctccttgacacggacgtgactgggattcgacggcgctccgacgacgcggcgctctcccctccggcgaccgtctcctccgctggccaccttctcacttttgagtctctcttccttctcctctcttcttcctatcctacctagggtttggttcttggtccttgtttcttggtttatctccgtctccaactgcaagggctcctcctcatccaccatcaagaacaaggccttgaacatggtgctgcttgtcgattgcgtatgaagaacccaactgctggttgcggctatgcccagctcctcaaatcagatttgagccgattgtgaattggtgatggatttgggttcactgttatgccatttttttacacggtccacacggaagcgagctcaactcggaaatatatctgtctatccactatacatgatttctatatcttcttaaaattcaggcaactcaagattcacatctactatacaattgattctgaaactttgtgcattataatgttcattgcgttatgtctagtagaaggaaaaagaataattggatggtagtagttttgttttcttctctatttctgtgataggtaaactgatgtctactcactgattttccttgcagactccttgaaattgactggtagggatgttccatagaatttctttgatggtagcagtttcgtgatggtgtcatttatagactaattaactatccaatgaagggtattactgatgtgtcattttagggatgttgggagaagtttggattttgttgtgcatttagactaatcaatcatcgaagtcgccacagatggattcaacttgctcagtatcagtgtctactgatgtgtgtgctaaagaaaccagtggccactaattaaccatcgaatgaatgattaattttggataataacactatgcctccaactgaaaatagcttatttcttgatcaggtgtaattgttgacattgtgacatgtcagatcttcaacaatgcctgaatgcagttcattcagccatctttaacaacctttcaagcagttaaatggaatcagaacaatctttttattatatcatataattggaatattacaagcatttcctgtaattttggctggcactacattggcatcaactttcttgatccaggaagttgtaacatgcgtgtatattgttttctagttttctctgaaatggactaatggtacttttgatcttgctcctacgctgccgtcacagggtactagcactactggttttaggtaaatagtggtaaccaaatgtactaatagtagtaatacaagtccagatcataaagagagctagcaatacgctcctatattccctgccaatagctgctatagtccctgtcaaaacgaacacagagtttctaagagagggattggaagaaacaagggatttagtccccacagggtttgagtgaaattggggggattcactcaatccctccctggtttgcttccccttaggatttaatccctagcaaccgaacaaggcctgagggattagaatccatcttccgctttcagcgtgcggttctccaaattgttttatttgcgtactgcagagcttctgagtcagccgtgtcggggagggattatttcaactctaaaagttcattcattacaatgtttatatcctcagtcaaattgctgcagtcgtatgcgtaatgataacatatgcaaatctgacgacgcgaaatctaaaatgcgtgcggtttgaaaggcttgctcgaggtttatccttttgaatatggggagagcaaagtcatcgtctctcactcggtccaaaaccatgtcggacttctgagttctgacttctgtactgcttttatatgcgggctgcggtgagtccccccggctgtaattgtactttgttgtcgttgtttgttcttctcttctcggctgctccggtgctcccgttcccaaatatcattcgcgtattttgcttataaccatagaccatcggttaagagttactaataacttctcatttgcggatggaggagatagaaggtaatttgctggagtcctcgattggatggctggcggataccatagtggagaacctggacaacgacaagtttggcgcgtggattagccaggtcgggctcgccgatgacaccgaaaagctccggtctgaggtcgagagggtggaggtggtggtcggtgctgtcaaggggagggcgatcgcgaacaaaccgctggcccgatcactcggtcgtctaagggaggtgctgtacgacgccgacgacgcggtcgacgagctcgaatactacaggctccagcatcagctccaaggaggtaaagcgtgtacataaaaaatacattgttcttcccttcttcgtaacgcaggacgtcgtacgtactttctctgtttcatattataagaattttttatattacccatatgcctagaatctttaacatccatctatatgaactagcaaggtggcctacgcaattgcgcggatagtatccatacaaaattatttacatatgagtttacttaaaatttgttaaatagcttccttgtatattaggactttaaaagactaaccttatcatctctatttttctaattttatagttttttaaagtcacacttgccgctacctcttgctctttttcacccatttatttgcttgttcgatctactacggcatctattcgtcctcctttgaactttaaaatagaaccttataaattttagacttaatcaactcattggctttcatttttataatttttagaagtcccatcaaacgccgccactctactccacttatgcccgtccgtctccttctctctttatcgtcatttgggttttaaaattcaaatataatgatcgtcggtgttcacttttaactttgtagaagtcccaccaaaccgtcagcagcttagccattatactcctatatggcccgcccgatgtcttcccttttaattgtcattgtgattttaaaattcgaacatgattctcattatggtttatttttttactttcctgctaaccatcgtgtttgtgctgcttaacaggttacccgtcattgggattctatttgtggttttgtttattgtttttacccttgttgtcttccctctttaatatcattgaggtttatttttttactttctagaaatccagccaaccaccgtgatcgtactacttaacggcctatccgtcgtccctccttttgatcgccattgggattctatttgggttttgtttatagtttttagatgtcccatcaactgctgtcacttaattcctttacgactttgttgcttcttccctctttattgttattcgtcattgttgcgttttatagatggatggtgtttattgaaaatttcatattttttattccgatattatattatttataaattatatttatacttgaactcctataattatttttatattttcagaatttaatttgatttttatttcaaattttaattaaacttatgttatttttattttatattttattctgaattctaattaatattgtattaggttcttatatggactcttcatttaatattgcttatttttagtttcgaatttcaattatttttaatttgtattcctacttaaactcttatgtcctttatttttctaattttgggttttattttatttttattctaaattttaattaatatcgtattggattcttatatgtaatcttctttcaatattacttattgtttattccgaattttagttatttttaaaatgtattcctacttgcacgcctaatgttacgttcctggtccatttgctcatgcataatgatattcttacattgttttattccaactgtattggttatttgatttttttttatttctaccttgagttaacgtgtcctacactggttagatttgtactctgtatttgattacaggatctccatgcaaatatgtccgactcctaatcctaatcataaaggtttaattaacttgccatcactctatatagaatataggtcggtcccaattttctgtagtcgttttctagttggactccaatatttttcatgtgttaatctgcaccattgaaaaatctaaacagctataatctaacgatcaaaatagtttctctttttcttcgattaatgtggaaatttctagcccccacagcgaacgtggtgtcttcttttagagctattttaataatataatagatagaatagatagatgtggacaatgctagaaagtcttgtaacctgaaaagaggtagtacacttgattccaatttccgttgcacgttttaatcttggttcagattcatgcgcggatgaacatggagtagagcaagcagcgagaccgagttgcaacgctggcatagcgagtagcagtggtggcaaaaaacgatccaaggcttgggaggacttcgatatcacggaaaaggaaaacggaaaggcggtgaaggccagatgtatccactgtcacacggtggtcaagtgcggttccgacaaagggacgtcagttttacacaaccatctgaagagtgacaattgtaagaagaaacgtgaagcaattggtccgccaccagacccttccaggtatactaccaatctgtgaatgatagctaaaaagagacaccatactgcctttagatttctagaaattcccatatctatccatctatctatatatataaaaaaagacaacacaaaaaatatgaaggctagaaattgcccatgttggctatgaaaaagaaaagaatagtacaaatagaaatacaatctaaaaaacaattgaaattcgaaattaaaaataagtaatattggaagaagaatccatataagaatccataaattaaatttcagaaaaaattctgaaattagaaaaagaaagaagaaagttcaagtaggaataaattttgaaataactaaaattcaaaataaaaaataaaaaaaaatcctaaatcagaaaaataaaaaagcgagtttttgtacgaatacaatttataaatgactaagattttgttcaagtaggaatacagtattaaaaataataattaaaattcggaattaaacataagcaatattggaataagagtccttataataatgcattaatactttattaattaaaattcggaataaaaattagaaaattatgaaaagaaaaataaaaaagagagttttagtaggaatataattttgaaataactaaaattcgaaatagaaaatagtgaaaaaaaacaatcaatctagaacccaacacgagtttaattaaaatttaaaataaaaaataaaataaattcttatattaggaaaagaaatgagagtttaagaggaatacaatttttaaataactaaaatttagtcaatgtaagaatacaatctaataaataactgaattaagaattaaaaataagcaatactgaaaaaagagtccatataagaacataatatgtgattaattaaaatccaaaatattttttctgggatttgaaaaggaaaaaaaaaagagtttgagtaggaatacaattttgaaatgactaaaattcgaaataaaagaatattattgaaataataatcgaacacaacacgagtttaattaaaattcaaaataaacaataaaataaattcctaaattagaaaaaaaattaagtagaaatacaatttataaataacttaaatttggaatagaaataacgaaagttgaaaaaaaacagtccttctaaagcccaactcgggattgaatttgttagggttacagataaggcatacctcatgtcctacgacttacgagatatatcgattaggtataccttcgcgtatatggattgttcctgtaaatgtcacatggaaactacttcaaattatagaaaatatctctacgggtcaagtgatttccaaaatcctactcggaaaggatagagtttctgttatactgtaccaggtccgatatcctcaagcttttcttggggggcaagatgatccacggtataaaagggacccctgggaggggttcagggaatcgtatctcatcttcaacacacctcccgaagtttatgaagccggagtacacggagccaactcagtgggagatctcgtcgaatctctcgactacgatctcgtcggtaccatctgtttcgactactctctttgtaatgtgttctcatcatcatcaattccatataaactggactagggctattacctgataagggccctgaaccagtataatctttgtcttttgtctgcttgatgtcgtactacatagaccctcgttccaatgtaccccaatactctacttatccggtctacgagtatcactcgtcgacagatttaaatttagaattaaaacaaaattaaattcaaaattagactagaaaaaatgcccatgcgttggaacgggtaaacaaaaattatatccaagataaaaatattatctgattagggtttagtttttcatgatatgagccctttaagaaaatatattctgaaataaagaaagaaagttctaaaaaaagaaaagaaaaatcgaaaggaaaaaaaaggccttgtcggacccccgccggcttgctagggtattcacgcacatagcccatgaagcgcgcgcggcccagcaatgctgcggtccaagggattttggactatttgccactttcccggatggcgtgttctcaaatgccactcttccaaagaactttgctttttttaccattggagagagatgatttctttctcattggccatttttgagctggtgaggcgctacgtcaccagatatgagggcaaaatgaccattttgcctttcttcttcctccagcttggggtctctctccttcaaccttcttcctgcgcatgagctggtgatgccatcaccaccaatgccaaaccatcaagccaaggccaggacgacgtgaagaggacctcgagcgtcccgctgccgaatggctatggaggagacgaacggcccctggctcttctaccacccaatgtgcaccctcacctcctgcatcgggcagcgaacaatgaggcaggggaagccctaaggctgggtctgacgcagccgtcgacgtcgggggagagtggagaagatccgagaggaggacgacgctctgtgctcagaggacaacgatgacatcgatgatggagtgaggcaccagcaatggcatcacattgccggacagccatgcccgctgatccttgatgacgttggcagtaggaatagaggaggggctggggatgtagggagtcgagtgagggagggaggagcacaaggcggggagctcgccggagcctaagcagctcactggcaaggaaaaggaaagatgtaaaagggactgaggaaggggaggagaaatgaattaagaagaaggacaagatagtcattttgcccttagatcaggtgacgtggcgtctgccaggctcaaaaatggcacacgagcaggagcccaccgctactcctcgcaaataaatatgcatatctatttctaatgtgatgctaattttatttcatatcatattttagggtctcaaatatcacaaatataaatatgcaacgctaatttaaatatacatatgtagaaatgaaaacaacacaatttagtttttttattttacaccattatattagatttattatttaaaaataaaaaaattatcgtatatacggatacatgagaaacatatagctattaaccagaaaaagtactccatacgtacatatgatttaaaga

SEQ ID NO: 7564 - DNA, 36614 bp, Oryza sativa
ttcctgcagcccggcaacgacgacgacgatgacgatgggccgggccacgacgacgacgacgatgactacggtgaccacggcgaccggtgacgacgaccatggcaaccacgacgatgggccgggccaggggcggcggatgtgcggtggcgggagggggtggaggggccacgaccggagggcctcctcctcctcctcccctcccctcccctccctctccctctcccagatctagccggaggaagggagcggcggacgcagcggcggcaatggcaggcgggcgacgacgattttaatgtccagtttgatgtttatttgtattactgtttcatatatgcatgtattgatgcttgtttgtggaaaatgaagtgagaaattgatgtagtgttcttttgaggttggatctgatgtggatttgaattgttatggatttgagatttggggatgtggatttgggaatgcaggtagcaacatgtgggcatatttatttttgctggcggctgaagggaagctacataggtttttttttctcaaaatagattatctctggtggccggtataacacaacaaccaacaaaaatcgattatcgctgacggccggtataatacaaccgctagcgaaaatcgattatcgctagcggccgataaccgctagcgaagatcaatattttctctcgcctttgctccgccaaggaaaacctaaaatggccgccacgaaagatgatttccgtagtagtgtggagtcctctttcgagcagatctgattttatctcaaacttccttgtgagtcaccaacaattaaaataataaaatgttgcgccacctatcatgggtctttgggcttataacttagtttaggtccccaggccaaatggagcccaagtaggctgcatcctaacttgctgatgtacgaccttaagggttcctttgctgtcctcccacctcttcacctccttaaatagctagggacctcttcaggttcttgggttttctttagattaacgtttagtcattgttacttttctgggtaaagccatgatcagttagatcatacctttctttttatggaaccctaagccgtgatcccaagtagccttcatggcaaattttcttatttctttcacttcctagctagagattaacatgtcagcaaagaacacatcatatcaattttgaacgagtaattttatggttctttagaatgtaccaggtgggtatagcacattttctagcaactacaaattagactagctagaaatttgattactgatcatgaatattctatttctataaattaagaatggtttttttttcaaatgataaattaagaatggttctagtcagaaactaatattagatagtcttttgttcccagtaactcctcgataaccaaaaaaaaaatcaaacaaaattacataaatatgtacatgtgaataatgtacattgtataccttaattacaattctggtcccacaacttcatcatttatcatactacaatacctgagcagtctagctacagcacagccactactcccaatatatacataccaccatgcatgtatttttcctgaaatactggtacagattacaagttcatttttcatttgcccattttatgctataaaatgtgataagaatgagaagtcccaggaaatcgcaaaatcctcgtgccaacgagccaaaccgggtgcttgatgccgccagctgcatcctactacagctgcatttctaatttttagctgcgcgcctgcgccagcttactagcatccagcttactagaatctgtttctttctttggctgtgtttagattggcccaaagtttaaaatttggttgaaattagagacgatgtgactgaaaaattgtatatatacgaaaggtttgatgtgatggaaagttggaagtttaggaaaaaactttagaactaaacacaccctttcatccttttgcttggcttaggtctagtttgcaggagtaggctggctcgtccttgctctgcgcttgtgctaggattgtaaaaccggatgcgccggtgaacttgctctggctgtcaagccgtgtattcagacatctgttatgccttctataaagttgggcagtgagccttttctctaaaaattatgtttgccaagattttagtgaaaacggaatgtgtattaaggtgttgtttggatccgggactaaattttagtccctgtcacatcagatgtttgtacactaattagaagtattaaacgtagactaatgataaaactcatttcataaccctggactaattcgtgagacgaatctattgagcctaattaatcaatgattagcctatgtgatgctatagtaaacatgtgctaattatggattaattaggcttaaaaaatttatctcatgaattagcttttatttatgcaattagttttattattaggctacgtttaatactttcaattagtgttcaaacatccgatatggcagtggcttaaaatttagtactgtatccaaacgccacctaaaccaagcatgcagatcatgtaatcttgggctggatggatgttaactaaaatacattggtttctacatcaaaaagccatactggtttggaacactgttcttaaatcagaggtcataaaggttcattatatgctttaaaaagacactttaagagagaaactgccggttcgaaaaaagtacaaaatgccataaacagatgtgtttatgtgggaaatcttcaaagatcaaaacatggaaaaactaagaaatgatttaatcagaaaaactaaactaaaatattttggcatataatatatacttaaaaaggaaaaaaaattaatgttttacactactaaactttcatcggagtccaggaaaacggtctttgaacattgaaatcatgcacgtgtaggagttactccctccatattgaaatgtatgacgatgttgatttctcaacatagcattcaaccattcgtgaatgtgaggtaattatatattggggtgtttagattcaggggtgtatagttttaaagtgtcacatcagatattatatagggtatcacatggggtgttcggcactaataaaaaaactaattaaataatccgtcagtaaaccgcgagacaaatttattaaacctaattaatccgtcattagcaaatatttactgtagcaccatattgtcaaatcatggagaaattatacttaaagattcgtctcgcaaattagtcgcaatctgtgcaattagttattttttagcctatatttaatattttatgcagatgttcaaacgttcgatgttggcataaagttttgggatggaatctaaacagggcctgtgccagtattcactgcaatgtattaccacaaacgctgtgaagaagtacaaacatatgaagaagtacatccaatcaatttattcaagctttacaaatgtggctggttcgggctgtcttccagcagtttgatatcacacctaccgaacaactggataaatttcacatctattaacaacatgtcctccattcgcaatttttgtagaaatacttttatcatgttcttcacacacttcagtgccctaacttgattcagttcgtttccaaaaaataggctttacacaccacttgcaacagtttctactaatggattaggttgagactgaaatcccacaatcttttggcgaggcccatgtcgagcgcatgagattttaattcagtgacattgcagtcaacaaagtatttgccagtgactccagcaacctgaggatgcaatgccacatagcacactgtggctgcaccctgcaaaaacaaacaatgctaagcagtgattatgtgtttggatagtttgcacaattgtttgttggtaattggatggtttgcacaattaaacatgttatgaattactgaattagtaaaatttcaaggagactttgtcctggtgccagttagttcatggatttaataacattaactctacaaaaaatagtccctggtagagtcatggtaatattgcagctcctgttttttcaggttgcaggaagatgttgaatgatataagcaataaatacattttttccatatttatatatttattaggttaattattccatgatacatccaattatttaggagcagtcaaaaagttttagaatgtacacttaccactagtactaggattaaagttttagaattattttgtgtgtttctgttgaataaaatgtttcagaaaacatatgtaatgaaatagacataaattgcatacacaataaaatacaaattgaatatacaataaaatagtgaatataactgtcacaagaacatatgtaatgaaattgacataaattgcatacgcaataaaatacttaaattgaatatacagtaaaaatagtaaatacaactctgtcactttagtcttgtgaaaggaacagaaaaaaaatgatccaaaacttacttgttcaacacctttaacgaaaaatttaccaagtgtagatagcatacctgaaattaaaaaacaaggaagaacaatcactgtgcattgtttccagttcattattcattcaaataataaagcacaaatgtggggcttttacaatttgcactggacaaccatagtgatcttcgatgaatgaaatatttctttaataaggtaatgctctcaagaattttttgtatatggaatgatcatgcactttaatgaacaaaaaagttctggaaaaactctttatacaactggaagagaagtaaatcagattaataggctagaaagaagatgtatccatgcaattaagataatagtgatggcaactgaagcctaaacttatgtgactacatagaagaaatggatgtctcatagctgtactatagatgaatatgagcacaacgaagcaaaaactcaactagccagaaagataaaagcaaatactgtctgagattcgatgaaccatccatgaagattgatttagctttattttgccaagaactatatgcatttgtcagatatgcccataccatttacgaaataccagtgacgcataatgttggtgacaacagctccaggatgcagagagttgactgttacttttgcatcttgctccttttagcagacaaacattcatcatcaagaaaatatgtgaaactttttgaaatagtaatgcgatcattgatatcatctattcacagaacagctccataacaaaaataacagggctttgacatccatcctctgcatagctttgctattatgagatctattttgtgataacttcatattactgtctcagccaaagatctacatgatttagttaacagcatgtctaacatattacagttagtaatttcaagaaaaatagcctactacaatttcttttccattttacaagattacaaaattgtgtaattttgaggacaaacagtgtgtacaattaaataaacaagagttagtgtgaaccaccagttgttccaaatacgagcttaaaggaaaacaagaagaaaagtggaaccttcagattgctagatagtaaattggaatgcagtatgttggcaagcttggattggccgtaagcgaagattttgttatacctagcgggagagaataaaaataattaatttcgaatatgatgtttttgtgcagatctgttttcttacctttgatcgattgaaaaggtaaacaaatgtaaaaaggagtatacgttgggtcagaaagtaatacccagattcatcattgatcttatcaaaacgaatcccctctcgataagggtgcttgtagctgttagaagcaactatcacaacccttccttctatcccactttctatagctgtaactttcatcttctcaagtaaaagatcggtcagtagaaaatgccctgcattgcatgattaattgcacgatgcagttacacaataataacagaaattttgcacgtttgtaaccaaacatggttacaagatcagtcaagtgaaatatgaccacacacaaatgtgtaaagtacatctgtcttagtaacaaatagaaaataaaacaataatattctatgaattttggcaaaacctacttaaaataaaaaagttttagtatgcagtttaagggactgtaagagggggcctaccaaggtgatttgttgaaaaatgcagctcaatgccctcctctgatagcttaaatggtacaaacgcaatccctgcattattactttaaacagagaagactaaaactattttctcaaacataaaatggatgacgtattcctcgccaaaaaaaggcaatgtaaaaaaagaacacttcaacatagatggaataaaagttttttagtagaggtctgatggactgttttatcttccagaaaatgactgtactaatgacataacccagtaatacataaatactgtctattaagcatgctttgagtgtctgaatcccaatagccagctcaaatgctcattccagtttatttagcacccaaattctctatgttgcagaaggttttgctgctacaataattctgtaaaacagcataatgttttttttttctttttgcgaggaagcataatgttttgttctaccaaatatttccaatatacataaacattagatctgcttacaccaggatgttcagaggaagattcagagcattgaaattctccgcaaatctcctcacagaagacatcaagctgaggtcaagatccagcatctcaatctttgcagccggaagctgtctcactatctcatccctcacacgcgcaccggcagatgagttccttacccccatcacaacatgcagtccccgcatcgcgagaactcggcatgtttcagcaccaatcccactggaggcacctgcaagaaacatctccaatcagcaactattccaccagcatttcaggccttcagtacaaaattcgattaacgaagcaggaattggagcaatatgcaagatttactcctactgcttgcatcagcctgaagagtaaatattggggaaaaattgattaatggttggtaaaactataaatacatttagcatataaatcatctttcataatttccccccagatttatctactgcaatatgcaagatttttatacaccgaacagtaaactttgccaatttcccctcaaatcgaagagaatcactaaattcctcgagcaatttcagttcagaccaacgattcttggattcgagcagggaatgttcagaagaaacaggagtcaaccgagaaccaggggacgctatgaagtatgaaccgaaccaagaaacgaccagctgctggaggagagatgagagtacagttcacttgccggttacgacggcgacgaggccggaaccgtcgacggcggcggtgacctcctccgcggtggacgacggcgagaacccggaggggcttcgccgcctcagtaggccccacattgtcttgtgctgccgtgggaagtgggaacagcttccggccggtggcttaaattaagacactcaacttgcttaaatagaacgtttcagcttccaatcaaacgtataatactcctgttttgtaagacgtttcaattttaaatggttcaactccatagaagttgacgaatggctattggtcaatttgtaaactcatttgctccctccgtttcatataataagtcactttgatttttttaaaaaagttagaagtttaaccaaatttacggaaaaaataacaaaacttataatgtaagttagttttattaaatttatcattaaatatatgttgataggttgtgttgaaaatattgctaaacttttctataaatttagtcaaacctacaatagttcgacgtaaaataaaatcaaaacgacttataagagatggtagcatatcaagacggtccaatagggttccattatgtagcaaattttatagcaatccaacttttgctactaaacacacatactgccccttctgtgcattaacccttttattagtatggtaaattttgccaaaaatattgtgacttcgtgattttaaccttaggacatcatacgatgagttttagagaagacactctataaatacgataatttactcgtgtacaccacgctgattattttagtgtattcttagataccatctattttaatcggtgaggtcattaatccatttcttttctcttcctcctccttcccgaagaaacaatcagcctctcaagctagttctcccctccaatttcaccgagccaccgctaaagtcatttgcccatccgccatcgtcagcccgctccagaagcaccatcttgccaccaaggccagcattggagactgcaaaccctctttctctctcctcaaacgcaaacgtgttctaatcgttatcattctccttgttgttgccatcctccgtaacctgtagatgagtcacgttgtgggatatgtagtcctgccgccatcctcgttgtcgtttcacggtcaacacgttgaggcccgcgctcactgtgctcgtgttgtatcaagctgaggaagaacattgccggatatgccaagggcaattctgcctcatcatgtacaattgtgggccctctcacgcgttgtcagatcgaatacattaaaaaaaatggcatgatatccatgggctaattaccacgtttatagattgtcatgatttcctgtagcaaatattacctattagtatgtgctcccttcgtcccataaaaacctaatgttgagaatgagtttaaacctaattttttcctggaaaccaaagttggtcaggaacttattttcctgtatctgttctcttccagcaattatttcagctttacatttatcatttctgtacagccagtgctccattcacaatttatctttggagatactttattttttctaactagttttggtttatttcccatagtagactttacatagctattgcgacaacaatttctatcaacggatttggctgagactgaaatcccacaatcttttggcgaggtccatgtcgagcgcatgagatttcagttcagtgatattgcagtcagaaaagtatttgccagtgactccagcaacctgaggatgcaatgccacatagcacactgtggctgcaccctgcaaaaacaaacaaggataagcattgaatgtatgagtatgagtggttttgagcaattaacagaaaaaggttatgaattagtaaatttttcaaggagattttgccacttcataagtttaatataacaccaactctacaaaaagtggtgtctgagtctcctcaattctctaagtcctgtctactctcccttctccctcatcccactcctatcctccgagtggcagcgacgagaggcgaaggcaggggcggatccagaaaatagagtcattgggatcattactgaaatatggtggtgtcaatatatatatataagagagtaattcttgtttctagagtgcattagcaaagagattagtaagaagtcattggtgtccgctgacaccaatgcttacactatggatccaccactgggcgaaggcacagctggtttctagcagcggcgatggttgcttcgggctgcggatcgatgatgacaatggttgcttcgggtggtggaggtgtgtcaagcttcaagtgatcgtgacgacggaatcaatggcggtggccgcgtacaggagcggcggatccggcatcaaggatcttggctacggcggatcaggcgctagcgagctcggcgatggtgggtgtggtggtaggtgatgaggacatcactagcttagatatggtcatggctaccttaaatatttatcaagcaaaggtacatgctttctatgtaagatttacatgtcatatatttgaacaaacactattatactatgagtcttgcatgtgctcgtttgtagaggaacttgcttgggtgaaggaaaggggagcggacatacggagtgattgaatgatctatgaagttaattggggactaaccaatatccttcccaaagtttatccccatgttaccacgtcacttttagttcatagaagggaatagatgaaattctacatgttttagattcagattcgggcctcctgacagcatcaacttcaaacggatccaagccaagggggtatgcgccctagagattccgtttgaagttgatgctgtcaagaggcccgacttaggttagagacgtcctagggatagtcctagggcgcacaccccttatgacgtctctaatcatatttacagagattccttctataagttgtgggctaagcccaagggggtgtgtgccctaagactaaccctaggacatcttcagtcatatttgttcaatagttgtcatagtttagagttggattttgcttaaattatttctgccattgaagtttcgccgctagtttggtttgtgaaaccccaactttaaaatcttaatcattcatctacatattaagttgcaatctaccttgttcttgcttatgttcttcgattcgtatgcagggattagccttctcggcgaggtcaatcgggttttcgacaggattgataacaagaggaagtgtggtgctgcgattgcagggttcggatcatgttaattggtttgtcgtttgtaaaatcatttatgtagtgcaataaaaatgttggcaaaaaaatatgtgttacctatcaagtaaacacatggacttagattgcatataaaatacatataatgcatataacataaaacagaactctgttacttttatcttgtgaaaggaacaaagaatgttctaaaacttacttgttcaacacctttaacaaaatatttaccaatagcacggatagcacctgaaataataaaaaagaaggaagaggaagaatataactttctatctgcagtagaaaaaaaatgcatttcattctctcaaactatttcattggagcagttaaccctgaactagtagaaacagtgcaccatacggtatttctcttttttctctctatgtaaatcgtattttgcgccaaaaaaatggtagtgttgatagatgaagtataacctacctctccatttttttctgaaatttttaatcactgctgtttacagagattggaagcagtaagttgacttaaacatcgaagtcttaaattttaagcaaattgtcatattttttaaaaactttgttaatggtgtcatgtatggcttaaaaaattttaacttacaataagacttgcgtaaagaaaaacaaataagggagatgctattgaggattaaagtgaaccaaattagccaaaaaatagttcaggggttagcaatctaatggaagagtttgggagtagtaaaattccagcccttgaaaccaatatgtagaaggaaaatgtcatgaagctataagacctagattagttgctagttaggcacgatacatcaaactaaacattctacgaggtgagattcgaccaatcattcatgagtattgaacttgctttatttttccagtaataacttgcactcgtgagatatattcttaccatataggggacaccagtggtgcaaaatgttggtggcgacagctccaggatgaagagagttcactattacttttgcatcttgttcctttcagcagagaaatatttatcatcaaggaaatctgtgaagcttttagaaatagtaatgcgatcactgatatcatgtacttagaacagctccataaacacaaataacagggcaattgacttccatcctctgttggtgttttaccactaggaggtttatttttatgataacttcgtattattaattcagctaaagagccgcatgattttgttaacaacagaatagtttaacatagtactaccatttttttataagattacagaacaggcaaacgatgtgtggaacaaaaaaaaattaactagagttagtgtgaatcaacaggtgttcccaaagtaaaggaaaataaagagaaaagtgagaaccttcaagtggctagataataaattagaatgcaatatgttggcaagcttggactggccgtaagcaaggaatctgttatacctagcaagagagaataaaaatatatagttgaatgtgatgttcttgtacaaatttgttttctcatgttttatctagaaggtaaataacatgtaaaaaagaggcaaaatgtgttgtgtcgcaaagtaatacccagattcatcattgatcttatcaaaacaaatcccccctggataagagagactgtagctgacagaagcaactatcacaacccttccttctttgccactttctatagctgtaactttcatcttctcgattaaaagatcagtcagtagaaaatgccctgcatggcattattaactcaagaatgcaatcatacaacaaaagcagatgttttccacataagtaaccaaaaatgggtgtaagatgagtagtccagccaaataggcaaatatgatgaggtacaagtgaaattatgtaaagtatgtactgttttggtaaacatgcaagtccatggattgaaataaactgaaactctaatattctacagtataaatttagtttcatgttttagcaaaaccttcttgcgatcaaaagtttcagtttggagtttaaggactgtaaaagtggatcataccgatgtgattcgttgcaaaatgcagctcaatgtcatcctctgaaagcttgaagggcacaaaacaaacccctgcattatttctttaaacagagcagaataaaattgtttagtcaaagatagggcaatatgtaaaaagataaagataaaacatattcagtagagatggaatagagttttttagtggaggtttcaaagtcacttttaccttccagttatactgtcctaatgctcaacctagctaaacatcaatattgacaattaatcttgcttacagagtattttaatattattcaatatctcaaactctcaatagccagatcgattgctcaatccagtttgttcggcaccaaaatccctacattgcagattatgttgttgcaattatagttctgtaaaatgcgcaatgtttctttctaccaaaacatgccaatgtagccaatttagtactattccctccgtttcataatataaaactttctagcattatccacattcatatagttgttaatgaatttaggcacatatatatgtttagattcattaacatctatatgaatgtgggcaatggtagaatgacttatattatgaaacggaggaagtacatccaaacatagatttgcttacatcaaaatgttcaaaggaaggttcaaagctttgaaaatctctgcaaatctcctcacggatgacatcgagctaaggtcaagattaagaatctccatctttgcagacggaacttgtttcaatatctcatccctcacgcgtgcaccggcagataaattcctaacccccataacaacatacacaccccgcatcaccaggactcggcatgtttcagccccaatcccactggaggcacctgcaagaaacatatccatcagcaatgatgccaacagtaattcaggtctgcaatacaatttgattaggattttttttatggcgcattaaattactgtgcatcatccatcacccattgaccaaagggattaatgttgcatttacatcatggatggtaaaatatcatatatttttttactatttaaattctaccaaaggcaattattgtagtccaaattttccttaactaatttgacattcaggtttctaatactataaaaatacaaaaatcatgttccaaattgaataaaaatttccatagcggaaaaattgaacatggaaggttcggtttataacaaaagttaaaataaattacttttaattgtatatagttccggaatagttgtttgatttttatcaaaattcagatgattatgcaaagcgatactcttaaatcttcataatcaatctctagaaaaatttcagtgcccaaattatattttgaacaacaaagctttggtttataacgaaactttgatttaaatattttttttgcttttttttcaaattaggatgattatgtaaagacatatatagctttaaatcttcaaaatagatacttttagaagttcaaaacgaattgtgaaaatcttgaatgagaattttcaaatccgcataattcaaattcgacactagaatattaatgctaagattgactagaaaaaaaatccatttgaatggatatcaaaattctagtatttataatctgaatcatattttaattttatgtctcctatttggaatcaacgatttttaagtcattcatttatctcttttgtaaagtataatatttgttttgcacattcattctgtgcattagaattccttgcaaccactattaaaattctctgatggttaaattttggaaaatattctatgggtactaacgttttccttttgttatgtattttattaaattaggatgtgaaaatatatttgttaatagataaaggaaataaaaagtaacggctaagatttctttatactgtatcagtcccaaaatcagcatgcatgaagagcaaataaaaccaagtgtctctgattaatagaaaataaatattggtgaaacagaagataatatattttctaaaaaaacacggtataaacgaaggcgcttacaacacatacatttacccttgaaaactcacacactatctttatgagcatctctgggagacttggtcatcatatcttgagattgacgaagtcaccacgggaatcccgttatcgatggatacgtcgcttaccactgaagaacagatagccgtaaatctgagcatgcatatcaagtttaggacatgaacccgagtgggctagttccaccacaagtaacctaattaaggtacgatcacctcgcaataggtaacaaatatcgaatgaatggaatttctttaatttatagagcaagagcaggtaagataatagaagtagcaattatcacaagctagaaataaatttattttggaacggaggaagtggctcgattgattagttaaggacgacctggagcaatacacaatatattcactaatagatgaattagttagcatgctccaatagattgattagttaaggaccactttgcatgctctaatagatgaatcacttggagaaatacactaatagattgattagttaaggaccactttgcaagctgatgaattacttagctaccaaaccaaaaaaacagaaattctacgagcaaagccatgtttcagaggagtcaatcaaccaagaatcaggggatgagagtacagttgaggcttaccggtgatgagggcgacgaggcccgagccgtcgatgccggcggtgacctcctcggcggtggacgacgacgagaacccggaggagctgctccgcctcagcaggccccacatggcgtgcggtctttgagtttttcgccggcgtttaatagttttggtgccggaagtcatgaagaagaggcctttcagctaccaatctcaacacaccgctcctgctcatctacgatttttataagccacatattttaatttctaattatatactccctctgtcccaaaaagaatcaacattgttctagcttgattctttttgagaaatgttgattctttttgggacggagaaagtaggtgtaaggttagtagtaatataaatgcatttattataccaaaatacactggtgacttggactgcggtgtcacttaggttcatcaacttataaatcgcaagtcaaggtccacgatcttgttcaatgtaccaactgtggtccaaactacctttaatcaaaggtactgccgtggttgtcaacggagaaaaacattttgcattcagtccacaccataaataaccgtggcaacaaatttgtatttagccccttttgtatgcctaaatcgattccaccaattcggttccccgcctccctgaagtagggagtaatgattagagcagtggtgattattgatagtcgaaggttctcggatcaaaaaagagtaggagagggtgatctcatgagtccagtacggacctcatcttcgtgaagaagataccacaccacaacagttgtgccaccttcctctctctagtacaccctactctcgtcgcactttgtgccaccctagccattgccgctttccccttcctaattcaaaagaggagaagagagaggaaaactttgggttgaggatgaacttgaagcgaatggattaaatgcatatttgtttctacagtaggttttgaacaggggtaaatagaaaaggcttgacctattaaaggtgatttcaacctcgagtcgtatattaaactaaaattacagatctagatatatgatttacaagttgatcgattacattagtgacacagcggtcttaaattggccatgtcttttactctaagttttaatgaacttagcgtttgctaagaaaacaagtaaaagaatctataatattcttcaaaaatcaatttttcaaatttataatcatcttttgtttcgaagtggaagctttactatataggcaccaaataaaaggaacacatgatctctactaagatggagattggtccctccacccaccgctcacatcactccatcgtaaaaccgtataacttttatttaagcatcgataatcatttaagcacaatgtcagcgccagtcccgttggcgctgacacggccaacctcagcgccaatgcgcttggtgctgagctgacggcctaattttggttgaagtttttggcaggggttagtttcgaaataagtttttgaaaagggtcaatttgtccttgtatagctagcatttataatatatgtaaggacatattatgcgtgataggaaaatactttcatgaactcagcgcgtatcaattcctgattggacaagattaggagcttaagcatgtagttggaagataaattaattaatgatggttcgttggaacttggaaggtggagtagtcaagaaaaatgtttacatttgtgtaggaattttaaaccgtttttttgacaaattgacccttttggaaaacttatttcgaaactaaccactgccaaaaacttcaaccaaaaataggccgtcgcctcagcgccaaacacattggcgctgacgttggctgtgtcagcgccaacgggactggcgctgacattgtgccaccgtggcggccgggccgatccccagctgacgtggcagctacctcagcgccaaccggactggcgctgaggtgggacttggccgcaacccccaaggcccagaccagcaagccttctggatggcttgcgggctgggacctcagcgccagccataatggcgctgaccgtgggacactcagcgccagcccacctggcgctgaggtgggacttggccgcaacccccaaggcccagaccagcaagcctgctggttcgcttgcgggctgggacctcagcgccagccataatggcgctgaccgtgggacactcagcgccagcccacctggcgctgaggtgggacttggccgtttcggccatggcccagcccagcaagccttctggatggctgggctgggacctcagcgccaggtgcactggcgctgagtttggacatgtcagcgccatttagcatggcgttgacgtcccagccctgctaaactttagcaaaactttgcacacaacacaggcaaacatcaaatcacagaaatttacaggcagtaatatatccagagaaccatacaaaacatacatccatccatcaatcccaacatcattccatacatccatagaatccatcaatacatccatatatgaagtccatacatataagaaataaaaacatcccatcgatcctcgtctatacatccagtcgagtccatacatccagtccatacatccatcgaaccatgcatcaagtccatccatctatccatccatccattgaaccatgcacttacctcctcctacctctagtgcgaggacgaggcacgtcgagggtgtacctccagtcctgcgaaggagcccgccggcgtcgtggtcgagacgggccgggctgcgagatatccggctgtgacgactctggtgcgtcctctagctgcgagggaccgagctcatccgcctcctcttctctgtcctcatccccttcttcctcctcatctccttcctccgcctctttgtcttgctcgccctcctcgtcacccacctccccttcttcatccccctcttggtgggcatgagcatgttcgaccatatcagtcgacctgcagccgagccttgctgccaacttccgacatcgctgccgtagtctctgcataaaaaataatccatgttaagttatcgcttttggaagaaaacaccgtagtttcatctctttccaacgattacctgtagggcgttgcggagggtgccgccctctccttcggagccaggagccgtgcctagcgccactcccgcgtcgttgacggtccgcaagagctctcgagcctgtaggattgaaatgaagtaagtcacaacatatatggcattgaaatgaaataatatacaacattaatgctagaaactaaccactctgtcgcgaacaggtcccgtctcgaccgtggtacctagacgggtacgagtatcgtactcgttctgctcctcaacatcctcggggtcatccgctatgtcggctagtgtccaagccggacgtaggacaagacggtaggtcctgtggagccacgccaagtacaagtcgaactccgtcccgttgtgctgaccctggtctggtactccattctcctcgaacttctcccattgcgtgatatgatcctgatggtagtaagcccaatcagtcaccttcttattcttccgaaggtccaccctgcacgtatgcaaaatgtccaactcaaatatgtagtaaatgttgaagtgactgattgggcaagcaaaataaattgttaagtgaaattactaacttgtgtaggtcgatactcgtggagaaacggtgcgggattgtttgaagcctcccgaattgccgcatcacgcggtggcacatctggaactccactgcatagaagcagatcagtgggcaccgtagggtcttcaacgcatcctctatatggcacatgggattcagttctagctcaagcacttcctgtgcctgatatggcatccacaccacctgcagcaacaaaaataaaacacattgaagcgaccaggctagggcagccgacccccagctgaaggtacccgcctcgtcccagtccgcgagcaacggcagccacatccaagaagccatgtctccaccagagtcagggaacagaatactgccgaagatgtacagcacgtacgccctgcagtatcgctgtactgtagcctcgtctgcctcagcgggacactgaccgaagttggctcgcaaccaactcaaaggaacccctgatgtcttcgtctgcctctgaccatcaggtgccactggaggctccagaccaaggtactcctcgaccctctccctccagttccccgacgctgtgtcacctgtaaccggaaattaaatggaatcattagtaattgcaaaaaaattaacaaatgaatacgaagactcgttagtaattccctgacgctgtgtcacctgtgaccgcctgaccccggataggaagacccaggatcatggcgacgtcctccagagtgaccgtcagctccccgcacggtaggtggaaggtgtgtgtctctggacgccaccggtccactagggccgtcagagcagcggcgttgtacagaggcaccggtcgctgcgccatggtcacgaacgccaagagcttcgcccgccgtaggtacgggacgtaccggtcgtcgaacagtatgtgctaacaacatgtctaatttttccaataaataagtacattactcaaatactacacattattgataaaaaaaaactctactcctacaaattacctacccttcaccacacatcaacccctttcaaaccctctcaatcaccacaaatccatcccacatcctaggccatcaccacacatccatctcccatcaaaccctagtgcatcaccaaacatccatcccaaatatattttgtcaaatgtatcaataacaaccaaatggataaagatatgccacctccacacttcatccccacccatattatccatctaataatccatccttagccaactattatcaaaccacgtctacaactaaaacaatgcaaaatatccaataaaactttggggaacttagggtttatagaggggtttaccttctcttccgatcccaaactcaatgccgcacaaatcaccttcgattagagaggtttttgggggagattggacgaggagaacgtggtggcgaccgaaccctaggcgggcggctggggaaaaaacggaggaagaactggctggggcggcctcggccgggctctaagtagccaaggtcagcgccaacttacttggcgctgaggttgggcacctcagcgccgaagcggttggcgctgaggtagctgccacgtcagctaggggatcggcccggccgccacggtggcacaatgtcagcgccagtcccgttggcgctgacacggccaacctcagcgccaatgcgcttggcgctgagccgacggcctaattttggttgaagtttttggcaggggttagtttcgaaataagtttttgaaaagggtcaatttgtccttgtatagctagcatttataatatatgtaaggacatattatgcgtgataggaaaatactttcatgaactcagcgcgtatcaattcctgattggacaagattaggagcttaagcatgtagttggaagataaattaattaatgatggttcgttggaacttggaaggtggagtagtcaagaaaaatgtttacatttgtgtaggaattttaaacgccacgaatacaaataaatgttgatggagggagcattgactttccatttttaagtaagagatgtcatttttatgtttataaggatgtcacataaacaataagatatttaaataataattgaaatagcttgtacgtagttttattttttttcataggtaaacatgcaagcacaaacaatattgaaacagtgtatacatagttttgactaaataaaacatatttcaccccctcactttattaatttctggtcacatcgttaaaaattcacataatgataataccattagaagtgatcgtcttaaatggaaaaaacacgtatttgtgacaggatgaagcagctataaataaatgcaccagatgctcctttctatgtttaatcaaattatgaacagtgtttcaaaaaaaaattatgaacacagtatatgtatatcccacttgtttactccacaatagttgattttttacagggacatggacagttggacacatgtgggacaacaatgctttgaaagttgatagggaagttcgaactaactctggtcatcccaagcagtaaatggtgcaccctatctatctatcgacagactaatagttccatgccatttgctcaataattacatatgctatttttttcgttaagtacttatacgtgcattacttttctgtgattaagtgtaagtttcaatttgaggaattaaataacttttctatgtaagtataaaatttgttttgattacaccaacacaaacacatactactactacgcacgtacaccaccaccaagacgtgatggtaggtgaattgtaggatcttaccatgtagtaaaaaccacacacgcttatagaagcaaaaacaacaaatccatcttccaatatttaagcgtaactgttctaaaaatacaaatatgtaccagtgttcaaacaaatattgtgttaaaccatgaagcaaacaatttttaaaaagtaaaaatatagagcaaactcataaatgatacatgtccatcgctagtttgtttgcttctgcacctatcacacacctaccaatttactcctctgtaagtgtgtgataggctatgtcgatgtgccacagaggtgttctcagccaggggtgggcctaccatgattcatgggtattcagctgaatatccaagattttagattaaaaaatttcatatatgtaatatatatttcatatgtatgtggaaaagtatgcaaaatagacttgttccttcagagaaagcctaacttagcaccatcccacctccctcctctactcggcccattggcccaataacacaaatcaacccaaaatggatgtaacccttacctctccagctctccttcccaatctcctccttggcatggcaccctggccccctccccgaccccgacacgatggcacatcacctcccacccacccccttcctcaacggcggcagcgcccagccagctgcgacgcagcagcggctgctaatctcacgccacgcgtccgtgcccctaggccggccgccacgaaggcgccattgcccacacgccgccgcccctgccctgtggctcccaggtggtgggccagccggtgcccgcactctgccgcccgtacctccaccctccaccagtccacctccagtccctgaaccgccttagacttagacagccagacccacacgacggtggaaggttagaaacattttggtaatttggttggattaggattttagtatttagttcatagttgaatccaagatggttcatttgatttaggatttaggatatctttgaatctaggaatggttcactgttgaacattttttatttaggatttgaatccagtcattcagggatggttcatgattgaacaatcaaactttgaaacttgtgattcactgattttgtgaagctttgtagcagagttagtacttataaattgcatcagtgcacatattcagcagagttagcatagttagtacttaaattggaagaccatattgttgttttataggtttgaaacgtgaataggaaaaatgctcccacggttaatttaaaggcttttttagaaacagctgttgcaaataagagaactcaaaaacaagttaagaagcaagatgggataagaatatttgaatgattgtttgattacattcgttgaaagtgatctattcttccaagttaaggatatagacatcattactcattttcaaaatatcaagaaatggaaagttcttatctaaattgtaagatttcttatcattttttcattttctatgctctataaatttaatatgttttgtcaattaaaactttagtattgtactttaatatgcttaacacattcaatttatgatcaattatatgaatctataactttaaaaaatcatgcttataccgttatatattatacagctattagactttatgttgaaaaaaatttctcttccagtttcaaatacccaagttgaaaatcctaggcccgcccctgttctcagctgttactttacaaagcttgcagagttgaagtcttgtctgtggctttggctaggttattgcaggagatttgaagggctttgtggtggtggtgactaactcgtgtagggttacgatttatttttgttcagtaaattgtatttttttatggttttaagttttaatgcaaatctggcggaaatgtctttttcaactagaaaaaaccatcacattttgctattaaatcttcatatgttcacttaatccgttccaatttactatgttgttctggagaaacctcacccaattgccaatctaaaatccatgctagcaagggtgctgatgtattcatatgtgattcttgactacaattcagtcagaacaattctaaacccgcaatgtatttaaaaattcacgatagtttgtaacacaatgacaattggctcaacaaaaaaaaatcatggcatttggcatatgtttacatgtaaacccatatgcattataccgttggtttatatcagtttacatcagctataataataaacaagtttttattatgttgaggtgaaagagagggtgtgttaagagagagaaacgtaggcgcttgtttggccagcgctagcacaagctctcctatccgtgccatgggatctactaagagcacccacttggtaaagtaagatgctctctataaaacatgtacatctcagcaatagagtaaaccacctcaatagtatgtctaatagtatgtctatatggatatctatagctctctaatgcattgcctcgtttttctctataggttatctctaggttagtagatagctttactcaccctcttcatttaatctcttccaagtagaaaaatatgctgacatggatctcttgtagagagcctatagataatcattacgggtgccctaatgcctaacctatgggtgaccaacaagatgaaggtttgttgagtaatgaagtcgcatatttgattaaaatataattttgatatttgtataaaggtataacaatagccactagccagctattgtacatatctcctttttacgtggctgtgccgatggcgatgcggactttttaagtagcaaccaaccatactattaaactacttgctctaatttgcaaccattaagttgagttctgataagtaaatgcggtctgaaaaggatgaggagaggattagcagttattcagaactgcagagacgtcccttgacattagcactatcccaattgctgacaggaatcgtgatctggagctgaatttcaccgataggttttatgttcttggtcgttttgtgtggccatcgcctgagcatatcattgttgggcattttcggttggtaactttttctctcctttctttctttgatgatatatggagttgtttgtttcaattcagtttagttcattattttgaaataagattataagggatacactaatgtccaaatttagtccctgactggaagtgaggaattatcctatacatgtggggaatgatcatatcctccgtaaaatttctaggaaatttcaatgttataaatggggccttgatgttatctttacactacttttatactatctctctccgttccaaaaacgactttatttcgagctatacacgactttgtaaccagcctgatgccctcaactcaccaagcatattgtttgtcaaacaggtaaaggaaaaatggtcctgaaggtctgcaccggatgacaccccataatccaacctgactagttccatttattccagccaaaattgcatatcacaagcatataatctctacattgcatatcctatccagataatcttagtattgaatatccatatactccctccgtacaaaaatataaggaatttcaataaatgagatacattctactactacaaatctgaacatgatatatctcatctattaaaaacccttatattttgggatatagggagggagtatccatcaacataagttagaaatattttctttttttaaaaaaaaaaaactgttcgttccgcctcattgaatctaaaatgtcaacagatggacagagtgaggcagcatccagcatcatgaaaccacgttatgctttctctccgtatgattattattacctgcctgcactccatgccttcagcgcaggatcaaggagaccaaatccttttaagagctaaaactcaagaagtcaataatgaaaagaaagaaatacattgttgttatgaaaattgcacttattatttgcaacaggtaggagtagccaactataatcagaagtacttgcctcaagcatagctctggttagtctttatctctaattctctattactgtccaagaagtgctgttggtttcctgagcaaccactacatgacatgaatgtcgacaaactaaacaccctacattcaaatgaaaaaaaaaaagacataaccagctccaatcttatgagaacttgattgtaaactcttatggttagatcatgtgtccaaacaattgaagactatatgttcacagacgcttgttaataagatgccaaatcaccccatgactcccgacgcgctggcctgttttccttcactggagaaagcgtccaaattatttgtgatatgatgacaaggtctcagaaattgcccaaagaatgaacccactgtacacattctagcggcgtcgatgtgagcaaaacaagttgagaagttttatgaaggagcatctcctatgcgtattcttacgggtagcggtctagcaatcagaccatccatcacccagccaccatttgaaccatcaagtttgacatggctaaattctctttgagtataatcgagtgatgcttcaagccttccaccaggtctacacgctgaggcaacatcacttggtttgatgcccagatatttctccaaccaatagagatagttaacatggaataaagatttgagcatatcttcaggagaagatccctctttaaggatgacctgtaaatcaaagggtaaaatgtcagtaactttgtatgatagcagaatggcatcttgaaactgcttggttcaagataaactcacacaaaattttcccttgtattctgtaagaaggtattgttcgtttttgtagagatcaaacaatgcgcatgcatcttccttgttctcaattatttcactaagtttagaacccaactgcaaccgccgacaaattatttctgcagcatcttttgcctgtggtgacaaaatcttgctttcctggtacaaaattcaaggaaccacatatagtgggacacataaataagtgcaagaatggcacatattgtgaatttaagatgtattaagttgcagttaactcttgactagttaaagcgtgccttgggaatgggaggctgtaagacctcaacaatatgaaaatatagaggacaaaaagtatcagtgatttgatgttagaaaaatactttacttactttacgtgaagtaccaatagatagattcaggaaaaggggttcctcgtcgttaacctctttgactgaaggaacttgtccactcaatagatactcactgaacaccaaacctgtgagacaggagggcggcagataaattagttaatcttatcgattagtaatgaaaaccaaggaaagacagaataatcccactaaaactggatgattttatgacacaattgctgccttgcgagaggccacttatgcaattaatcctcactaaggctccgtatgccattgaggtgaattctgataatctaagttacaaacggtaatattaatacctactaaaaagttggaagttttgtgggaatgaaagttgcataattgtcttaaccttaaaatgattaataaaataatctacaatgattatatatttacatttctagatgacttagaaaagacacacatttatcacaacacaacaaactgcaaacagaggctaagcctagctgtagtcaatgccatctctcatccacagcaaaccaagacactaaataatctggaaaacacaagtgaccaagatttttcacagattagctccagcaaaatccctctccttgctgtctcatctcacgcggagccacaacatcattaatctgatcgttggatcagtaaagttaaaaccagatatctggcatgactttgctaatgcaaatacccttctttcagtgctgttggattgattcctaattgactgccaatttaatctacagagtagtccattttatattacaatgtatactgtgcaaagctgaccatcaagacctcacgagttttcaatcatccattcaaaaaaattacaattcaaaatatgatttcaaccatcaattctagaaaaacatacacatgttcagtgacaactgccatgcacttacaatggacaattttgcaggctatcattgcaagggagatatcgatatttacccaaaagaatagtgacaaaacgtgatttttttaaaaaaaaaatcgtgtgatgttttgctgagttcaatcagctacagtgcagttttggtatttgtatgtattgttaatatattgatccatccaccagtttatttgtgtttgaacatcaattaaacaacattattcatataaaaattgtgagttgtgatcatatgaaggttataaaggaactactgaacgggataagcagcagtggataaaacattacttgcacgataaggattcagtgtcctcagctgaatcgattgataagacttgaggttgcaatacatgtgaactgcagtaactccagcaaatgaaataagagctaatgatacagaagagccaatgcgattagctaatgctatccctagcattatccccaggaatttgctgaccattccttgtgcctcaccctttgcaatgacctgaaatgtaagatccaattggtatttaactacttgggtcagaatgcaaagtgggatgcgtaggttgaattgactaaatttaagaatttaaaagttcaatttctaaaaaaaaaaaaagaatccctcataagaatacaacacgggcacagagtaaaaaatctagggcatttggacaaagttttgaaaagttttatcacttcgaagttcgaaccaggttttgttaccaaacagttgcactttagatgactggtccatgtgcaagtgtgccttgcatccacatcgtccttagttccttacacattaagcaccttgcagttgatgctaacatgcttgtcctcgtgtgaaaactagattggctccttaacaactcttaggctcttagcacacatgctcaatatctcacattaggcaaccaccaccagcatcactgaagcaaacaggcactccctgatttcaggtgtagcatcctcaactggacctcaacagggtgcaccttggtgtcgtgatgctgcccctgccatcacctgcttcacggcttcctcattgatgccacaccatcaccactaaacgatgccactcccattttttctcgcggacggttgggccactggtccaatgataaaatttgtaaaaccttgtccaaagtgccacttcgatgagaaaaaagggtcaaaattgaaacttaacccaaaaaaaaaaaattgacatggtcacaagggcgatgcaattatacctatgtaccgaaccgctgcctgtggggtttataattgtaatgtatatacccaataggaaagaatgaggattcctggtgcaggcaatatagtgaactgtgaaaaggacatcaaacgaagaaaaaaaatggagagcagcaaacaaaggtggtgcatgcatgcaatccaggagcggaagtcatcaattcagcaacaaagacaaacttgctaccaatgctatagtccacacaatgctgtcatagcaaaaggcagagaacaagaccaggaggtaggagtaatttggtccagtgtgagcaaaataaaaagtacagtggcatcttttcagaacattaaaggttcgcaatggtatatattttcttgcgtaaaaatagtatcagcaatatctgatataactgcagcttacccgtaggattggatatagattgcaaggctcatacatgagaaacaaaaattattctaacaatgacatctacatgctaaacgatttgttttcatgaatgaggatagattgattttacctcagcaaagttcctttgcacagcaaatccagcatagaaacaactcctggtggcagcctacagaattgaatcattgcactaatagtggttcaaagaaaaataatgaattggcaagtacaaaatattgttgggaagcaccataaaaatcaattcataggcagtcaggctcaaatttgcagaatagagtaataatttcaaagcattccacaagagtaagcaacatttcaaatcacccataattcggtcataccatctgccacctatccatgccaatttactgatttatccattgcatccagtagaatttcagtgaagaggtatgcaggacatgattagaagcaggatatcttcagttattatgttctttatgtagtgagcaagattcaggagacaaggcaaaaacaggggaagaatcaagaaagccgaacaagcagtacagatctgtcaggaggagataatatattggaaaatatcccaaaaaaactggactaccagaatgatattgcacgttcaattcagtgtatgattaatgccaaaatatgatacctaactacaaatttggatgacacatgtttccatactaagtgtaatctgaacaatgctgaccaaatctgtaggtggaacataatacgaagaaaatgacatgctgcagcagatttcacatgaaacaatatgaccttgcgcatatggtttgcattttccagcatgaaatgggtaaatatggtctgcacaggtgaaggggtacagcaacaatgacaatccatatcaaaatcaacagttctgacctgtatcaaagcagctgctgatcgaccagctccagcggcagccccaattggaacaaacaggtgaggaaagaccggagttaaaatctccagcccataagccgtgttctccagaagatcggcgaacaatcgccacccctttgggttaacatcgaaatgccggccgaatttcgatagcaatatcttgctcaggtaccccaacccatccttcagcacccaattcaccgctgccgcggtaggtatagcgcctttccccaatccaaccgcatacaacaatgcctagacaggataaatacacaaattcaccaatcgaaaatggcacatttcaactaatagccggtgaattgcacacagatggacgcggctcaggcgccacaaccgtacctgcgtcgagagcacgccactgatctggctggcgatgccctgcacgccgcgccacagcgagtactgcaggtagtcgctgctcacgctgtcagggtacccatccgggagcagcagctgaacggcgaccgtggcgcaccgccgccacgacagctccagctggcgccgcagcgcagccagctcggcacggccggcaccggccttctccgcatcctccccctccgcctgcttccgcctcccgtctcccgcgacgacgtaggaggtcccggtcgggtccggcacgagcagcgtgcgcgcaccgcccctcacctcccagacgctcgctccctccctgccgccgctaccgccgatggcctcggcgagcgcggccgggatggcggcgaaggcgcccgagtggaggagcacgaagaggaggaggagctcggggtggagcgactggagccaccgccaccacccgtcgccggggtcaggagggccactccccccttgcctccaccacccacctcctcctcctcctcctccgccaccaccaccgccatcacagccaggagaggagatcgcgaggggtggcgggcgggagaggttggcggcgaggcgggggaggcggggagcggaggtgggaggagggggaacgaggcggggaagggtgggtggggagagaggggccgcgaggaggaggagagattgcgaggaggacatctcggaggagcggtttggttatggccgccggcggcggcggcggaggaggaggaggggtttgcagcgatggaggcgaccggcggcggcgacggcggcggcggattggaattttcaatgttggggggatatgtgcggcatagacggaccccgtcgtcaaagtttagactgggctggttaggcccggcccattttccgtgaaatgggtatcaatgcggcctgctgaggcagaatcggacggtagtacagtatcatttagcaacttttggactttgagatttacgtggctaggaataagttcattttaggtaccttaactcaacgagttcgattctcaccctcaaaccaaaatagcagatagaacgaatccctcaattattaaaaccggtgtaatatggaattataacggatggttttatccgacgtggcaatttgacatgagtcagcagcactgagtcagcatgaacccacatgtcagaatctcttcacctctctctctccctccctcagtcctatctcacgaagcagagagcagtaagggcctatttggcacagctccaactccagctccacccctcctggagttggagctcagccaaacagtttcaactccaccaaaactgggagtggagctgggtggagctctctcacaaaatgaactagagtagtggagctgggtttaggcagctccacaactccactccagactcaactcctggagctaaatttaggagttggagctgtaccaaacaggccctaagccagtgaagagaagatcggctctagtgtgggcccatgccacctaccggggaacgacggtgacggacctgcggcgcacgtgatgtctagtagaaggaggactcccttggaacgacaaggagaggatccagcgccgactgctctgctctgccgcctacttcggcaacgtagcacgtcagcttggtcgtcttcaccgcagcgccgattgctgcccaaatccccccagtgtcgggatgcctcgcttcagtcatcgtcccacctcatttggggccgatcggcaagcgagtgaactccttcgtcatcacctccgtccaagacaacgactagggcaaaggcgatcgctcgtgataaggatgagggttgggcggccggttctgacaaaggacacctcggtcgctaccgctcccccttttcccagtccaggggcatcctggcctaatcgggtcctcgtgcaaaatattaaaatggggctctagtagcctagtaaattttttatagtaaaactaaaaacgggcgtggcgatcagccgatcatcagcgatgaaatagaagcggatgccggaggagactggggagaggagatgaagaggctgcggcgtcgggatttcgactacacacgacgacgcggacgcctggacgggaatacgatggaaaatggatcggttcaccttctgcagcgttttgggcattgttttactacttcctccgtttcacaatgtaagttattctagcattttctacattcatattgatgataatgaatctagatagatatatatgtctagattcattaccatcaatatgaatatgtgaaatgctagaatgacttacattgtgaaatggagagagtactatttagggcctctttgatttgtaggaaaaatgtaggaattttggaggatttcaatcctatggaaaaaaaaaatcctatgaaggcctttgaaacaaaggattggatcctatccaatcctttgaaattcctaaggaatgggtattcctatgcacattttggaggaaagttagcaagaggtctaacctcttggaacatttcctctgagtctatctctctcatctgattcttgcgtttttcctatggtccaatcaaacggccattcttgtgtttttcctatgttttgcaatcctctgttttacaattgtattcctgtcagaattctgtgtttttcctattcctttgtttttttattcctacgattcaaagactgcaaattaacaaaattaaagcctctaatattattatatatatatgacatacttaatttggggggcctgttcggtcgcacagcccgcacgggcccaaggacacccctgctagtcgcttccacccaggtcaagccctgcagcttgctactgctgcggctagtccggccaccgcctcgagaactgcccgctggagcgttgtttcctctcggcttgttgccctctacaagactacaagtgctgaagtgcaccatggccatcgtgccagaatctctgcgccgcatgcaggtcttcatcgccatgctagctgcaggccgtcacagccggcgcttcggtcgctgaaccaggacccgccgaagcctgcccgtcatactggcccccggagccacatcgcggttcgcacatgtcacgtacgtcgactcgtcgagtccctactccctagagctcgagccttcgaacaagtcgccggcgcagcagtgtggtgctcgtgcgcacatatcgtaccaggtcacaaagccgaagctccgcgacacgtgcgaggaggtcggctccatcttgttgctccggctcgccgtcgacaggccacgggcaaaccaaggggctttttgttttgtcgattacaggtcaacgacgagacatcccgtagtacctgccgcaacggtgcaacctcgatcgccacgccctccgtggtagcgtgctccgcattggccttgccgagctggaagcgggacggtgcccgcgtggcgatggctgtggtggcggtgagctgcacgagccagtgggcatcgaggatgccacacacgccgcgtcacccggggtgttatctagcgccactatcacggattcacggtgtccctttgtggggctgagccaacggcaactgtggcctgtgggtgggagacggtggataccgtggaggcgcagggaaacgtcacgcgcgccaccggccgcatagaggccctgagacgtgggagccaacgctgactcgggtcaacttgccactcggacaaaatcactcgctatgttaccataggacctatattacacaggttttaatagttgaggtacctattgtatatggtatttcggttcgaggatgaaaattgaactccctatgaagttaaggggcctaaaataaacttattctaggactataatgaggctgatcggtagtgctatgtgcgcagccagctagtcagcccaaatctacacagaacaattgatttgtagcagcatcaacaagggtgtgttacttgctgaccgatgcactgttgtagccagcccaaacgattatttaaggttaatactaacaataggcttttggacggtctagatcgatttgagattcatcttgatatgataacacctggttctctatcggagttggggtgttgctgacactagagaagaagagttcttcaaagctggaggaagagttcgagctcaaatcttaacgtgattttggtagtgaaggattttgtagaaaatatatcctaattttctatcaaataccatttagcaaatccattgtattattgtagaatgattttttgtttattagtgttggaggtacactatgagagccttcggccgagcctaccgaaaccaagaacctgggcaacagactcgagccggaggcgagcagcgaagatcgagagggtagccatatgggcaaaaactacatggcgaaagccatggcttaaaaaacacgcgggctccaccaagcatgaacttcgtcggagggccgtacgggcgaaagcctaggcgtgaagacatgggcttcgtcgtatatcgaaccccaccggaagaaggcctagcgggccgttgcgcctttggggagtttcgataaactgttgggccgtgccatcctagcccagtaagggcccgtacatgtaaaggacactttgtacctctagtgtggtccttatcataagagtaaccatgtaaattcccctgtaaaatctaaatcctaaaggggaagtctgtaataggactataaatagcctcctagggccatgtaatgggggatcaaaaaatttttactaagcaatataattgtctttactttcaacactactgttgagagaaccacgtctttcaatatgacgcggttgtccattcgataacaattaggatgttctttgtcatgaaacgattgtgtgtattcaggacgttgtctgcagccgccctttttgttcttatcgaaatttgcatgacacagctcgcaaatataatttctagttgttgctacataacgtcaatttcgactatctcactggtagagaaaggggctttactcccggttgggaaccccctatagtcccggttatataaccgggactacgaatctgggactaaagatggataccgggactaaaaatccatttttagttaccaaccgggactatagatgataggagcagtcctggttaattgtttcactaaccgggactaaagatggtaggagcagtctcggttaattcttttttctcaaatcgatctgctccctaaatattcccgatcatattcccaaatcatccccatatcaatcaaagtagcatcacagatctggaaagaaatacatcacatattggaaagaaatgcatcacagatcacaatacatcacatcacaaaatctcaaacaaaaaatacatcacaaatcctaaaagaaatacatcacaactcccagatcagatccaatatcacatacatcacagatcaaatccaatgaatcacagattaaaaaaaaatcggtagcagagaggagggcgccaccggactcccggccactgtcctcacggcctctgcgtgagcttggctagccagccgctgcacccgcccgcctggccgcctgccgcgccagcccgcccgcccgcctgccgcacccagacggctggccaccgccgctcccgccgggcgccgctgctcccgcccggccgtcgctaccgctcgccgggccgccgctcaaagaggggaaggggaggaacgggaggggaaatgggagagggagggatggaggagtaatgagaggggagaagatcgagaggagtgcgcggataatatgtgagttggtggcgcggtgtactttttactcccggttggtataaacaaccgggactaaagatctatttttagtcccagttgtttatatcaaccgggagtaaaaataattggtataaacaattattttggtggcacgcggataatatctggcatgcggttcggggtactctttactcccggttagtataaacaaccgggactaaagatctatttttagtcccggttgtttataccaaccgggagtaaaaataattggggtctgtcttgaaccccacgacttattgaaccgggactaaaaaagatctttagtcgcagttggtaataccaaccgaaactaaagattaaaaagtacccctcaacttttaaatcgggactagagatgttttttacttccggtttttat

SEQ ID NO: 7565 - DNA, 57082 bp, Oryza sativa
  unsure (1)..(57082): unsure at all n locations
taattttgacttgaatttgcatttaattcggatatttgtgacttagggttcttcccccaaaaattaggcttcctcatttggggattttaggccaattggatccggcttattggggatttcgggaaatttcaatcttgtttattcccttttgcttgataatggggaatttcaatctagtttatcccctttcttgtttgctgagtgctagccgaaaccttagcatcggtctaggaattcttagtgtttgaattgggaatttcaatcttgtttatcccaatcctcttcttctcataaaaatcaacaaaattaaactcttcaataattttgcttcttctactgttggccgagatcagcagttggccgagatcagcagtataacagggcttcgcttatgcaaccaaggcaaagggattaatctaatctaattaactcaaaatcgcatcatgcatgccgaatagaaattagggtttaattggcataatggcttcacttagggatgatgggataaagaagtgttgatgaaaaaatcgaacacaccggcctgggagatctgcttagctcctgtgcaggttcaaagattgatgagatgcgggcgtgccagtcagtttgatcctgcaactgacaagattaacagagacatatgagatttagccgataccggcagaaaccctaaaacgagaagcagccgatagagctaaattgatatgctaagactagattaacatagacatatgataaataggtaggcaagtatatcatccaaaccaaagcaatccaagaggtcgaatgtactgatgcagccttgaactacgccgatgtagacgatacaattgcctgggccggcggaacattggacttatcccttcgccagagatcgaagacgatgcagccctgcatcgggtgccaagttccgccggaacgtaaaaacaaaagtagaagtaaaaagggtggcgatgcgtcaaattgtattgatcgtagcgataaattacacagatcctaggtgtacatatttatacccatgggttgatacaagtcctcatcggacaagaaagaaactttcctaaagataaaaggaaaagataaaatccttataggacactaaacacactttcctaaagataaaaggaaactaacaaactattcctaattaatagataacttgccatgccacattctctttgaactcggtctcttctagataagcttcatctagtagatcaatttccttaaccgaatatagcaagaatccgacaactgatgacttgacaactctcatcggctaatctcaagacttcgaagccgatgctgactctaagtcgatgactactccgggcttaccaaatttcactgttaacaagaaggctaagattaggctctgataccacaatgttggaatttattccaattaaataattgagtcttagcctaaacatggtcaccttctgcttatgcgaaaattaattgatctaactgacctgagatgaagccattgctcttcttctttcttcttcattgtttcttctgttgtgagatacctcatgaaccccttccagtgccttgatcgatcgggtgattaatttagggtttgaggttagagtgagataagtcgtcacctgcctccctccttctctttccttttataggtgacactggtggggctcgggggtctatctcaatctaaaattcgagtctattttgtaccgatcacacaaaacagatttatctcttagtttgtttcttgttaggataaggaaaccggtggtttagcccatctcctaatttttatcgccacaagtccacaaaatcaaccaacaggagtgtgctcgggaatcaatttcttgggcacatctttgatttctacagaagtattcgttctctgatcgtgtgactcccttgccgcatgggtggagtatatttgcgagatttgcacaactattttgtcactatattttatggagtggctatttggttctgctagtttatttgaaaattaattgctgctcaatttatctagtcaatggtctgtattatttgctatcttttggttactgtgaaagattgggacaaatccgggcaccatagccgtgtccttatcactctctcttctagatccacattcactatgacacacgcttgagtttggtggtggcacgccgacataggctggccggcagcacctgtttattatggtggcaggcggttggacggatggtcatctctcccctttgtctcgccattcacctttgctagccgctagtggtgattctttaccttggctccaagtggtgggggcacaacgacgttggaggcgggcgttcggctttggttggcagggtggtgaggctgcgatggaggcggtggttagacggcattggcaggggctatggcaccggttctgactggaggggtggcacgagataattgaaggcggaagacggcatcaactccggttggaggggcggcttcctcaacgtggcagcctgtacatttcaacgttgtggtgtggacgacggtgacgatggtcagcggcgagggccctaggtgtgctggctgccagatcattgctagatctggtaggacaacaaggaggggctttggtaggataacaataagctcagtgacggtgctagcggcaaccgtggagactggattcggtctaatggctagatacagctagcgttcatgtgaggacggcgaggagtggacgaaaggctttttggaggtgttgacaatggttaaggaactatgttagatcggaggcttaagtgccacgggatatgaggtgtttgtgcaggatccattcgtggaacgcaaatggtattggcagggcctcttcttctctgcctctgctagagagcgtcggtgggcgaaggtaatatgtgtcaggacatgtggatccattcggaaaatctatcaagatcacttcagtgttgttttgtgaaagcaggacagaacgaatgtagttttgatgcttagtcaagtagttttggttttgtttttcttctctttgttatgagatctgtagtttaagtattaatgatgtatctttcgattttgtacaagcacttctgtgtatataaacatcagatttgtttccattaccttttctccaaacaaaaaagtagatcacgaaaaatgaaataatcgggaacatagtcctcctgcaaagggtatcgtggcagccctacattttcaattttgaactaaccaatatcaaatattcactactagaaaaaccaattttcagacgataatatatattttttctaggcggataggcatcttggaagtaaatggccacctacgaaattgacaatggggctgagattgtcctccgtctatgaaaatcgtgcctgcagctcaccaaaaataatattgcgtcccatcttatcctttcctccaccatccactactcttttctctccaccatccttatccttatcctctcgacctttcttctctctcacgcacggctcagagggcaggggcggcatcgtcagcggtggctccgaggaggagcggtgtgggtagtcggggtatcggcaacgaggagcggcgtcggtggcagctcgggtggacgggaggggcgtcaacggtgtcgcaggcagaggggaggggcgtttgcagcggcgcgggcggagaggaggggcaatggcggcaacatggccgaaggggaggtgtgggtggtggtattggtgacgaggagcggcgtcagcggcggctcggccgaaggggaggggcgtcggtggtggcgcgaaccgaggggaggggatcagcgtggccggaggggaggggcggtgtagctcccgtccctctcctctcctcagctctactctacctcggcagctggagatggtgacgggcggggtggcagttcctggatggcgacgtgcgggtgcggcggatcaggtgacgggtgtggtcatcttcctcgtcgtcatggtcgtctttttcgtcgtcatggaagtcgacggtggtgcgattcccctaccctccctcccccactccctctttgtctccctcacagatctggcggagggggcgaaagcggtggcatggccagagggggagagggcagcagcgggtgggtggtggctttttttttctccgaaaacattttcgcaagcaggtggctatagtgcctacgaatatggagatgccgcctgctaaaatcatttttgcaggagggacaaatgtccgcctacaaaaatcgtgtattttcgcatgctttgaagttcatgcggagtggatggccacctggaaaaatcgctttggcccgtttgcaaaaatgtttttttatagtagtgatttagaaatagagacagtaataaggaggagcaatataaatcctcaaccaaaggtacacatacttgttatttcagatttaggtagagctgatctcttagatgcaccttggcttgtagataaaaaaacctattactctcgaaaggcttgggttaattctctgagatatcttccaccgctcagaaggctaccgcacatccatccatatgtaactatgtaagtccagaaaaagtcggctgttttttaggacctctacccgctctagtgtgggcatgaataaagcgtacaaaaattgttggggcaatttcgttcttgtctctacttcgattttcaatattgattttgcccctatattttaggttttcgtttttatccctactttttttttaaacgaaacagccgtttacctctattctgttaattcttgctaacggtgttcattgcggggtagaaaggataagtatacccttagatattttccggtacttttgtacaccactttcaaatttgacccaaattttggcaaactttcacaattttttgacaaattaaattactgctatagtatggcatcaatagatttgtattttgattatatcaaaagtacgggaaaatatctaatggtttacttgtctttttaccctccacatttaacaccgttagcaagaattaacggaacaggggcaaacggttgattcatttaaaaaattagggtaaaaacgaaaaccctaaaaaacaggggcaaaatcaatattggcaatcaaagttggggcaagaacaaaattgtcccaaaattcttcccccataatactcgtttaaaatttctatcaaacatttccttaagatcatagttatgtggaaagctagatctaggaggaggttaaaaaaagctacaaagaaccctactcagatgaggagttcaacctctcaaattgaactccctctcaaatagctcgagggctatataaggttgcctctacgttcctcgctaggaatacgagatcgaagaattggagagagagagtagaaacacactccacagaaattaataggagaggcaaaactcatgcggaatttaaattgcatgaagtaaatacaggaatttaaattacataaaataaattcaaatcatatcattacaaaagagtggagctaactgttacgaactctgttgatttctggaaagtttgagaggaagaagatagaacagagtcgaacaggggaagaacacagagagagagagagatattcagacttggggaaggggaagaagtattcagtttaggagatagttcagaatacaattaattcgacctcttttcccttccacctagtgcgcttatatagccgcgcgaatacatcagcccatgatccattctggcccagcgattctgacattggcccgcttgatacgctcaggtcgaactcaatgcttcaccgggttctctgttgtcggattgtccacagtagacgtatgagtagtcgctgccgtgacattcctccctccttcggaactagcctgcccccaaggcggtgcttcaggaaaatgcaggtggagagctgcagcatcctcccaagtagactcagccgacgagtgaccttgcagcgaatcttcacctgttctgtcgcatgatctcctcttttgaccacgcgtcgttcaagaatttccacaggaacaatatcttcaggtggaacagcaggaggaagacgaacatcagtaggttgagcggggtaagatgcttgacgaagctgagagacataacaccggatgaatagcgcaatccaatggaagctgcaaacggtaggccacgactcctactttagctagcacttgaaaaggcccaaagtagcaaaacgccaatttgtgattagaacgaacagccaaagatgattgtgcataaggttgagccttgtgaaaaatccaaccaccgacttgaaaggtacggtcagaacgcttcttgtcagcttgtgacttcattccttgttgagctcgcagcaaatgctgacgaagtaaactagtgatcgttctttagagatactacacactcagaaatatccaaaccaccaaaatgtctgggtggatgtccataaagaacttcaaacggagaggtgtcaagtgctgagtgataagccgtattatacgaaaattctgccagggcaagccattgaaatcatttcttcgggcaagcatgaataaaacatcacaaaaaagtttccagacactgattcaccctttcggtctgcccgtcagcctgcggatgatatgcggaactcattttcaattgtgtatctgccaagcgaaaaagttctgtccacaaggcacttgtaaagatacgttccaaccagaaatgatatgctgaggcaatccatgtaacttgtacatgttgttcaaatatgccaaacccacatcaaaagcagtaaatggatgtgttaacgccacaaaatgagcataatgtcacgcccagaattcactagtaacttccgaacttatttgtgcataaaatcctcgtccaggaatcaaccgaggcaatttaatatacaaatccatcataataatatcgttatattcttacaaaagaaaaaaaaacagcagcggaaaaacgatctagcgatggtttcagctccactcccacaggcagctcaactagggtataagccaaacgtcttctccttctggatcctttttcttcaactgaggttgattgattattgcaaggtgagcatatgacatactcaacaagccacacagcaaatatgcaagtgcacaaggataccaaaggatggcataatatagactcatttgcaaaagcagcatttaacaaatatttaagaatagtaaaacagtagagtaatcatcaattttaatcaacactgaacagcacacttctaaacaaccaaacccggctgcacagatctaactccaaaccaggagctaagcaaattattaccagttatagcatcaataatttttgtgagaggtgtgagagtaatcacgaaaaacattgctcaacccgcccataacagcgggcacggctattcgaatacttttactctggccagaggtgtaccactgtacccacaagacacagcctcaacatcatgtctaccatgcgtcgcgatactagaaagtacccgaatagaggttgtgacaatactctctgcacaacacaactcaccacagtgcaccattcctggatcataatcaccccctctataactataaccagaggcatggactccccagcgacccccacggacttctcgccgcttctcagtctggcaccccgcaatgaatcatgctatacaaaagataaagccgttgcccacgctggcttgtgattggcacggttaatgtttcacaacagtagctcgtgaaccggtccttaattgtcatgagcacgaccatcaaaaccatgtgctcacaacccacctttaatcagactctaattatcaattaattatcataacacgattaaccatcgtgagctaacattaaatataaccataagtaataatgtaaggtgattcagcccattaatgagctaatgtttctaagcatggctaagcaattatatatatagcatttagctaaaccaaaccaatatataaggttcaagctaattaatttattactcataggaaaataaagtcattgttggccataattaaatgggaaaggctcacaactcgatgacattcgaaaataatgcataagttgaaataaaacattagctttaaactggttcaacctgcttaaagggttatttgggatctgtgtgacttgccttgagcttcctcaaacgcttctgaaccttcctcaacgtaaacgctctcctccggaacgtccgaaactaaagcaaataaataaaatcaacaaaacagtaaaaaacaagcataaacagtacatgtggatatttttaacatgtggatatcgattttacatgaatttagcaatttgaaccacttgaatccgagttatgatgatttagttatgaatttctgaagtttaatcagatttcatctaatacagaaaaactaaaaaaaagatttatgatgtcacgatgacatcatcgccggccatggctctgaaccatgaggtcgccggagctagaggactcggctgggtcttccgagtacacccatgcgaagacgacgacgacgcgaactcaccggtgtaaagaacaacgacgaacgaaggccggcgacgaactccaacggcggctcggcttgacttgacggcgacgacggctctccgacggtcttcggcggctgcaaaggggcggccgaggtgctcctcctccgcgtgaacccgacggtgatgacgctaagcggcgacggcgaccacaaccacagcgcggcgcggctggaacgatgacaacgacggcaacggctagggctacgcggtggccgcgctacgggcaacggtagagctcgggacttggggcaaacggaagaggacgactaggggatgctttatatagtcatgggtgagagagatcgaactcaaaacgaaaggatttgagccagaaaaatccgagggttaggtggagagataaactcgaaaacgaattcgattcggtttatccgagcaaaattgatctccgaaactttagggaaagaaatatgataaggaggagataatttcccctcaactaattttaggaaaacacaagagaaaaggtcggatttggaggggaaaaaccgagccaattcggtctcaggtaagctgccagaggttgaagacgatactgtagtgacagggacggaaagtatactttccctcttgggctggctgaaaacaaagcaaagaaagaaagagaagggggagctcggctgggccgacatgggctgcacagccgtgcacacaaaggacggagatgggctggaatcagcccacggcttaggggaagatttaaaactttttctaattaaaataatcactgaaatgatctttgaattgttaaaaatacttccaatgctcaaataatttcaagaaaaatcctgaaaatacttggacactcaaagtacttaacaagattataatcaggcaatttaatgattaatttaatatgtgggtaattactaaaatgttctttgtatgattaaaattaggaattgagctccgaaaaatccgagaaatttcagagagtataattaaccatggagaatttcataaaaattaaatccatccatgctttatatttaagaattttatttcccacatttaacttcacttgtaaattaatgaacatttaatataaattctaataataatttattaaataatttataaatcctaaaacgaaaatcaggatgtgacacataacgactgaatttgtccacaaccacaaaaatacaatcaaagccggctgatataggtaacccctcaataaaatccaaggagatcgtctaccaagcatgatcagggaccggtagcggttgcaacaaaccaggatatttcactctttcagacttagcttgtttgcatacctcacaagtgttaacaaacatccggacaacacgtttgaggccgggccaagcaaacaaacgatgcactcgactgtatgtgacctgaatccctgaatgacctccaatagctgagcagtggaaagctatcaacactctggtctgcaaagtggaattcgaacccaaccaaatacagcctttgaagcgaagaatcccatctgtcagagtataatctagaaactgctctggagataatactatctgagaaatgagttgagaagtagccaggtcagcagcatacccattctctacttcttccaaccaagtcggaatgcaagatgacaaagcactcaactgtaacacttctccatgagagcaacgagataaagcatcagcagctcggttttctaatcccttttaatagaccaagcgatactgaagacccaaaaatttagtgagagcacgttgttgccagggagtaaccaacattgatcatccagatgtgtcaaactgcgctggtcagtacgaatgacaaattcaccaaattgcaaatatgatctccaatgatcaacagcgagtaaaatagcaaggcactctttttcataggtcgacaaacctctgttctggggccccaaagaacgactgaggaaagccaaaggatatcctgactgcattaatactgctcccacccctttatcagaagcatccgtttcaatctcaaattgcttagtgaaatccggcaacgccaatacaggagcagtagtaagcgctaacttcagagcatcgaaagccgcctgatgttctgaactccaaacaaacaccacatttttcttcagtaaatctttgagaggtcgactgataattccaaaatgacgcacaaatttgcggtagtacccagccaaaccaagaaaaccacgaacttccttaacattctgtggaatagaccaagattaaactgcttgaatattctttgtatcagtagccacaccagccaaactgatcacatgtcccaaatacgtaagactagtctgtgcaaatgaatatttggaacgtttaacttttagttgatgttgagccaatagctgaaacacctaccgaagtaaagacacatgctgatccaaagatgtactgtaaactagaatatcatcaatgaagaccaacactcctttccgcagtagaggagatagaattgtgttcatcagctcttgaaaagtggccggcgcagcagtaagcccaaatgacatcacccgaaactcatagtgaccattgtgggttttcagtgcagtcttgtgcacatcttcaagccgcatcctaatctggtgatatccagcttgcaagtccaaacttgtgaataaacaagaagcagccaattcatccaatagttcatcgattattggaagagggtaacgattctttactgtaatggcatttaagtgtctatagtcaatgcaaaaacgccaagtgagatccttcttaagaaccagcaacactggagaagaaaaagggctagaactcggctgtataactccctgctgtaacatatcagacacttgatgctcaatctcattcttctgagcaggattatatcggtaaggtcgaaggttaactggatgagctcctggcagtagaggaatagagtgatcaaatatccagctggtggtaaaccctgaagttcgtcaaagacagcagaaaattcctcaagtaactgagcaatttctgtaggcagagaagaagatgacgattcttccaccaacgaacaaaattccacagcatgcaacaccgcattacgatggactagtcccttaacttgattaccagtgatactagggaaaagagcaatattagctgaaacacctttaagacaaactgcacgctgcttatactgaaactgcaaggttttcgctcgccaattgatttgcattgggctatgttgctctaaccaatccatgcccaaaattacatcatagctgccgagtggtaaaaccttgaagttagattgaaaggatatcccttgtacacaccaaagacaatcctccaactcagtaacacactccaaaatacccccatcagcaactttgaccttgataggtgacaaaacatgtcgctgctgagtccatttatcggccaatccctctgaaataaagctgtgtgaactgccagagttgactaacattagaatttcattgtgttgaatcaacccttgaagtctgagagtaccacttgtctcagtgccttgcatagcttctttggaaatctgacacacttcaccttcatattcagagttaggaataacagcagaatccttctcctcatcacccctctctttagaagaagaatcccggaattccaatagctcttccaccacatgaagttgcacagttggaccatatttatgatctctgctccaacgctcaccgcaagtgtaacagagccccttagccttgagaatagcatgaagagcagctactttgtcctccacccgagacatgcgcttatcagaacgagttccagctgccaaaatggtacgaggttgtcccactggaaacactgtggccgaacaaaaattggtagtccgactgctggaacttgtctcaggacgacgagattccctcctgatcgcctccaacacctcctcctgtaaacgggcaagatccacagcagtacccaaatcttcgggtcgatgcattataacagccgctctaatttcagctctcaatccttccacaaactgggtgacaaagaacattgtattccaggatgggtgattgttcgtatttcttaacgtcattactagaaatataattcccagcaatagcgcagaaatacttctggtatattatggttacagagttcatccgcaagcgcatgaatataccattgtagcatttcacccgagagtattccaagggtatcgtatttattttatcctgtgggaagatcatgtagagagaacttgactaataatttatatattacttgtgataatcatattctaagtaggggttaagataatctaagggtagagtgacacacaagcattagctactcattctcataatatattatctaagctaagtggaaagaaaagagaaagaaaatctattcctgtacttctaatatacatagtatacatacattctagttaaccgatatacagctaataccctctatccgatgccctccttgtacttcgagaagccacccctgactgccgagttccttacaacagcccgtcataaccatacaaccggggctcaatacggaggaataacctccccagggaattaactttgaattatataccggcgcggaggaatacccgtactaagctgtcaccgtcagcggcccacctcttatccgcagtatataaccccaaataatgatatcccgtaatctaggcaccacgtctaaaatatcagatactactctaatatcatcgtcatgacagagagtaattgcatatgcaaacattatacccgcaccaaagcatctcgcagataccctagccgtatattcagtataacatgaacataatgtaaagtacgtacttatatactcggaaagtatttcaataccataaatgtatatagaagagtattctaataaaagtacaaagctttcaaaagaggaaaggaaagctactagagtcatacccgaactcttccgaaggcttctggactcctgatttctactctattcctattccaccaactagatactactaaactaaacttgagagaaatgagagagctcttgcttgaggtgtgtgttgaagtgaagagagtgaactccttaaataggcaggtaatgacggttatggtggttggaaaggtcggtaataccctccaaccgccatagggagtgaatctccactgttccctcaaaaccctgcatccatcggcgctggcattggttcggccgaacccctggtttagccgaaccctgggctggcccaaccagcccacaagttggctggtggcctcctccggtgttcctcttcgtagacttgtgaaatttggcccagtgtgtcgtgtcaatcctgagttcttggcccattcatacataagtctggttctcgactgtcacaccccgaagttctcctcccaagccaaaaatttaatttataagcgaccctacgaaaataccagtgcaaagcaagagtaaacccttttaaatcaatgcgaataataatcggaactggcatgtggaatttttcttgagttctacatgtcgaaattcactaacaggatttttagtggaattttcagagccctagaaataattttaaccagttaaaattgagcaagcaatattttaattccaggaaatccttttctcctttttctttttctttttccctccctttttcgaatgggccgctggcccattctctccttttctctccctcctccctgctgggccggccgcaggccgaggcccagccaagccgcccctccctctctccccgggacgccgacaggtgggccccacctatcagacccgtccccttcctccagccggcgccgccgcgcccgcaaccaccgccgcgtccacgcctccgccttctccgggccacgtcagccacgtccgcgcgtgcaccgcatctcccgcgcccactcccctctctctcccgcccacgcccgcgcccgagatggccgggattcggttttcgaatcccgcctctatctcctcccccactccccacggtggccggcgaaaacccgcctttcccggccacgtccggccctcccctcccctatttaagcttccccatcgctccctctcgctttttccccttctcgccaaactcccttgtgctccccatcgctcccgcgccgtgcaaccacccgccgccgccgttttcgctactccggccgccgctagctgccgctagggtcgccgccgcaccgcgccgtcgccgccgtcgggttcgcgaggctaagctccaccccggccgccgcttccccgtcgagtttcgtcgccggaattcgcatcccctcgcgctccggtgagttcaaccgctaccgccgctttcggccatgaataccggtcgccgtggttcatctccctccctctaatctctctcttctccttctttagggcaccccgaatcccgtccgccagtggccgtcgtcctcccgtggctcgccatcgccgttcgccgtcgtcttcctccgcgccggccaccctcggtgaggcgccctctcccttctattcccctccctctccctcctagccgccgctttagcgccgccgcccgttagccgtcgctttagcaccaccgcccgtcggcgccgcctttgcgccgccgtctccgccgccggttgccgttgcccggaacgcgctcgcgtgtgcgcgtgccgtcgccgtcgccgcagccggtcggtcggccttgagccgagccgggtcgccgccgcccgtccgatcgaccccgagggcgatctggaccgtcggttccgtggaccggcggtggaccacccgcgtggtcccggtcaacggtgaaccgccctcccccttgagtcgctgaccggtgggccccgcgtgccggcgccccttcctccctctcccgagccgctgaccggtgggccccgcatgtcggcgccgtctttccccccctccgtgctgacgtcagccctgggatttattgcgcaataaatgatttaaggtttttcttttatagtaataaacacagtgaatcttctaaaattcataactaattcaaccgagctccgtttaagcccattcaagtctcagtaaattaagaaaaatgtgtagaatccattaaaaatggttttgttctctgtttcagtagtcttatagcctgtttgcaatgtttgccttgtatgtcgctagattccggttcgtccgacgctccgatgtacttcgaaatagtcgccgaggttcctcctgcagcagagcaagacaagtcatgcttgtcacttgaacatgttgatcctatattgcaaatgctctattgttttccttcaaatattgcatcgttttataatgttactatgggatgtttacctattgtcatagccatgctattgttctaccatgtctctttgtcagcttggggttataacatgactagagattggactagggattgcttagccatgcttagttcaactagtgcacaatggggaaaaccttattaatgtttagactgttggttctaatggtattgttggattagtgccaccgctttgtgttggtgtgggtgcatggttttgctggtcgcatccatggcagttaaggaccggttcgcgggatgccctggaagaacttatcgtacttatcacaagccagcgtgggcaacggctgggcttgtagtgtagctttcctctagccgacgcatctaggcaagggtgggcgtggtggagttcggatgggccctgcgacggcctatgcggcttccggattcacctaggcacgagaggggactgcccgctgccttgcgaggagtgggggtgaaacctgaggtgtggtgtgcttggttagaggggggttatgcgaagggtcctgtcacggcctctttctggtatgtcgtggtggcatgtcggcgcacgggaacgtgtcgtggggctgtgtcttgtgggtacagttgtacacctttgatcagagtaaaactattcgaattgccgtgcccgcggttatgggcggtcaaccagattcaccgtgattagtctcaccctagtgtaatcttttgaatttggatagtttaggtggatggttgggcctgtcgcaacgtgggatagcgttggacagtggatagttaatattaattaattattacaaccgtttaaatctttcaacttctgtttataaatgctcattttatgcaaatgaaccactctagctctcctttgataattccctgcatcatacccctattccggtatgacttgctaagtacaatgggtagtactcagtcttgctctatttttcccaaccccagagcacgagtacgtgtcagatgaaggtttctccgaggagtaggcttcgtccgtgccgtcgaggatgcctatggagtggtgttcccgctgcagatctagtcaaggctttgctcctgttgtcttttgtttttctgctgcatttatgtaagtcttttatggtgtttgtaagacgtggatctgaatgtcaatattgtcgtttgtgtaccccggccggtcctggacggagaatttaatgcacattctgcttagaattctattcgggaatttctgggcgcgacatcgacatcgtttgattgatttatcgtttgagttgatgtcgattctcctccactttattgtcattctctgcaataggttagtatacctaatactagtggaatattattattctaacagatatatgcattgcaagcatcactagttctcctctattttggtaatattgacggtcaaaactaattgataacgaccgtcaacagtgatgtgcatggaagctgtgtactaactcactaaatttttcagcatagctaagcacatacccagtttggcgtagcctattaaactgtcgaattagagtttgaaacccctcacgcccgaacttagcacaaactgcctcacagaattcaccccaacttatcaaatctacgtgagcattagtagattgcaaccaagtcaaatctccacctatgaactgcaaggcggctactcccacccacacatctgatctaataccactcacttggaagtaagtctcacatttcaatttccatgctctaggattctctctatcaaattgaggacagtccactcacggattcacaccaccataaggaaatcccccaaaattccgccccactgaatccccaaaatcacgtccatttcgagaagcaaattgaggagtaaatgtacccttgcccgggagagacaatggagaggtattctccccaatcgcctttccccggagtgaaattcccgcgcggtggcctaacggcccgtgacccatgtcaccatgacttggacaagtctcctcctccttcggcagcggacgagatcctggcgatgtgggaagcagcggcggccgctccgctggcttgatagcactggcttgctgttttgagagctgattcacttgatgacgcaagtccccaatatcctctcgcaactccaccaccgccttgtctatggttggcttccaccccgctagctccaccaccatgggcttgatttcctccaacaaccccaccgaagcttgagctacgcacgagaatgatagcgtggtttctccaagtaatccaggatcgattgctctgatacctattgttacgaactctgttgatttctggaaagtttcagaggaagaagatagaacagagtcgaacaggcgaagaacacacacacagagagagagagagagagatattcagacttggggaaggggaagaagtattcagtttaggagatagttcagaatacaattcattcgacctcttttcccttccacctactgcgcttatatagccgcgcgaatacatcagcccatgatccattccggcctagcgattctgacattggcccacttgatacgcttaggtcgaactcgatgcttcaccaggttctcctctattgtcggattgtctacagtagacgtatgagtagtcgctgccgtgagactaacacactaaaaaatacatcttcacattggatttgaatttaaaatcacacacgaaagctatgaaggctctctcacaccaaggtgtataggcgactcaaagggagacctctcaccaagcatccaccccttattattgtccaatgtggctgaaatcccctaactaagacaatgtcacaaatgctcttagggcaaaacactagctcagataaaatctgggccatccgttgttcctccacttcaaaggaaaagcctcatatcactgacatgtagctagccacaacatgtccgccacaacaagtccaccttttccacggatgatccgcgccgctactacccacgcatgccttgggatcaatctcgacatcgcgcgccccaattaccgattgccacggctccgcctttctcctgcatgcgcgtgggccctccagccagtgggagatgccgcgtgcgccagtcggaaggagccacatcgcctgcgctctcccgagacaaaagccgccgggtggccggtacggccccacgcctcacgattggaggccacgtccactccgagtggaccccatgcccgcgccacgttctcttcacgtgccgtcctgggtgggctcacctgccaactagaggaagatcccaactagttggtgccatgcgtcccgtgctcttccgcttgagcctgcgtgcatacggtgttgggccgtgctaggccaatccggtggtgggagaggaggttgtcttgggctccagtgcttggcccgcctccctctttctctgtgttttcccttttcttgttcttcatcaattttcttggcacacttgacattgtgtagtctgttgtgaagtccttccaccacattatttatccagcatgcaccgtcttgtactcaactttgttacccgacatccttggccgttttggacttcgactcctccctgagtttagtctcgatatgccattaattgaccaaggttgaccgccaatgatcgtgacgtccgtacaaccctgtcacatagtatcccaaccacacaagactaatactcctccttgagcatagacctagttatgccattggccaaggttgacttgcattacctatagacatgtaaacgaccgttgtttgtgtatagataacgcaacctgacccacgttagtccacgtacacatttcctgtacttccagcacttgccaattttccatcacaatgaatcaaaaccacacgtggtttcacagtttctcatgtgtggtgataagagctccaatgacttcgttcccatcacctttgtgcttgattgcttgcttgtagactttttcctttccacggcaaggttttccttcggctgcaggcagtcaaaacaatggtgggtcgacgaacggtgtaaaacttgaaaccatatgcatgactaagacctaactatacacgacgcgttggacaaaaaatgaaggatgtaaaactgaacaaaacaatgctaatcctgaaattaaagattattgatagctgtcactatagttttagagctgttttccaattatttttgtctttgataagtcggatttatcaaagcatggatttaaatttgcaaggccttctgaccgaattgctaaaaaaactgtcacaaattttttgggcaaaaaactataatgtataactatagtatctttatagtgtaactacaatgtataagtgcactctaaaggcattgtaatatcaatataagttagatataaagttgtatattttattttaatatatattatatagttatagtataggtataatggaagtataattgtagatttgaaagctttttccataaaatacttgcggcagtttttagatagtcccttaaattgattgtggagggtaaaacacatgctctatatatcgttatcaatagtgacgggtctggttaaccagcgcgtgcaattagttgaccggtattttgcacgtgcatatactctacatattatacgaatatataggaggtcgtgtacgtctttaacaagccacgcagtgttaaaaaagaaaaaacaaagccacgcagtgttgtttcagcagagagagagagagagagagagagatgcgttcttccagaggtgtcattcgccattccgtgtggtgtctggtgtttgtatggtcatggcgggttgcagcagctcaggatcaacaagcaccaaaaactgatccagtcgaaggtaagcaagccagcaatcatgtacggtgtgtattgacgcaccacgtatgtctatcttctttcgttttttgacatttacatatttaagatgtgaaatttaataaattatcatctatagtcgatgacatgtgagcactcatatatcaataacctaaaagtgacgaatagttaaatgtctcttggttttcctccatgcgtatagttagattgcaggagtagtaatttgtggttgtgctcgatatatgatgtccctcgcactactacagaacacctgttagagcacctgttagagcatccccagtagatactctctcccgtcctccttacatgaaatagcgtatggtgggagaaaatccacctctgtagcggatacgccgtttgggcatccaaagatagctcatgcgctatcccgaagagagaaacgccggatatggtctttctctctcctcacgcaattccacaactgctgctcccaccctcatcagatcgagctatggaggggtgaaggaatgaatgtagagaagagagagaggatgcgctagtggccaccttagtcggccggtcttgagcgtcgccccatgatcatatgagccggccactcccgacatcggtcacatgcgcctgccctgcacccaccgtcggccaaagcgccacgcgcccacatatccgactctgccctcccccctccttctatagactcctctaagtaggcagacgcccgtggcatctcccctgccgtcctcactgctcctgcgcttgtgacttctccccccgccacccgtgccgaccctccgcacgcctgctcgcgccgctcctccgcccatgccgccaagccacttctctccccatcgcgcgccctgttactcccacccattgaactacccgtcggtggtcagccctcctcgtatgtccttcccatcctctcaggctctcagcattggatatagaagagagagaaaggtgaggaagtttttttagaggttgaattatcaaatttctcaacagttcttctcatacattgtctatttttgatttttgggagtgttgaaaggtagttgaaagatattagtaaaatataggtttttggtacatggagaatgtaatatgaatgatctattggaatcaaaaggaaaatggagtaggaaacatttttgaatggccatccaaatgggaatatggaggatgaaatttggataagctggggatgctattagggaatgatacatgtataggtgccggtttctattgagaaagagttagaggaatttgatttcattaatgacctagctatcatccatatgattattagtggtgagttaattagtaaacatcatccatgaatgcagcggtggccctgaacacgatcatgaggagatggggcaaggaggcatcatcggagtggaatgttagcggtgatctctgcagcggtttcgccgctgacaaaaacgactgggattactatcccaacatcaacccattcatcaaatgcgattgcactttcagcaacaacacactatgccgcattacaaaactgtacgcacactctctttgggcaacacctaatagctcaagcacatttttttataggtattacttgtctgttgttatgaaggagggtaaataagttggacgtggttggtcaaataccttcagagctacagaatctcacccgtctagagaacttgtatggtatctaagtctttttcttcttaactagtcctgctactaaagttacgttatagatcaagtttttcacagactaaaaattcaatcacacaaattctctttgtgaacagcagggtacatttcagtcagccatgcaacatcctttttatgttggctaattgttctacttttttatgttgttttcagggacttgaactataattacttgactggtttcattccatcattcatcggaaaattcacttcgatgaaatacttgtaggagttacatgttctatatcatgtttcatccattgatcgttattgtttcttaactattcttaattatttaaagggcattgggtttcaatccactatctggaccacttccaaaggaacttggaaacctcaccaatcttatttcattgtaagaaatattttctcatatgcggattaatcttcagctgctccttctgttccaaattactcatcatttttccgttgtcctatgtaaaatatcaagaagttgtttttttaaccaattgagtatgaattatatattgtcacaatatttctcatgatgaatctaaaaatatatatataaatctaactatgttaaactatactcatttgtaaaacttgatagccaagagtacatatatttgacttgcaacaaaacttgaatagtaggtaatacgaaagaaaatggagtatataaactactacataaaacatcataggtgtcagttttccaaccggtaccaggaagacagcactgattacccggggtcaaaggtgccggttcgaaaaccagctccttttaggcgcacacgagcaaaaaatatcagctcgatacattgagccgtcaagccgatcccaactaaaacccatatctaaaaattgcctcaaatccatgaactatagtcaataatccctagaaaaacaacacaactagatcaaataatacacatctagatcacatctacattagcaatagctcacatctatatcaacaaatcacaaagagggagggaggggaagagacggatctactggctgccgacgccatcgcacctcctccacaccggctgtcgttgccgcgccgcacctccagcctgctagatccccacagccgaggggccagcaccaccacaccaccagatccagcacaggccgcctccgtcccactgccatgcccccccccccccccgctcccgtgctgcccccgtgatggatggaggagaggagaaggaagaagtggagaggaagatagaaggaagaagaagagaggaggaagaagagaagaggaagaagagagtggactggtgggtggtggtgtggtgggttcaagcacaccggttcttctcggctcgttttactgaaaaaccatcacctataatatattttaggtgtcggtttttaattaactgacatctatattatacgtgtcggtttttctcaaaaacaagcaactatagtcccttaaaggtgttagttttttatgttttcagcctggggaggtgggaaaaacactatagttaccggttttagctagtctggcacctatagtgttgatcgtcacctataatatattttacgtgtcgttttttaattaactgacacctatattatacgtgtcggtttttctcaagaacaagtacctatagtcccttaaaggtgttagttttttatgtttttagtcctaaggaggtgggaaaaacactatagctaccggttttagctggtatggcacctatagtgttgacctgatgtgcatttttttgtagtaagtgatatttggactccatgaactaatataatagtacaacaaatggcaatcgcataagttcgagcaataaagtaataaaaaaatcataactactactcagtactaaatattatgtaataggcacgtcaatgtaacttccctgttcatgtgttgtttcaactttcaaatgatcaactaaagttgatcgaacagcaaaaacatgaacatattgtcatgatgaatattgcgggtcaaatggcacatcgggaaaaactatgccccttcctgctattagttgatgataataatttcttatcttgaaatattttattttcatttaggggcattagcttaaacaatttcacaggtggccttcctgaagaactaggcaacttgaccaaacttaagcaattgtaagatactccattgatttctaacttcatatttctatttctataagaattaaaatttggaatggccagatctattgttgaacatgacaataacaaactttcaataacaggtacattgatagttctggattcagtggtccgttcccttcaacgttctcaaaacttcagaacctgcagatcctgtatagtcaaaagcatagcctcagctgttatattcgtcatgctttcatgataaatgacattttggtgtgcttgcagtctagcatcagacaatggattcacagggaaaatacctgattatttaggtagcatgactaatttggaagaaatgtaagattattaatattaacttattaacatatctcatatgttctatcctatttttgagagagatgaatttgtgcaagataaattattctgtatatcatgttctttccattcagacttataaacaatagatttgctccgctccaacaaaaagtatctcgagataccggtacctcacagtaccaaatcgtttttgattttttgatctaacaatgctcatcctacctagctaaatctaacgatcataaacgacttattaccatgaggtaccggtacctcgatgtactttttgttagaccgaactaaatttctataaacaattgcattttcacatttcagtcctcgctagatagaaatgaataaagctgcatcacagtaacttgtccaggtggcatatacatacgtagtgattttattaagactggtcacatatagaacttttatatctttttcttattttaaaatgtgcaatgccctttttctaaaattatgagattgtagtgctttccaaggaaattcatttgaaggaccaatcccagaaagtttgtctaatctgaccaaattaacaaccttgtaagtatactctttaggtgacattgtatactcttgaaggttgataatgtcaaggctgataactaatttatgaaaaatataaatgagcaggcggattggagatattgtaaatgggatctctccattggctcttatcagtaatctgacttctctgaacaccctgtatgtgatgatttcagctataaagcttacagtatattgtctagttgcaagttaccacggttggatttcattgttacagaatattgaggaactgcaagatatatagtgatctcggagcagtagatttttctatgtttgaaaagttaagcttgctgtaagttttcaattacaggccatggtgccaattgatgatattattaatcattaactcaagttctgtaccatatgttcaagtaatatggttgtcatgtggtacagggacctaagttttaacaatatcacagggaaagtttctcaatccatcctgaatttgggaaatctacagttcttgtaagaaattctttttacattaatttgttgatagaagctcctattaagcagatgaacatgttcgatcatcttgaattgtgcccaattcaggtttcttgggaacaataaccttgcaggaaggttgcctgatggtataagctcttccttaaaagcgatgtatgtcaaatacaatcgacatggcattatagcacaatttactttcataatggaatatattaactcctgtataatctaattctgtaatgtttacagagatttttcgtacaatcaactcactgggagcattccttcttgggctagccaaaacaatttacagttgtaagtgtaatattatgatatctgtgttgctgagaaaaaaatagatattctaatattctgttttgtgaaaggaatttggtggcaaacaactttttactcggtagcaccagtaacaggtacatactaattgtgacatttagttctaattttgctagtgcactatacgaatttagttctaattcttataattttgctattgcactataagaatgcttgctgacaacttaaattttcaatccaaatttgcacagtagactaccttgggggctaaactgcctccaacaagacactccttgtttccgtggatctccaaaatgtacatttctcaatcttcattgaaccaaagacaataatatgagctaaggaattttaatgattgttacaattttgtgatcgtagattattcttttgcggttgactgtggtagtaatacatcaacgagaggatcagataataccatttatgaagcagatcctgcaaatcttggagctgcaacatattatgttactggtcaaacaagatggggtgtcagcagtgtaggacactacttccgggccacagatgcaaagaacattatatatagttcccaaaattttaacaatgtagttgattcaaagttgtttgaaactggaagggtgtcgccatcatctctgaggtattacggccttggacttgaaaatggaaattacacagttctgcttcgatttgcagaaattgcttttccggactcacagacttggctaagcttagggagaagagtttttgacatatatattcaggtaccaatcaagtgcattttatataatgtttttctacttaatcttatcattctttatctgaaactattattgacatttacatagggtgctttgaaagaaaaggattttgatataaggaagacggcaggtggaaagtcttttagcgttgttaataggagtttcatggtaactgtgtctaaaaattttctcgagatccatctattctgggctggtaagggcgggggaatctatgggccaatgatctcagcattgagtgtcactccaagtaagcgaaacattatatatagtatcaggaagtgctacaccagctgccaagaaataatattattcctttgtagattttactcctactgtgcgaaatggcataccaaaaagcgaaagtaaagtaggtataattgccggaatatctattggtgcaatagttttagtattagcagcattatttggagtgtttacgctgttaaagaagcggagggcattggcatatcaaaaagaaggtattatttgttagtacataattcaaacatcaaaattgtcaaatgaataatcttctcatctgtcctaaaaataacatgcagaactgtactatttggttggacaacctgatgttttcaattatgctgagctcaagctagccaccgacaatttcagttctcaaaatatcctaggggaaggtggattcgggccggtgtataaggttcttgtttcccataattaatcatgtacaattggatataaattaatgtgatttggcttttgagtgttgcattttagcaatattttgtccatgctcaaaatatacatgtaacaaatttggcagggtaagctacatgataaaagagttatagctgtgaagcaactttctcagtcatctcatcagggggcaagcgagtttgtgacagaggttgcaacaatttcggccgtgcaacatcggaatcttgtgagattgcatggatgttgtattgacagtaaaacacccttgttggtttatgaataccttgaaaatggaagcttggatcaagcaatctttggtgagttcacatctgcaaaatagcatgcacacctgcagcactaataaaactatatttgtttaattcacaaataaatatttttgtttcatgaataatagttgaggattttgcctttttctgcattttgttataatttgcattcatgatattaatagagctatttcttcttgtaaaggtgacagtagcttaaacctagactgggtaacacgcttcgaaatcattttaggcatagcaagtggtctaacttatcttcatgaggagtcaagtgtgcgcattgtgcacagggacatcaaagccagcaatgtcttacttgacactgacctcaccccaaagatctctgattttggacttgccaaactctatgatgagaagcaaactcatgtgagcactagaattgcaggcacattgtaagaacattttaccactgatcttcttatgattgtaacatcaatatgaatcctactattaacttgtcttatatttttaaggggctatctagctccagagtatgcaatgagaggccatttgtcagaaaaggctgatgtttttgcatttggagtggttatgctggagactgtcgctgggcgaccgaacacgaacaattccctggaggaaaacaagatctatctccttgaatgggtaagctggtttacaaacaacccatataagaaaacatcaattcattgtgtattttcattcgtttactgaaactatgttcaacaaaaggcatggggcatgtatgacaaggatcaggcgctcgaaattgttgacccaactatcaaggattttgataaggatgaagcttttagagtcatcaatgttgcacttctctgcactcagggctcaccgcaccagcgaccaccaatgtcgagggtcgtggcaatgttgactagagatgtcgatgtgcctaaagtggtcacgaagccaagctacatcactgagtggcagctcaggggtggtggcaacaacggtaacacctccaatagctatgcaggatccagctaccagcccgaagttcagtagggaaaagatatcaccaaagtttgtctccattgaaggtgaatttatagtagaaattatccgggctatcgacattgggttcaaatgacaatattgtagatcccttttttaacataattttgtgtccgcgtgagttagagcaaatattggaattacttatcctgaactctttcatggtaataataatttgcttctaataatttgtaaatagtgaataaccgtggtgtatttactacttaaaagaagctagtggataacccttaatatgtaatggccagtgcaacgcttaggtaaaattttgtcctaatatttatgcgcactgttatggtatagttatacaatgcagtaggtgtattgtccactttttaacgggttaagctttgtattcaaatctatggggacccccggttttaaacaccggtaatcccatgtgtcatatagtactattccctggataagtaagtagtacacacatagcacaatataatatcacaactgacatcgtttacaggtatttctacattaataatacatgggtatcccaaacgggtcccaaaatagaccaagcatgctcacatacattacaaaatgccaagtaaaataaatgaaacagcggaagcaaagcggcggcggtccatcgaactccacaggcaacgtctcgtgaacctatggtccctaatccatcgtcttcgacacgtacttgacagcagcgttggatgaatataaccgactccaactcctttctaaaagatttaattaagcaagggtgagtacatacatacccagcaaaccaccacttcaaaatgaatctaatgcacaccggggttcaaggatggcttggtttatttgcataaagctagtttttacaattcatttcacaaacctatgacctagcagttttaactcgaaaacaacgttaacgttgaagttgtaattatccagggttcatccacctctccaagcctcgctcggttcagtttaccctcacattcattttatagcaactctatcataccaaccttcccacgggttgggcaaggttctcatgtctcacaatttctacactaagcaatattaaaatctatgagtctagtcaagggtagtataggtcccggcactcattaaccgcgattacggctattcgaatagattggtttactcacactgtattagatgtacgctttttatcccgcactccgcggcttgcacaatacatgagcctagtcccaacacatgagacttgtcacggcccgacttttcagtcgctcttgcatttggcactcgctccaaggactatgagcccccatgcacccctacagtccaacctacctactgccggatggtgaggggagtcctggcgctccagggattaggagatatttactacatatatacttatagagtgtattttaggttttacgtgtgcttttacctttccgacaccggactcatccacatcgtactcatacagaacctaccatgactggagtgtcgccccacaagagcttcctagtccgtcgtctgcccatacataagaaatgcaatcgtactcggttcatttcccgtataacttcctgactcggtccttaactgtcgaaggtcagcgactaaccgtttccaaaaccactcatattttactcatgccgccctagtcgaaatagttttgttttattaagttttggttttcgcaaacggtttgtgtgtggtaggtggcgctcatgtctccacccgcaaatcataaatcactcacattgagtgatctcacatccatatccatataatctaagtttggagtgtacaaacgtctacaatagcaatactaagcaatgtcaataattgactgcgtataaataaatagacttaggctacaatggatataaaaaagtgtataacggtaacaatatcaagggtaggcgatattcaagtataggtacgcaatttataaatagcatgcaattttatttgcaagcaacacatttataaatataggctcaatatgttcaaggaagggagcgtagtgacttgccatgctataggtccctaatgccttcgagagatctgtatcagttagatgattagaatacccacaatcgaagaataaccagaatattcacgctcgataaacggcccaagaagccacacataatcctaaggaaataaaataaagcaacattcaatacaaactatgtgtgccattaaatatatctcgattttagagagattgtggaaattgaacggagtcaaatgtagttatggttcacaagataaacggagtatcctttcctctcctccttcgatgcagctgaatatttactaaaagttatatttcgctattgcattccagtagttcttgtccagagcatgctgaaagcctttggttgcaatttcagatccattcggcaatttgccctggaaatacttaaattgtcagtgagttcacaattattatttgctacaaactgttccattctacaataagagagcaaattaaattaatctctaaactgaaaatacaggttacacctttctgctcacaatcaaacttcggactatattagtaccttataaacggcgctaaaatcaccttgtcccgcttatatttacttgtaaagttatctatggcaaaactcctggaaggctggaaggaaagcattaggtgagtttttccagttccaaatggaaaagatctagaaattgaatagatatttgaagataatatgtatatctcttatgtttttccacctctttttataattgcaatgcacaggtaatgacttcttctcatgcacaggtaatgcctatattgaaccatattgtagaaaagagcttcttatcagtattcatatctcactgaaacctcactatacaaaatgaactctaggctagttttttactctgtcaggttaattttgtaagaaagattgcggagcattagtgctttgagatccttgatattttttacagtagtatcagtgatattttttttacacaaaaaagtattgtcacaacaaagttttgtcaggtttgaaagtgaaacctggagcctctcatttctggcaaggaattatggatgtgaaagaagtgttttataaattctgtactaatgtagtaggcaatggaaggaatactttgttttgggaagataattggataggaggtaaacctttggctgaacagttccgtgatttgtacaatattactttgacaaaaaagattactgtggcagatgtgaaacaggtggggattgactctattaaattcagaagagatgtcctggggaataaactgctgaaaattaagcaatcctggagtgatttggttctggaagatggaaccagagatacacttcggtggaatttgaccaaagatgggaaattcactgttaaatcctttcacacagctctgaagatgcaacaggtgattttcccgcataaaaagatatggggcttgaaagtgcctttgaaaatcaaaatttttatttggatgtttacaaaaaacaagattctcacaaaggacaatcttttcaagaggggctggagaaaagggaaggctaattgtcaattctgtgaccaaacagaaactttacaacctcttttttattgccctttagctagactgttatggaatattgtgaaatgtgcccttaatataaattctgtgttgaatagacaagatctgtttggatcttggatgaacaagattgataaatttacgaaaaaacttgtggtagtgggtcttgcggcaataatatggacaatctggaaatttcgtaataaagcttgttttgagaaaaaactcccagctgatcctactgatctggtgtttatggcttgctctttggtggactcgtgggcaactttgcagaagcaggagggaagtcgaagaaatcttcaactgggggccaggttgctaaaacaagtggtaaatgaagtctacaactcgaagctcggctggagaggaggtgttcgaaggattaggtcataactcaggagaggaaatgtttactgagtattttgtgtggatggaatgagcaaagatagctctgtaatagacaatctagctatggtctttgtttttttcttttgcataagggtcggatgtcctccctcagatgttttagtttttatttttctgttttctgtttagtactctggtagtctgacttgatctcatttctagtaaaagaaatgggggcttcatgccctagctcaaaaaaaaaaatcagtaattaactcttcagggatcaaaataataaagatttttgaaaactgcgaaatacaaaattgcaagtttgatctgaaactgcggtgaataatccattttgcattaacattagtgcagtacatgttatcatagctatgtagtggaatttggtacttctagaagatcttaaactggatgacaattacaacatcaacaatgtatagtctggataaaaaaatggattcaattatgcagttcagcatattcaactctacaactaaaattcactgaaagtatccccttacctttctatatgaacagaaatcaactgcaagggtgagaatagaatgcaggcttgcgctggagcatggcaatgaagataatttgtcgctcagcattgctgtgcgagtgcacagaggaagatatagtggtagacatggggaggggaagtggagcggcggtgggcgcaggggagctgcaagccagcggcatggctggagagggagaggaggatgtgccgatggatggtatcaatttcatagggctcgcagcatcgctgaacatttggtgattgggagcgcactgatgttcgcgggggagaccagacgctgtcagcctggccagatttttttttaatcccccgtggggtgtctttgtattaaagaagaagagaattgacccagtttataaggaaaaccggacccgaaaaccatacagctgcacggttaattatgggaaaccggctgaaacccactgcacagagaagagaaagggacctagctacacaactaacaaaaacggcggagcctaaccacaggatgttgctgccaatctaacacaaaagcaacacaacagcttcgacttcacagaagaggtgttatcattgccgagctaaccacccaagcgatccagcagcgccggcttcacaactgcagcgataatgaagcgaaagttgccaaagcgaaaagcatctccgacatcttacaatggacatcagccaagccaccaaagagccacttcattcacacggctagcaccaactccctggaagagactgcaacatgtcatcgttgccaagcgtcgctgcatccatcagcgagcagctccgacttcataagcagaaacagccgaagagcgtgttgcccaccgcaagaacaaagcgacccaagaaggcgaagggcctcgccaaaccccaagatatgaaagcttttaaacccaaaagaccatcaacagtcgtcgattcataggaacttctctgaagcgacgcccccaaggaggacatgacgtgtaacactgctgccgctcgtccgaaagccggaacaaggttttcacctagagatttgtgggggatataaaagaaacgcccagacaatgcctccaagaaggaaaacggcacccacgggcgtcgtcgttgttaaactggccaaaggcacgacaaggctttcgtcagcgtcttcacatcacccacacaaaacacccccaaatcgacggccataggacagtctataacgtctcgcaagcagtcataccttaattgtagttaacggcaaagatgggctcatggccaccctcgaagcgccatcaagacaagccccattcctgcttcacgccagcacaaaccgtcgtcctgccaactccacatcctcacatcaccgcccacgaaccatgaaatccgccaccggcccctgtcgagcagggggctcgctgccagagtgcaaccccaccggagcccgcctagcgacgccgtgcagccgccgaactcgccgcaacgtgcccgagccgcgggcagccagatctgcctgcggcagtcgcccccctccggcctcatccctccggtcgcatccctcgcgccaccgccgtccggtgggcgagcatcaatgatgcaagaggggaggataggcgccactgccgccgatgagttggtcagccaccaccggtcgtgccgcgcccccgccggtgctaaggccacgatgaccttcgtcctcgcgctgccgacacctctttcgcgtgaccgacgcctccttcttcctcgcgcacagtagcgcaacgccgccactgtggcagcctccaccgttgtcggcctcacctcctcgctcgtgacgcaccgtgctccgtcgttgctggctgcaccgcctagccgtagccgcgccagccagtgccgccgtcgccgcacaagttctaagcatgcctccgtcatccgctgaggccgcgggcttccaccgcgctcctccggcgtcggccaccttcgcctgccggccacagccgttgcatcgcccgcctcaaccagctgtcgtcgcagtggacagtcgctggctagatccgcgctccggagggccagatccaccaccggtgtgctcggatccgttgcggctgacgccccgttgactgtcaccctgtcgcccgccacggccgctgacttccgaccggcacgcaccactctgcctcccacgaggctggccggatttggtgccattgagtttgttgcggctggatctgatgagggatgcagcgtggcctggacagggaggcagcgatgacggagacatggacagtggaggagccaaggaggcaggtgtggtggtgaggggatgcgacgcgacggcggcggcggtgcggcgatgggagaggacggcgaagtaggccatgcgagaggagtcatggaggaaccatggatgggagaggaagggtggaggaaccaaaaaggttcagttctagacatattgtggtgtggaagaatctaggttttattgaagtttcatgaaggatcttcatggtcttttgccatttgagccatccgacggttcatattggctggtgataacatcggacggttcaagttttcttgatgacgtggatacataattttgcgagaagacacccctttcacttatttagattatattgttggattcgttacaactacataacaacatttaagaaggctctattccgacaatttttttttactttttaaatgttgcacatatctttagtgaaatatgcaatgttccaacaagtatctattgatgtttcactatttcatttgcaatgttgcacgttatctttttatatgtctcagcaattacaattcgatgtttcaaaatcaaatatttgcaaatgtattgtattgtatgaattttttagtgtttcactagttgggacataatatttcatgtaataacaattattgttgcagtcaaaactttttatatgttgcatctctataaaacatctgcacaagtgatgaagcaatttttttttgtaaatgctgcaacaaaagtttgatttttctagaacacacatatatacttttataaaaatatatttatgtgagatcttgttataaagatttaagtatgacaaataaaatggtataattaaattatagattggatatatattttagaagaaaactttgtttagagtttgattaaaaatggagagagaaagtaatgatgaatcagtgcaccttggtaaccagccttgctcctctatgcgtgtgacacatagtaaaaaaacaagaccggtggttgacccgttctgatcgtcggttcaccggtcgaaccgccgggtcagacacaactagccttgctcctcactacatgcatgctacagacgtggccctgcatgcgacaaatgcgtagcagcatacaatttgtagctttctccccacatccatgctgggtgccgacccgttactgatgtacatagttgtaacggttgaactcttttgaacaatcagtgatgtggaaaagaaaatcccagccgtttatcgacctagacgtggccgtccttccactctcggtcctcactcattgtcagtgcctccaccaggccaccgcttgatgtgtcatgcccacaggcaacattgtggaagaggcgctgtgaagaggacatggccagatctgttgctgtcatcatgccggccttgtgtcccgtcatcaaagctaagtggaggatcgatctataccaactatagagaggtgaatggttaaaatacccaaaaaccaaaacttttagcagaattaaaagttaccatcaaatcgatgtaaatcggcctgaccgtagatcttgcaccgctccactactgtagaactgatatggattaaagatcatttgtagtcccggttataaagtgcaaccggaccatataatatttacttccgattggtaacacctattgaaattaaagatgatatttagtcctagatcactttatgttaaggggctgtcaggggccatggcatctttagtcaaccggggctaaaaatcatgactttagatctttagttctttagttcggttggtagcaccaaccggggctaaagataaaaacatttataacattcttcttcctcttccaacccgagcaattgctgcaaagatttgtaggaggaagggaggtgctgccaaaattttttgtgtaagtgttttggtgataatatacaaatcagagggatctagaaggttagcaactctcgaatgatgtatgcttagcatattacatttatggaaaaattcgctactatacattaaaaaacgtgtatttagctggtggacatcgcaaaaacacgaatttggtgtcgggcatcacaaaaaatggtaattagctgatggacactcgcagccatatcttattatttccgggggaattggaaagagaaaatgatgtgagagtacgattttgcccctgcgcggcttcaatccatcaccgccatcgccgaaactggtcgtcgactacgccgccgctactacttcctcatgcctgtagtaccccaaggcgctcctattccagtcgccgcggttgccgagaccgagaacgcgatgtagtcgaatcgtctccacctccccttcaaggacagcgcccgcaccgccgtgccagtgccgcatctgggcctccacgtcgctcgtcggcgacgcctacctcctctccaacgacgacaaagacgatggcgaacggcgcccgcaccgccatgctgtccccatgctggcgccacagccgcatctgggcctccacgccactcgtcctcgacgatatagatggccaaaacgcccgaggcccgacggcccagcccacggcacagcgttttggcccggcccaagcacggcacggcccgtcaagggtcgggcccgtgccggcccggcccgactaccgggccgtgcctgggcctctctgccggcacgttgggccggcacggcacggccgggccggcatggcacgatgggccgcatgccaagcccaacacataaacaatagggagtaaaaatagacatattttatgccacagtcgaaagaatagggacgtaaaatagacttattttacctatatatatgtcagcccaaagaggagggacgaaaaatagacttattttcactatatatatgtcacagcccaaagtggagggacgaaaactagacttatttaaaaaaggaacgatgggccacccgcgccttcaggccggcccggcacggcccgacagctggtgggccgtgcctgggcgggaggcgcagcccatgggccggcacggccctgcacgaagtgccaatcgggccgtgcaggcccgatggctggtgggccgtgcctggccgtgtctgggccgggccttttggccatctatactccccgacgacgatgacgacgacgacggtggacggcgcccgcaccgccgtgttgtccccgtgctagcgccgctgccgcatcaggcctctacgctgctcatcctcgatgacaccgacctcctccccaacgatgacgatgacggcgaggaccggacggcacccacatcgtcgtgctgtcccgtgctgtcgccgcatctgggcgctgctaagggcacccatcgtcgtgctggcacccgcatcgtcgtgctgtcgccatgctcagtgttctcgctgccaagggcgtccaggagctcatgctgctcagcgtgctggcgtcgctcctttccttaccagagagcaagttaccaagggcaaatttatctttaaagagtgtttctctctccaattcctccaaaaataataaaataacgcaacgagtgtccatcagctaatttccagttttttttttgcccaacaacaaattcgcgttcttgcgatgtctaccagctaattacatgctatttggatgtcctatagcaaattttgcctacatttatagctatgttttttatatattattgtgtctaaaaaggttgatggaaaatgatgagagagaaaatttgtttagggaaaattaggctacttttaaaatataaacatgtggataaaatgttgtaaaagagataacaaaggaaaaatgtagaaaattaagataaaagaatagaaaactaagttaatttaataaaatagttagaaaaagtacaatgtattaaagatatgcttagaactttaaaaatagttaaaacatgaataatatgtgggagtattgtataattattgtacgattatttatatataattattgtatgattatttaattagtttgactttcgtggattttatttttacgatttttgtgcatttcaggtaagtggatcggcaatgtgtgtacactgtggaccgatggtcgaaagagtttatagaaggcgtgtattattttttgagtgtggccaatattaacaagcataagggttttatgtgttgtccacgcaaaaagtgaaaaaaccagaaggagtattctacatcaagaacatttcatgcccacttgtttcagtcggggttcatgcctagctataattgttggacctcacatggaaagctaggggttgcaatggaataaggtgaactagaagaagagaacatttcggactgtgcgcctcaataaggtggatttcaaaaaaatacaaagggcgaggcgaacggggcttttgaagataacgatagtgtggatgatcttggtcatatgttgcacaatgtaaaggaggactgtgaaagtgaaaaggtggtccagaaattggagcgtatgttagcagaccacaaaacgtcattatgtcctggttatgaacaggggcacaaaacgttgggcaccacgctagaattcttgcaatgaaaagtcaaaaatggtgtgagttacaaggcatttggcgagttattgaaactcgtaaagaacattattccggagggaaacagattgccctaaataacattcgaagctaagaggtagtctgccctctaggactggaagtacagaagatacacgcatgtccaaatgattgtatcctctatctccgtgaggaatacgagaacctagaagaatgcctggtttgtaaagcactacgatacaagattagaggagatgatccagccttcgaagaagagagttcctcctaaggtgatgtggtatttccctataataccacggctcaggcgcttgttcaagaacaaagcgcatgccagaatgatgcgcgggcacgcagaagaacgtcaacaagacgggatgctgagagacaccccgttgatgggttgcagtgatgaaacatcgaatgaacatttcaatacttcggagaggatgaacgaaacgtaaggttaggtttaagtaccaatggcatgtatctatttggagagatgagcagcggccatagcgcttggcctgttaccatgtgtatctacaacctcccccttggctatgcatgaagcagaagtacatcatgatgccgattattatttaatgccaagagcaacctggtaacgacattgatgtgtacctaagaccattggatgaacatctgaaactgccggggaagaaagaaggtgtttgttagcattaacgattggcctgcacctagcaacttatccgaacagtcaaacaaggggtataaggcttgcacccactgtatggataaaactgaaaatacgtatatgaaacattgtaggcaggttgtgtacatgggccatcatcgattccttatttcaagccacccattccggaagaaaggcaagcatttcgaacagaatgaagaccgccgtactaagcctaaacatcgcaacggaaaagtcttgtttactctggtgaaagatctagaagccatgtatgaaatgtctatatatggctcttatgaagagatgtaacaatgaatagaattaatcaaatatgttgatttctagcttggaggattcctccaaagttagatgactgcaaccatctgttataatacttacatgtatggctaatgttgggtttttctatgttttctataaattttatattattcttttttttattttagatactaaccccaggcatatctactgaggctaatgttttgatatctctgatcttgtttattttcttccacttcttgtgttgctccatccaaaatactcatcccaggcgtatctattgtggcatgtaattttagacattgcaaatatgcatatttctctaccgaatatggctttagatgactccagttagagcatgcccaacagctaccgaatactgctaccaatctcagattttttaattcctatggaaaaaagtagttccagcatttcccctatatgccaaaaaattggaaaccccatctccatatatctcgctctccacaagttgggtgtcctcctcattccctatccctggatctgagggcaagtgcgagggaacgtcggtaggattgaaaaaatagatttattcgttacatggcccatttttaagttttaggcatctgttggaaagacaaatattttcacccctcaaattccatttagggttctccaaaataaaatttggggatagatttttgaacatctcttggtgatgctcttggtttacgctgatttcaagtaatacatgcaaattaacattgatgtccatttgtcagacacagtaatctccatcatttctgtatgatctgatattggagcaaatccgcaggtttgataattttcagtaatctcaaccatacatcttttctaatctaataaatcatgtttatctatactaattactatctcaactactggtagaagaatagttttctgtgctagcaatagaactcataaatgaatgtttgagatcacttctacttatgataatactggcagtacaaggagagaccaacataaagttactctttctcgtaattgtgcgagaaaaaaggctgatcatttggtttaacaaaattctttcaagggcaattctagttgggatgtattctgtacaatcctgtgaaaggtagctgacattacaaccgcagccttttcattcacaacaaaattgaaatttgtaaaatcaaaggtgtttttgattattattctgtgataaacaattggcatcagagattattggttttgatatttggaatttatttgtgatcgaagtggttttggagatgattagatttcacaggtgattgacagggacttgttgtttgtcgggaccggtcagaccgggccgatgctgccggtcagaccagagctatgtgagcggttagaccggccagcccacggtctgacctgccgacgctgtgtcagtttcggtttcgggttgtttatttggatatccgtgattgtttcatatttatggcttctagatggatattatgcgtatgtaatacagttgtttgctactaatgagttaagttagggatagcttggtctcggaatatggtttctttgtttgtttcatgtgtaggtgacttgatgcctcgggagagtatttgcggtgatggaccgggagttgacttggtggtaaggcgatgtccatgatggtcagatatcacacgggatacttaggctagagttcaatacatgtggttggtgaagattccatatggcatacgatggaggtattgtttgcgtatgggatgtggagtctaatttggaaggagtccaaatttgatatgattggttatgtaaagtttgtttcttgtacgagaaggtttcctagctaaggggattaggatttctagtatgagtttggttcgtggctttaggctgcctacctcatgtataaatagagacgtagcgtgagggttctcggtatcgcttttgacagcaattgagttgctagtttagtgagggtttcgagtttagtcgagatttttgtaagtagtgctgttgatgtactttgtaaacacagaaagaagcaataaagttgtcatccactttaagagttttttgatttgtgttttatcgggttcggcggtctaaccggccacacaccggcggtcagatcggcggcagacctgcggtcagacaggcaacggcgaatggagttggtgattggtctcggcggttcgaccggtgttacaacctcggtcagaccgacgtgtttcaggcggtcaaaccggcgcatctacttcggtcagaccgcgatccgtcgaatttgagggtaacattttattccgcaaaaatattgggtttttgggcataccaaccattcaccctcccctctggttggcttagttcttgtgatacgatcctacaaaatttaaacccaaaacaattctatttaagcccatcaattattcatatgtagtttgggctgtgcaggtgcaaattacaaatgtaccaacaacttgaatttcacttatatgaaacaaataaataactcatctcgagatgtccggtgtgaagccttcacaagaattatagttaataatcattgctttgcacggaattttgcaagatgcaacaacaaaatttgtattttagttcactggtgtgttgctgacaacagagggtgccaactagcacagaccagtggcggatctaaaaaatcgattagttgatgtcataacgtgtctattggtattatagtatgttaattatgcttagctcaaattcttataacatataggtaaacagtttcgttataagttttgccgaaaatcatcggtgtcgcctaacaccggcccttctactgtagatctgcccatggcacaggcaaaatcttcaattccattgaatgtagagcgatcgacatgaggccattaagggcagatgaagttggtaagttaatttgagaggttgcacaaccaaattcgtgaaagctaaactggtcaggaaatcaaatatatagcggtgaatgtgcttggacttgaacaggcttgtccaaatgatggcaagcatggtaaaaaaacaatttggaactgagggaattatggtagatgaagaaccaagaattgcaataccttatttcccaactactctcattcgtatcactttcaaagaaaatggaaaacacaaaacagaaaatagcatgagttatggaggtctactaccaacaagatgttgtagcatgtacaattggaaactaatcttgtatgaggaatatatagcaacgtgcagtaggagggtgaatcaagacagtaatgattaaaccatagaggccggagaataaatcaagacagtataggactgtacagggacacagaaatattgtgaagattcaatcaatgttttcatattttgtttgagttattatcaccaatagtctgtggataatctgtggatatcaacaagtggtcggtgggatcacttattaatgtgaccttagagcgtcatacttaaaattgcatataatgactgacgaagcaattcaatagaggctatggagcaagatatttaaataaaagttgggctttggcccatattgtcgagccaagctgaagctccaattatgtgacttataattagatcactttcaattgccgcacttgtgagtatggacagaattttgagcgttgatgaattcctggaagtgatgaccacttgtttcctaccaagactggatccacaattttgaggcaaaattcacttcactacaaacatgaacttattcttcatttgttttctccaccataccggaaacaatggacaagtagcttaataagcacaaacataacaaaatttatagcataacatattcctccatttcaagcagcaggcaccttgtttacatggtcgcttgaactttgcctgatgtggctatacgattgagctgttgaagatggcaatggtgtactcgccctcaggcagaggctctgagcgtccttaattatattgatgaatagattacttgattacaaacggctctgaccatctcttaaatagacaagccataaagtaactgtcagcaaaaacccctagctcagctctcgatcagtggctaacctacaatctccgaatattttccagacgtgaacagtaactgaagaactgaaacgaaaaacagagtttttggtggtgcgaactgactgcagcttttctgggtttttttctttccttttattcacctccatgagggagtctgttacatgcgcaaccttgccggatcaacgactgaccgtgccaactgaccgtgccatcccacgatccgatcccagctcgatctcatctactctgaaaaaacagagaaactgaataacaaactctgactgaaaaactacattcagccagcgcatgcaactaggaatccaaagctaatatgctattacaaaaaatagtgcaaagactaatttaaacatgcagttaacttgtcacgaccaagattactctgacattttcccccctaatcttggtgtgctggttccaaacccatcttcttgcgaacctccaaaaatcgaactcttccaacaggctttctcaaaatatctgcaagttgatcttcggaccgaacatactccacagcaatttgcttcttttccacacactccctaataaaatgatatcgggtgtcaatgtgtttacttcgttcatggagcaccggattcttgcatagattaattgctgacttattatcaaccttcattacagtttggctaggttcttctccaatcagttcagccaacaatctagtaagccaaatgccttgacaagcagccgtagtagctgcaatatactcagcttcacacgatgacagagccactaccttttgtttttgagattgccagctgatcaagcttttccccaacatgtataacactccagtagtgctctttctatcatccaaatccccagccatatcactgtcactgaacccaatcaaactgagtccttcagttccttttcttgcaaaccaacaaccagtatcctgaaatgtacctcagtacatgcttaactgctgcccagtgttcaatggtaggtttttccatgaacctactcacataaccaacagaataagcaagatcaggcctagtattcaccaaatacctaaggcttcccacagtgcttttgtacatagtaggatcaacagcctttccatcactctccttcctgagctttaacctagcatccatgggactttgagtcgagttgcagccttccattcctgtcttttcaaggatttttgctgcataagcagtctgtgacagaaacactccagtttccttttggacaacttccatccccagatagtaactcagcagtcctagatcactcatgcaaaatttctttttcatctccagtttgaatacttcaatctcacttggttgagccccactgataatcagatcatccacgtacactcctacaatcaacttggagcacccatttcccctcacatacactgcactttcagtttcagattttaggaaattcagagagattaaagtgttgtgcaatttagcatttcaggctcgtggagcctgctttagcccatacaatgattttttgagcttcagtacctggccttcttttcccttctgaacaaaaccaagtggctgcacaacataaacttcttcctcttaactcaccatttaggaaagctgatttgacatccatgtgatgaatctgctagccttcacttgccgccaatgcaatcaagagcctcacagtttccattctagccacaggagcgaaaacttcctcaaaatcaattccttgctgctgcacatatcctttggcaactaacctcgccttgtgcttcactactgcaccagttggatctttcttcaacttgtagacccatttaagcccaatggctttgtgtcctgctggcaaatcagctagagaccatgtctggttttcttcaattgatcttaattcctcctccattgcctttctccagcattcatgctgctctgcttcaacaaaacttgctggttcttcggtggcaagcaaacactgatcactgtagtcgaaatccaaaacaggctcagttgtggatagaatatcttgcacacggcgatacctgacaggaccttcttctgttcctggcgtaactgagcttggcggcgtgcaaaattccaccctaactgctgctccagatggcgagggcgaaacaatagtcgacgccggcgatgcgcctccttgaacagtcgttccagcttgtccaccttgattagcaacaacgggttccatgggacacaaagaaatccaccgtgaattcctcctctccaattccctccgcctcaggatcatgccatgcccaggtggccgcctcatcgaacacaacatcacgcgacacacaaacacgtcgcgccaccggatcatacatccggtatgcttttgaaccctgttcataaccaataaaaaccattctcgtacctcggtcgtcgagcttcctcaagtttggcctcactgatttgacatgaccaacacaaccaaacaccctcaggtgttcgaccgatggacaccgtccatgccaggcttcatagggggtcactccgtctagcgcctttgttggtgaccggttcaagacatataccgccgccgtaacagcctcccccccaaaaacgcgccggcatccggctgatttgagcatgcagcgcgccgccgccatgaccgtctggttccgtcgttccacgactccattctgctgtggggaatagggagcagtgagctctcgcctcattccacgatcagcacagtagtctgtaaactcaacggaggtaaattcctccccgcggtccgtccttagagcctgcagctttcgcccagactcaagctcaacgccggcttgaaactgtttgatcgccgccaccgcctcgtgcttgccggagagaagtcggacccacatgtaccgactcatgtcgtccactaggagcaaaaaatactttctcccgcccggtgtcgccggcgagattgtcccgcacagatctccatgtaccagttcgagcgcctcctgcgccctgaacgtggcctcctcaggaaatggaggatgacgttgcttgccggctagacagccatcacacagctgatccatgtgatcaatgtgtggtaaccggcaaaccatgttcgcctgtgccagcctctgtagcgcctggaaattcaagtgcccaaaacgagcatgccaccgccaagccgtctcgccgccactcgccgccaaacaaacagggcttgcaatgttcagttttagcacatacagatagctattatcacggtataccttggtgagcagcaagccttcgggatcacggagcgtgaacacaccgccccatatgagtgcatcgtagccgcgcgcgtcgagtcgcccgacgctcacgatgttcttgcgcagcttcggaatgaagtacaccgcgtcaagtgaccggtgatatccgttcttgcacttaagcaccatgcttctgcgcccctggatgtctatcaccgagccatcgccgaatttgacagtgccgacgactccagtgtcgagctcggcgaaggctgagcgcgcccccgtcatgtgatttgtggccccggtatctaggaaccattatcctgtgttctcttgttcatgcccatcatcatcatccaggaccacctttctttcggtgaggtgcacttcttgcaccctaggtgttcgaccaaacgctgcttcgccggcgagcgatagcccggtcacatgtgccatgagcagagttggctcctcctctgtctgcatcaagtttgcctcgccgcggcgttgacgtcgcggttttcgacattgcctagcaaaatggccatattcttcacagttaaagcacttcacctttgagatgtcacggccgccgctctccccggaagctgcctcttttccctttggtgtaccagcaggtttgccttggcgattcggtgcgccagagctgctgcgaccctttccaccaccaccagatgcatcctactccttctgcttgctccgtgcctgccattgttcctccgtgagatacaacttgcttcttgcttctttttcttcgtcatcgctgtagctgtcgatcgtcgacagccgcccgacgagttcctcaagagccatcgttttcacgtcaagaagctgctcgagggagatcgctactggcttatacttcttggggacaacacacagcagcttcttgttgatgtgttcgtcctccatgactccacccatgtcacgaatgtccgcgacgatggcagtgagccgaatcgcaaattcctcaggcgtctccccatccttgaagcgcatcgcctcgaactgacggcggaatccctgctcattcgcctcacgcacgcggtcgacaccgatcctcatggttttaatggcatcacacgccgccttcgccgtgtcgtgcttcgccagcccgcgcaacatctcgcgcggcacggcctgaagtatcgccgagagagctgcccgatcttcacgaaactccacgtagccgggatcaatcgccttccacagcccctgctcctgcaggttgacgcgcatcaggagcgcccaatccggatagttcgtccttgacagcactgggaggcgggtggtgtgccctgcatctctcccctgaggcacaagnnnnnnnnnnnnnnnnnnnnnnnnnnnccccccactgctgccacttgcgccgccgcggccgctgccacttccaccgctgccaccgccaccacggcgtccaggcggtgtgtatgacatcgtcgccggatcgtgacggtaccgctctgataccaaatgtcagcaaaaacccctagctcagctctcgatcaatggctaacctacaatctctgaatattttccagacgtgaacagtaactgaagaactgaaacgaaaaacagagtttttggtggtgcgaactgactgcagcttttctgggtttttttccttgtattcacctccacgatggagtctgttacatgtgcgaccttgccggatcaacgactgaccgtgccatcccacgatccgatcccagctcgatctcatctactccgaaaaaacagagaaactgaataacaaactctgactgaaaaactacattcagccagcgcatgcaactaggaatccaaagctaatatgctattacaaaaaatagtgcaaagactaatttaaacatgcagttaacttgtcacgaccaagattactctgacaataacttacctctaacaaactccaaattatctcaagcctgatttatctttagccaaacaaactcttacacaactttatcttcaccacttgtagacgcctgattcatcttctggcgcctatgatacatcccgccgattagcgtgtctgcaacactgccatactcttgacagcataacaaaggggatgtgcaacgctccacaaagctactagtaatgtgaatacttttgtgtctcattactgtagttagaagaattgtgccccatttctgtaatgctgtacttttgattctgatgcctcccatctcctggtgaactttcttagctggtctatttccaatactggaaatttgtctgatcgagtagaagaggaagcgagaaattaaggttatgttgttcttctagccagatctttcggattaacgtgggagctcatagaaagtgttcgattagtataagtatagatataaatatcgaagctttaggtctaactacagcactgccatttcctatatatacatgccaccatgcatgtattttcccttgatatacataccacaataccagagattatacgttattttttcattcgtccattttatgctagagaaaatgtgataataatgagaggtctcaggaaatagcaaaaccctcatacctatgagcctaaccggctggttgagcccccctgctgcactgatgatggaagaagccatccagctgactagtcgagatctttcgttccaagaacaagcggtcaaagttgtttgattcctgtaaggtactgctatacaacaagtacaaggatatgtaaatgaaaagctacaaccatatgtaagccaaaagagttcaattagcttaataattatcattgtggactattacggttgaagtgatctaaagtcaaattttgctacaggatatcggtgacttcgtgtttttagttataggatattgtggaagtgacttttggtgggagacactatcaaaagttagatgttttctggtggacacgtgtacccattaaaattataattttcagttaaagaggagaaaaaaaggtcatgtgaaagttctgaaaagctcttgggcccacatgttagatctgtaatctctcaatctctatccctttctcaagcacatggggcccacatgtaagcctctatcattgttttccccttctttctctgctcgcagcaggaacaggtgaggtgaggcgtggcaagcttgatggcggccggccgtggacggcggcaacaggggaaggagatgcagaggccagccgtgggtgaacgggaagcggtgagcacggagcagtgttcttggccagcagggagcagtgggtcggtgagcccgggcccaccagtgaggcgacacaggagacaggccggtgaggtcgacggaggcagaggggtcaccaggtagtggggttcatggggaagagccggctggcggcgcagtcgcaggaaaagccaccggtagcgaagccggtgtcaacgaggtccgcggggaaggcggtggatccaagaggagaaggtgggggaagaggtgagcgatgccacacggaggtggtggccgccgctgatgcagctagcggagattggacgaggttattataaaagttagtcgatatagtggaacgacgactaaccttcccgatcgctttagacatttatcacctaagacacgccagaagacgacataggaacacatgatatttgttaacgagattcagccgaagcctacatccctagggctctgattatgaacgctcctccccaaccaacatagcacctagcagctacaagtccatggccacaccgccatcatctccctgcatgtctacgctatattgtagtcgccatggttacattgtggtgcccccctctctacataagagagatgccgggttacagagtccgactataactctaccccctaacacctatcacaactccgagtccaactgtaaccaaataagactggtatgttcgacacctattctgacagaggttgaggacaatggggccagcagcgcgacaacagagtggagggcgtccgacattccagtcagagaagccgatgggaatgaagggcgctggccatggcagtgtggaaggaggggatagagagataagagagtgcagatctgacatgtgggtccaatggcatttcagaactttcacgtgatttctctcgtcttatttaaacaaaattattattttaataggtgcggtgtccaccagcaaaaatccaactttgagagtgtattccctcataagtcgcttcgcgcggtatcctacaactaaaatcatgatgtcacgatgttatgtagcaaaatttgccaattttaaattactgtcagttagttcttagagaaacagtctacactgactttattattccctttattattccctttttgcagtgaaacagtctacgctagctagcttgttcaaggttatcaacagcgtcttctctttcatctcctgtacggatattttatacaagactgcttccatctccttcttccctttctgaactgtggttgcggcacttgtgattgctacattgagtcttcaagggatcgtggtaggctgctgtttattgttgatctcttcgattcaataaaaacaaacaaagaaactcctccttcatggacattatattcacaaccataggtgtgtcctcttattaggcttgtattgttttccacctctatatcactgaaataaggcatagtttcatggatatttagaattcctttgtagccgttccggtagttttttttatcaaaaaatttaatacttgcaatggccaatgggcttgggagacattggcaaatagtgtatcatattctgttgtagttctagcactagttgcaaacacgtctcgcaatgccaattgtagtttcagcactaattgcaaataggagaatgctctcatggtacacaagtacacaacgtgtatgttctatgcggtgcaagtcaattgttttgtccaatggatgtttagatcaggagaagaatggatctcccagcagcaccaagagaacaggttggctgttaacatgaacgtcagctgccggtgatcagcttgccaaaatttcagtgaaaatatctggtattttaaaccatgcatccagatcgatcacatgacctacatgttgggatacgggtaggctacgatagcataaatcaaaattttctatcgcgtaaaccaagaaccatgcaagtattagatcatagatcgttaccactcgatgcgctgcgcagcggaagaaaacgctgagaagtcgaaggaactctcgcgaagtagcgcgcgtcgatgcagaggaagtagtcgatcgcaccggctcgaccttctcctcctcgtgcgttcacctcgccgtactcccacgccgatcagcaccacaaaccagcggcgcctctaccggtatccacacgtaaaaggacggaacaccacgtgcagatgtactagcacccgcgcgcggctaggattttgctcggggagggaagtgacggctagggtttctcacgtgatgcaatgcctccgccggtcacacccctcatgaatatatagaattcatcactcgggcctccaaggcccgtaggacttctattccgatccctatccgaattaagctcatattggatctctatccaatccccttattccgacccattaagcgtgcgaccctgtaggttcatatatactcggctttaacccgaaaactccttttcggtccacgcgtcaacagcggcccctagcaaaacgtattgacccaccgggcatacataaagatcatatcggctgaacctctagtatatacttatatggacctatttgcctcacgatatcgattaagctcaaggctagatatgtgccatcctctaattgctcaatcattcactcgaacctgttgatagattatataacttgcgattgactcctcaatcacctttggcatggccaagcacttccataatctacaacatcgaggggcccagggatatctctccataggaggggcaaatcccatcttgattattcatatcccactacatgtttcatagcatactcgaaaactacttttataactacccaattacggagtagcgtttagcagtccctaagtaagctactacacatgttgggaaccatcacaatctcaggtctaaggattcaacaccaacactaaataagatcactgatgacacaatacatatggctattgcagtgtcttatgttgggtctatccaacaacatgttcactaacatgtgtccacatcattaatttgttatctctataccatgatccatgagacatgatcatcaattaatacatgtgctgatcatctaaacatatttgttccacatatgatatttgatcagggatcctttagaaatagcaacacataatataaagagtctcatgaaagaatcacatattcattaaccaataatgagtttatctatttcaaggaacaaagtcggataaatatgtaaacatagtgtgtaatacaatcatctctatgattgcctctagggcatatcactaacagtctcccacttgcactagagccaatcatgaacgtatcttatacccattgccctagtgtgtgcctcatgcttaggctgagggagtggctttgtcaacggatctgcaacattcaaatccgtatgaatttttcatatcttcacatctcctctacccactatctcgcgaatgaggtgataccgccgtaaaatgtgtttggacttttgatgcgatctaggctccttggcttgcgcaatggcaccactattatcgcaatagaggtccataggtctagaagcacttgtcatcacacctagttgagaaacaaatttctttatccaaacagcctcctttgctgcttcagaagcggcaatgtattcggcttctgttgtagaattagccactgtatcttgcttggaactcttccaactcacaacgcctccattcaggtagaacacaaatctagactgcaatctaaaatcatctttgttggtttggaagcttgcgtcagtgtaactatttacaacgagctcttcctgtcctccatagactagagacatatccttagttcttctcaagtatttaaggatattctttacagctatccagtgactcacctggatctaattggtatcggcttgttgcactaagtgcatatgaaacatctggacgtgtacatagcatagcatacataatggatccgattgccgaggcatatggaatcacactcttcttgttttgctcatcaatcgtttgaggacactgattcttgccaagattaatgccatgtgacatcgataagaaacctttcttagaatcttgcatgttgaacctcttcaacatcttgttaatgtatgtactctggcttaatccaattagcctctttgatctatctctatagatccttatgcccagaatatatgttgcttcccctaagtccttcattgaaaaactatttttcaacgatgtcttaacggatttaagcataggaatatcattcccaatcaataatatgtcatctacatataggattagaaacaccagtgcgctcctattaatcttcttgtatacacaaggctcttcttcgtttttgacaaagcccaacgccttgactacttcgtcaaaacgaatattccaactccgagatgcttgcttcaacccataaatggatttctgcaatttgcatatctttttagctgattgtggatcaacaaatcccttaggttgtgtcatgtacacatcctcatcgagatttccgttgaggaaagctgttttgacatccatttgccatatctcataatcgaaataggcagcaatcgctaaaacaatccgaatagattttagcatagtgactggcgagaaagtttcatcataatcaacaccttgaatttgtctgaaacctttcgccaccaatcgtgccttgtagatgtgaacatttccatctacatctgtctttttcttaaagactcatttgtactcaatggcttttacaccatcaggtggatcaaccaagttccaaacttgattgacatgcatggattctatttcggatttcatggctccaagccatttctcagagtctggtcccaccattgtttcctcatacgtagtaggttcatcgttgtctaacaacaatatatcatgttgtcctgtagttaacaacgcatacctcgcaggtgtacgccgtatcctttcgaacctttgtgaagccaatgcttccacaactggttcaacaacaacttgttcaacctgttgagcaacatcttgctcagcttgttgtggttgtgtggaccttgaaacattttccggtgtttcctgaatttcttcaagtcccaccatgctcccactatcctttcttgaaataaactcttttcccaagaaaacaccgtgtcgggcgataaacactttgccctcttcccgattataaaaataatatccttttttttccttaggataccccacaaagaagcatttatctgatttaggtgtgagtttgtccgattgcaaacgttttacatagacctcatagccccaaatctttaggaaagacaaaccgggacgcttccctgtccatatctcatatggtgtcttatgcactgattttgatggaaccctgtttagtatgagggctgcaggaat

SEQ ID NO: 7566 - DNA, 3001 bp, Oryza sativa
acaggtgttgcagtcgtcggcgcagtcgcagagggcggtggtccacgcccctccagccgccggcgccatgcggcacgacaccacacgctccatcggcggagcagggtagaacatgccgacggggatcccggtcaccggctccggcgccgccgccgacgactcgccggacttggacggatcagggggatacatggccgtgtagaagttaatttgactagctagctaatggatggctacctgctgtccctgagatgtgatttaagtactggacgttctattcgttgatggatatatagatggggaatattagtcatgttagttaattaagtaattaattaattgactagttagcgattaagcagagggacatagtagttgctaggaaaatactgggtttgaaactttgacgcacgcatgcagcgggattggcctggcaaactatgtcctgcagtctgcaactggagtagtagttttcttacatgcaaatgtcaccattgacttgcagcaggagtattactggccaggtgcatctatctgcttacctatctctacagaaccgtaccatattataatgttttgttctctctatctcttgactattgtctagcttaattcactaacatctatataaatttaaatacatatatagatagcatatatacttgagataaagtctattttccttcatcgaactagttcactagatcatacaacccctaaactattttttccctcattatataacctatacaaacggtacacgttactctataatggtatttcttttttttctctccacattgtcatggttatggattgcacatacctaatagtagttgactaaatctcggaaggacccaccacatatcatgtcctatacggaaacaacctgcggatatggagggagttccggataaggaaagacaaccagagttctacatggaaacgacaaggactactcagattgtatccatattggtttcccacgttctacttgtacaaggggacacctatgggtataaatacaagaccccctaggaggagaggggagaaccaccatggaagacacccatgacaatcaacacacgcccaccagaagccacaacatacaagcctacatacgccaagacacgccgccggatatcgacttcagggataggcatggctattcccctacggtgtctccggataccgtcaggagatacgaaagcgctatctctgatctcgccgggcacggattcgagaaggaagactaccctgttgtcgactacgagtcagaccttcagatcaacatgtggacaacagttagatatgctgcccacatattgtactggtgtgattatggtgaataaaagcaactccggctccggccaacatgatgtaaggttattacctgacagctcaggggcccgaacctgtataaaaatccccgtctccgtttcttttacctcagtctcgcgtatatcctagcaccgacgatccccatactgtccaaataccgtagtcgaaacatcaaacgtcgacacacataaatcatatttttgcattgaaattcaaaacgatcgatagatgcatattacaacttacctcttagtaatatttttttaaatttggccactttttgcataagtcgaaaacacctaagactgattcaaacaaattttaaatttcaatgaaataatcatgaaagaaaagtgaagtactttggaactttgatacgtatgtcatttatgtgtcataaatggcttaataattttcagttcaaaatacaacccatataaaatataaaccataaagagaaatgctaagaataaagtgaaacatttttaatagtttaggagtaaaatgagctgaataatagtttgaaggagtaaaatggacgaatttccttaatccgtttgttctttggttaattaacgatgagtgtatttgtagttgagtgtaggcatcataggtgatggaaatattatttagtgcacgctcgctacttctgattctaaagcaccacttcttttaattcaggtgactcttaacatatcacacgactcgcacagaggactcccaatgtgcgaatgagcattcaatgagtacttctttaagtaatttgatttttgaagtgattttgaaaagatttaacatttggatagaaattttttagttgcacaaggtccagttgaaaaactatactcaaaatttgaaatctttgacttcaattaacacttcaaaactcaaaatttaacactttcaactataaattttaaaacttcctcccaaattcggaactctcaactcaaaattaaaacttttaccaaaatattttaaacctacccaatccaactcaaaatttcaaatattcacagaaaatttttaaaacactatccaaattttgaactttcaacacaaacttttaacctttcaactcaaattttgaattttttaacttagtaatttatttataattattatacaatttcatcaaggggaagaaaaaaaagtgtgttagcgcattgtcccctcactactcgcgactcgtgtgtgactctgattcaattcgccagacataggacaagctcaatttgcgtcaactagccgcccccaaccaaaagcttttgttggcagtgattatttccaaattactcattgttgcaaatacaacgtgtgtgccttagttagttagttagttattcagttatttctgcatttgtttgattcagctttgcatgagcttgccgaaacttgtggcagtcgtgctccagttgagggtcgcgagattagctcatagagcccgcatcgtgcaccgagagcgtgacgcacgttgagcagctgtggggatggacgcagcgaattgccagcgtgagaagcggtcctagtggttttgatttcattgtaatcccattttgttatataaggaagtaaaccagaaaagcagctagctgttgcgctacgccaaaattcttctgcttcctttctttcttgtgttgccggatcggctacagtacgc

SEQ ID NO: 7567 - DNA, 1719 bp, Oryza sativa
gcattctaaataacatataccttgcttccttcagttttttagccagagacggtctcatgcctgggcgagcttatatttcggcaaatgccagtgactaaagcaccataggtgatgagatcaggtgcaacattggttttcatcatcaaaacaacaagatctaaacctaatcttacatctcctttcctaaaaaactgatttataagcattgtatagatgactgtttgtggtgcgatgccctcctccagcatcctttccaaataaccaagagcctttctgattttgtttccctttaccaggccatttataagtgaaccataagcatggggaccaggttgcaaacctctctttagcatttcatcgaaaatacggcacacattccttgtttgcctcgtcaaggaatatccattaataagtgatgtgtaaataatctcatctggtgctaatccttctcgaatcatttggcggagtgtagcctccgcttctttaaggcgcctcattctacacaagcacactataatagaatcatatactgcaatagaaggctctatcccatccttggccatttcaccaaacagatgaagtgcactttctatttcaccaatcttacagtatgctgttaccatgattgaatttgtggacatatcaggtctgacacccctgctctgcataatagtaatgagtgccctagcatcatccatacgattttgctcacacaggcattttatcacgatattgtatgttaagacagagggctcacagccataagccaccagcttccccagtagatagtaggacacatctagcctcccctccgagcacatggcaattatcatcaaattgagaacgatattaacagggagcacattgcttgtcactatttcatcgagaagatggtcagcctccttctgtaaactcatgttcgagcacccaccggcaagcgaagaaagctccagcagcttggcgccacaatccaacttggcaacagccttcaatgctttccgcacaaataaaaccacccagcctttggggaagaacctcgctatcgaaataaacataacatggtcagggaaaaggccactctccagcatcttatcaaacagattctcggcctcacccaacttcccatccttgcagagcgatgccatcagaatagtgtagcacctcaagtcaggtgcaacacccgtccttatcatcaccttgtagatatccatggcagcaccaacccacttgctcttacaataccacctgatcatcacattgtaggttgctgcgtcaggctgaatgcccctgtcaatcatctcatggtacatctggaggccatgatcgacacgcccatgctcaaacaatccccatatcatcgtcgtgtaagcgtacgcatccaactgaacatgctcatcccccttcatcctacggaacacatccagcgcaggctccagccgcccctcccggcaaaacacccggatgagcgccgtgctgagctccctatcgagatacatccctttgatgagcatcagctggcacatgtcgctggcatcgagggagcgcctggccttgcagtatgcgaaggcaagcgacctgtagacgcggacggggggtgtgagcccggagcgaagcattgcgtcgaacaggaagcgggccttgtcgacggccccctcggagcacaggcccgggatgaggagggcgaagtccgagacgggcaacggcgaggggttgcccatc

SEQ ID NO: 7568 - DNA, 2372 bp, Oryza sativa
cggcggggtcgggggcttcggcaaggccaaggcgggaggcaacggcgcgcgcttcccggaggcggccgcggcggaccaggcgggtgaggaggtcggcgcagtgcgaggcgtgggaggtggaggccgccgccacgcgggagcacatggagaattaatgggagcaggagacggagtcgtcgccggcatcgagcgcggcgggcgggggcagccgagggtggcgccgccgccgccgccgccggggaattcggggaggagaggaaggatttgacgagcgagcgatatccaccgttgattaccatccaacggtcacttgattattactctcctcttctcttatttggaatgaaatcattttttatgacgctattgtagtcttgtagatagtagagcagagtagaatactataattacttaaaatgggatactaacatatggttttttattatttattaattatagagaatgtgtatgtcttcattttattataaagattagccatgatgatgctctcctagctatgataataatatggacatagttcgaagggattagtgtgcacgtttcgtgagcgtccacatttgtgctgtgtttctaaacaaacaatatagatacaatgcatgatactatttgcagtttctttgatagcatgacgataaattgtgaatggtgcattttcgtatatgttaactggtgggaacattaaaagaacattgtagtgtacattaacacaaccttttgaaaaacgaacgttgttgtgttgtgtacacattgttcaagtgagacccacttgatgactataggcctgtttagtagagctacaaatttccgatcgtatatgtttatatgttaaattatagcggtctaaaattttattgttttatctaaaacatgaataaaatgatttattcaaatgttgatcgtaaatctaaatttatggatttgtagagccaggaatacccagcaaaaaatatcttaaatatgtagtctaagaagctgtgccaaatagggatgaaaacagatcgaatacggtcggaaactagctttatcatattcgttttcataatttttttcggaatagaaatcggaatcggaatcggaaacccggatatgaaaacggaatcgaatattatcgaatacaaatacggagcgaaacgaatactgtgacgaatattaatcggaatataaaaactcctcactactcacaaacgatttttgatattgtgtttctaaaatcatgctctatcatgttattgtgtttctattgctattattttggcctttttgtgactgttgttttatcaattaaaaatttgaatatcaaaacttcaaatgatattttgaagcagtaaataaatttagctgaaaaaatcatgaacataaaagttgtagaactcatcaagacatataacttttattttggtaatttcttcatccgataaagtgacagtaacattgttcataaaatttacatctatctttcaaagtttataaaaacaaatgagagatgtaaattttgtgaacaatgttactatcactttgtcggatgtagaaatgaccaaaataaaagttatagattttcatgagttatacaactttgttgttgatgactttttcagttgaaatcatttagtatttgaaaatgttgtttgaagttgttatattttcaaattcaaattcaaactattcaaacaaagtcatatagaaaaatgaccaaaataaaagttatagatcttgataagttatacaactttttttttgacaatttttccatttgaaatcatttactacccaaaaaaattatttgaatttcttatattttaaaattcaaattttatatagttcaatcaaactcagatggagaaatgaccaaaataaaattggtagatctcaatgagttcttcaactttgttattaataactttttcatataagttcatttagtatcataaaatttaatttgaagttcttttttttaagaagtctgatttgcctcctctttggcttgggctggcttatgggccttatgtgttgtcggatatccgatggaaaataccggataatatccgacggatatcacctatatcatattcattttcatatccaaaaaattatccgaatttgaaaatttccggatatatccgaccgaaactatccgaaccgaaaaaaggtccggtcggacggaaattatccgaatcactttcaaccctagtgccaaagaagacctatgaatatagctttttgtagtctgtagggatacttgcatctcgaattttttttatttttaattttttttattaaaagttttacaaaaataattttccattttgaaaattgacggaagtagtcgcctaccgccctctgggagggcgatt

SEQ ID NO: 7569 - DNA, 9185 bp, Oryza sativa
ctgtgtgtgtgccctccacataattttggcatgcaataagtgtgggtaatatgggcatacacatctagcctgactcttccagtctccactcttcaccatgtaggaacaacatatttgttgctctatttaattagagaaaggggcaactattaatcagttgcctgatatttctctatccctccgtcgattttttaatgaacaagatctcatcaagattagcggaaatcaggtaaccctacctcttcttctcctgatccattctggcgctgccaatcacacccaatccatcgcaagcgcctccatccatgtcaccagcatcgccgccagcgaggtaagactcaccgaccacacactctcaacctctctcccttctcatactcctcgtctacgttggtgacgtcgccctcctaaacaactccgccaagcttcccttgctccacctctcctccccgtgtttggcgggggaagagaggtgggggcaactaggattcctatttggatgaagcacatgcttcaacaaccacgtatacttacaataaaaatcgaaaataattcaatagcaacacaatgaaaatatatagattagaaaataacatccaatctgaggaagacacaggtgaccttggctcaatgtcctactccatctcgtgcatctttgcaatgataatcagagaaacaattttggggtacattggaataactgaattaataaaaattggtgtcatttataacaaatttgaccagctggatggaaaataggtgactcatcaatgttgtcgcaaacagtgaaagaaactgtcagtatttttcagtatgatctactttgatttatatagtgtcttagagtttttgttttgcacatattcaacactaatattattataaatgaaatataaatatattgcaaaatttaacatttgaaaacataaatttcacttttaatattaaaatttccaaaaataataaaaatatcacgaagattaacattttgattggtgcctatgggggacgtacttacggtattttttagataatggaagctttgattgaactcagtcaattacattaaggtgatacaattatcttgagaacactttcggcctctgcataactaagatgcacacaaccgaacatacaaaaccacactcaaaaggaaaaaaagaatgacatggaatatggagaaccaccaatcccaagactaaattgccacccatgaataactccttaaccatctcctccaaaagcacatagaattaagagccaccaatcctaagactagattgccacccatatccctgggtaaaaaactccttgaccaccttctccaaatattgacatgccgcaactactatatcccgcgaaccatacttctgtaggatagcccatgtacaaagccaatggataagagaatatataacctgcaaaggtgaagatatgactatttttttaatcaaaaaccacattattcctgtatagccaaagcaaccaaatagtagcaaccgctcctaacagaacatgtgctttcaaattattatgaattccatcgagccaactcccaaacatatgcgctacacaatgtggtggaggaagtccagatgccacttggatgatggaccaaacagaatgggcaaaacgacgttcgaagaaaagatgtctaattatctcatcattgcaacaaaaacaacggttcttattgctttgccatttccctttggatgaatagttaatttagtccctcaagtttcaccgaaggctcaatttagtccttcaggtttcattttgtccacataggtcctctaagtatttgttttggcttaaaatcatccttgggcccacttaatgtgccatatggctatttctagtcaacaattctattagaaaatatccattttgcccttaatttgtataccactatacactagaaaaaagaaaaccaaaatgaataagcaacattgtaagtatacttcccattatttcaacatgtgcacataaacttgggcctaatggctatcgaatacacttgcaagtacataatttgtttttgttttacataaattgctatgcagtatctataaaaagaattcatagcatgcatttttttctcttatatatgtgaatgagggggtataagtgtcatttatcaagagagttgttggttatgtgggttcaaggataagtttgaattaaaataaaatcttgaaggactaatatggacagattgaaacattaaggactaaattgatccttgcatgaaacttggaggaccactttggctattcacccttttccttttgtcaaattgtcctttgttaataccactccacgacgcaagtaccaaagaaaaatcttaactcttaggggtatatttaattttcaaagacgcttattaatgttaggaacatgctgtgaattagagctagataatgagacttcaccgagaactccccatttgaggttaagtcccaatgaaactcatcttgttcctgagttaattgaaaaccagtgttacacgtggtaataaattattccacgccactagttttgatcctataaggtctcttctccatgaaaaagatggaggattgtttttgaagacttgtgcaactgtagcctgcttacgcctaactatgttgtaaaggcaaggatattgtgctttcaaggttgaattgcccaaccatttgtcttcccaaaacctgatttgggagccatctttaattataaaggatccaaaacggagaaagtcacatttcaccttcatgagactagaccaaaagtgtgagtccctggccttctactgagcttgagaaagaggtttatcacctagatacttattacgtatgaattgttgccaaaccccttccgtggagagcaatttgaacaaccacttactaattagagccatattcttaatttctaaatcatgaattcccaatccccttgttccttggggcggcacaatatgttccatttagcaagacgatactttttttttcgaccatcactttgccggtaaaacagtatatgctgtagaatggtgtgttgcttagctgtttttattgtagtcaactttttgagtagttttcacgaaggaactagaacctatgttgtttgggcccactttcgtattctgaaattgtaggggttcataataaacaattatatataaataaaaattctaccatgtgaacaatatcatacccccttcctgggaaaccatctctagtgtggtggtggagtcgttggtgcctaactccatccacaaaggttcaaagactggaacatatggatattatgtacatacaaataggttttcaataagaatttagtgagattagatatgtccaactcattttcgtctctttgagcgtgcgataagaggcgcatttgcggatgtaagtgtggtgttgcgtgtataggtgtgtgtgtggaggtctgccatgtaaaaaaggattatcacctccttctcccaccatcgaggcgcttgcatcccaacaattgtgtgcgttcatatacctcatgtgagatcttaatatcatttatcaatttttaggtagagaaattattttgaagagaaagttacgatcttcaaaagatgcactttatttagtacatcaaagtttttcagtttcatgtcgaaatttcttacattctagtgaaagtttatatccataattcgtgcagagagtttgttttatagaaaatatatttttagaaagtttattctaataaagaaagagtgggctcatatttttctataaaaattattttaactcgttgttgcaggtattatcacgcacaagattcaaataattataaaaaattcagataaaaagataatatagttacgtctctcttatgtcttcacaaccatataaggtcaaatttaacttaacacaagaataaaaaaatatagattacgataaagaaacaaatatagattacgataattgcaattatatatcacgtcagcggttggagttttgttgtatttgttttcatgcgcatgtgcatagaacaaatttaattaacttcgtctctagatagagatatgcgatacaataattcatgtgcataacttttttcgcaaatcatagaccgcatatgacgaacgagacaagtttcccgagcaagtcaatataagacagtgacttccacgtgtcatttggcatgtggtgtgtgactttttgctgcacaacacaacttcataatatgattccttgtcagcaacgcgtggagacagggtacagagattccttgagtttgtgcacaaatcggcctgctcgctccgccacctatgtgcacacgggactgtgagagcacgagtcggtgtcttgcttgtttctacgatgtttttggcaacaataatgtgatagccgtggagtcgaaattgttgtgtcgctaggcgacaagctcggcaatgataacactcgcctcgcgaagtcgaagcctttgtgtcgcttacaacaagctttttatcgatggctattttgagctccgccatttttacggtcttgttagcttaggttagttagagtgttgtggttgtggttttcgtgcagtttcccctaattaactgtgcattgtaaggttttggtcccgttttctccttaaaatgggacacctttttctttatataaaaagtcggcaacagcctgaccgtttgaaaaaaaagagcacgagagtgagaatgagaggtaggagattaggttaacaaagagatgggctgcctgatgtaaaattggtcaaattgagtggttgtatagcctgagaaatgtgcggactatccgcgccaaactctatactggataattcgtttaaactatcagataatcagcatccgttggataccaccgataccacatttgactccatatctacatcctgcatccatatcacacggatatctaaaaacctttaccatgtcttcaatttggatggattcggagtggaatggatcggataatattcaatccgtgttcacccctagcccataattagtcatactgatattatatggcccaattgagacatattaatcaccgtattattactatagattatctacttaattatcttgattcattaaatattttgagaaataaattataattggtccaaactattacatataagaaagtgtgttgagaaaacatattcttatagacgtggagcagataatcggcgataataatttggtgaagtagggctctgtaatgtgtcgaagaaaatgagtagatgatgagcaccgaagaattgctccaagctcagatcgagctctaccaccactgttttgcctatatcaagtacgtggtactttgtactcggcgaagctttcccacatcgatccgacggctcatgcgtgtgctcactgtgtctatgtaccattgaatgtgatttatccaatttatatggacactatcttttttttctgaaggatataattgaggatctagcaccttcactctcaagttctataaaacattggaggaaaaaaaaaggacatgccccattgatcctagtgggtccaaatgaaaataatgtagaatgattgctacaagaccctttatatttgtaattgcatatttataaaaaaatacaagaatgagatttatagtaaatataattattctttggaatacattttatgtaccctttgtgcatgaaattcagttagttatgttcaatgtagggttgcacataagactgattaacttagacgcatacaaattattactataatatcatcgttggacgaaattcaaccatgtgtagacggttcagtttttccattttctgtgagtacaagtgagaaggcacgcacgcaccacactagcatcagttgcatcctagcatttgccaagattgtttagttaaataaacaatgttggctttatcttttatgaataatagaaagagctagtttttacaccttaagggaatgctcgctctatatactccttgcctctcaattctacatctatctattatatactaaaagtccatgaaactttctataaatactcctaagacgccacgtgtcactcctacaaacactcctagaccgccacatggcactatctaatctcacagtcgattttcagttaaattggtggacctggtattttggaccattagattagatctactatttaataaaaataccttcctatgctgtgggccaaaaaaaaaaaagaacgtacgtagatacatataactttgtataactgtggtatacacttaataaacaatgaagtttacctacttttcacatagaaaaaagaaactcgcgtacgaacttaattacgataaaagcggtaaaatagaaaaaaatacgtacatggtgccattgaaagaaaacgatggtattaaaaataggattttatattatactatttaaaatatcactctatatttttgcgcaaacatacacaattaaaatatattttctacaaaataaatacaaaatattctttcaacgctctttaaacgttctatctttaaaatttaaaaattatataccaaaagttcatcgagctacaattgctaacaaggtatttgtgcatcatatcgaatatcaaagatatgatgaacatgtgtactattagacacataatacagataaaggacaatttataagggacatttgctcatttaacccttttctaaagcttaactatcaatttgatccttttttaaaaaaagtttgctcatttgtccatgtttttcaaaatagaagttgtcgtctgaccatactttcactacatcgtgagtttttcatttagaaaaaaaaagaaaaacatgtatttacaagcccaaatgactaaaatgacaccgaatacatcaaccttatcctcaaccactcatttgctcattctttatcccgctctctctcctctctctgtccaaagcgcgatgggcaggaggagtggtggcggccgcatggcaacagctgcggagggccctcggctgcttcgcggagggtaggagcgatggcagagaggcaacattgtgtcgccgacgaggaggaccgctggcggtggtggaagaggcggcgacaacttggcagaggggaagcagcagctccatgaagggtaggagggtggcgtcggctcagcgacgaggaggaccgtcggcggtggcgaatggaggcggcggctgcggaggggtggcggtaaccacggatatggtaggaggagaggaggcagagggatggcgtcggctcgatgacgaggaggataggcggtgacggtggaggggcggcggcacggtgacaaggaggaccaccggcgcccacgcacatctctgccattagcttgctacctgcagtttcttccgcacaaaattggacctaactttggaaaaataaggtcaaataagtatgggtagaagtggtatttggggcttttgttaacactgattaatgctcttaagagaagagggttagagtgtagcttcggttttgaaaagaagggtcaaatgagcaaagtgaccaaaacagggtcaaatcggtagctagacattcaaatagggtcaaatgtgcaattgctccattttataatatagattatatcattttgtttcattttataaacatacatagccaaagacacgtgtgatttactttgatctatctaaaaaaacatgtctacggtaataagaatcatagaaatttaaaagacagaaaaactcaagagcatataccctaataataccctaaaagtaaataaaaattatcaatggctaatccctacgacatataaaattataaagtattattttatcggtttattaaacgccctaaagaaccctcctagagcatctattaaagcctttaacaaataagaggaaactttaaatttcttctgtaacagataaagcatctaaaacttaatcctcattaatttaatgctcccattaattttagccattgggtcatttcaatgggtatgtgtatacatacattatttaataaaaaaacattgatgtcaggtgaggttgtattgcatggtttagagggttgttgtcaggatgactagcgttgagttttactaggttgctagccatccaatgcatcacaaaaagagcccataggagatattgtgttttgttgatcgagcgaccatcaagagaaggcaacgaaccccagtacaaatattttttatgagtaaatcttctcttaactgaagtatctatgtaatattatttaagtcgcattagcttgaagcatgcataatatgataacatggtatatctagaaggctacatgttagaacattcaattaacccatcttagaaataataatacttagcaataactcaagcaggtaacaaatttctatctttaattttgttatcaaattttaatcgttggaaagggggggatagagtgaatggttcaaacagttatgtgaatattgtccaatttgcaagctaaatgttttttttaaaaaaagagatatagcgggttactgattttgaagtattatcatactattcaagagcagagcaagtagtaatcgtatccaaaatacatacaaagaaccatgatacataattttaatattcggaaagatagaaatgcccgcgcaacgtgcgggctaccttcctagttattagtgaaaagaggatcccaagatcccactagtataagccacgtcatcaaataaacacacgatttaaaaaaagtaactgttggatcaaatgagccaaacatcagtcacataaagcaaataatacattatgggatgttttcgacccttcatgcacatatcataaaatgtgtggaaacaaagatatggtaatgaaaacaataccttcaaaattatccttataaaaaaataccaatgagtattcaatagtaattctactatatcaacgataacaagtatccgtgaaaatattcatagttacataacctaatacaaccgtcgattacttcactacatcttaaaattaaaaaaaatcatgtgacatggatgacataataaagtttgtaaagttgatttaaatcatatgattataagatttactataaaaaaacatacatatacttctcaactggtgatagcagaactacaacgcgtaacaaatatggctatttacattattaccagaaaggaaaaagtaagaattacccccctccccccggaactatcgcggtcatccgaattactcccctgaaccat

SEQ ID NO: 7570 - DNA, 34552 bp, Oryza sativa
atggcgtagtagatgtgctcacagacgatcaattgcagaaatcatcatgtttgtgtgcttgatcgggtgatcaggccgaagttgcacacagcggaatgacgaaatcgaagccggatgccgatgtcggagacgcatagatgtcgacgaggcggtgggcgacgcagttttcacgttacgcagtatttctctcctcctattctattcaacaaacagattagcttggttctcggctcaacccctcacggcccgtttggttggagggagtttttaggagggattgggagtttagagggatgaggctattaagtgttttgtttggttgggaaacataggaattttggtgggatggggatggggaattgaggaaggaactccctccttttcaatacctgggtaggggcaggtaattgggagggaattcctcctttactttttctaagcaaatctcagccatccgtttttattaatgacctaatctccaactaaactccctatcaatttccatcacctctaccaaacaagatattagaattaaaaatcaaattctcatcttaatttcatcatcaattccctcgtgtaaactcccaatccccttccctcgagttaccaaacaagccgtcaggtatgattaatttgacttcatttagcttatcctagtactaatgactaatctctaaatcatatctttgcacctattcctgttcctgaaatatgctattcccttctcagatgtacggctgaaaatttgtagatctgaaggttccaggttctttgatctctaatttctacctattgtcttctttgcctagaaagtatttatcaggaagtgagaaaaggaaaaataaagaaaacgtgccgatgatttcatagaaacacaaagaggatccattgacaagttttttagaagtagtacaagtttttgtgtggaacaacctaatgatcatgattagatgaaatcgcttccggtaactaatgtagccatgagcccatatgatgtgaccatggctactatagatataaccgctgctcacaccaagataaagttgactaagttctggaatccaattcagccacctgctaccgtgctgaatttaaatggccgccaaatctgtatacgagctatgttttcggtccgtgagtacttgatggaaagctcttgtaatcctctttccagcggatccggcctcatcactaaatttcattcccgtcatccacaatcatagaaaaaaagtgttgcgtcgcttatattggaccaatgggcttgtaacttcgtttgaggtccatgtggggtgcgccccaactaggtggagcacgaccttagggacccctaggtcgtcctctcacttttataaatagctaggtaccccttcaaggtttcttgggttttgttgagattaaagtttagcttcgctactttgccgtgtaatcccgtgatcggttagatcgtcggtttgcctgttacgaaaccccggcttatcatttgtattcaattcctttttgcaattcaaattgctttcatcttgttattgtttgttttttcgatttgcttgcaggaataaggttgagtcacaccaacatcaacacatattctcaaaccaatttcattgaataaatcatttgcaaagctaattattcatcacaaattattaatcatgataatgattttacaagggtgacaacttcttgtaacgtgacgagcaaagcctccatttgctctattgcaattgttgagaggcgaggtatgaagcagtcttttaggcaattttggtcgactgaatgtgtgtatagtgcttcgaagcgtaccaacagggtattgtttcggagccaattgtccctgcagaaagaaccatgtgttccaacccctacttgtaccctcgactgttgttgggggataggcagtagcttcattctgaagagattgccagtgcggtccatatccaattggcccaggacgattcagtctgctacagatgaaaaatcctcttgattagtaattcattttgcattttgagatttttttttattccccaaaccccctgtccttcggccgacatacctgttcccaagccaccatgcattgcgagcccaaacatgtgtcttctcctggccagaggaacactcttgtctttttatccactgctaatcacactggccggaagactgaaagcaaacatgtcaaaatttttgttctcatttaacacccgagcccacatgtcagcctctttccccattcgtacaaatgagatatggggctgggtgacggaggaggcagacaagtgagcccggatggcaaatgagaatgaaaatttgaaagtgacatttgagcatgtgtattttgggaggatggtaaatagtaaattctcccgcaatcataggttgcagatcatgttagaattaaatgggctaggcccaaattaattctagcaaccccaaagatccataattaatgttaagagattaataccatcttggaaaccaacgagaaagacctcaacttaaatagattgctaattgagaacatctgttgattggttcagatggtggttggactgccacacgtgcatgcgccgagctgagccaaggcgagtcgaggcaaaagcataaccgttgggcatcaatggtgaagttactccggtaacggacgagaccataatgcgccatcaatcccataacgttatctcacatctccggggtagacagagggtacacttcctctattccatttcattggttgttcttctgttcttctcggttttgagtacctgcgtgcatgggtaatcgaaatgagtagggcctccggaactccgactacctgagtattttctacggtttgcatcttttccatttgaatcccaactccatagctttttttgagtattttctcccatctctgcgaggcatacctgagagtgccacccttcttagatctctttaggtatttctatgaaccgaggagacggatgccctttcctttgcaccttgcatgttcaggtacactcatgtcaacttcttggccacacagaagacagattctctatcatttccggtgctcttctttgccgagtttgacaacgagaagaccgagggtgaaccacctgtcttttgttgcaaggtggatatgcaactaccttgtgcaggtaattaagctttccatccatacatgttaattatgtatgcagataatttggaaagcatgtgtgttaaaaacattggtaatgttgagtacaataccaccaaacatctaatgactttcaaatttactcccaacaaagtagtatttacaagctaatggcatgcaaatgtataagataattatgattaaaaagttatttattatctacatggaagtgataagagagacaaaagacagaataatcacagagaaaatgattaactgaaaaatgcggtgccatatttttttagcaaacctgataatgataatagatatttcttttaggaaagataattagttatgctccctccctcgaactgagatatttcctgtgtattcaatcgtatacacgagggttgtcttctcctctgctctatctcctagacaggtatgaaagttgaattcgaaaacctggaatgagcgtagggatatagatccttcaacccaagagggtatgtatcccgtagcgagtggaatggaaaggttttggtttatcagttaggtttgtacacttttcctgtccgttaagggaaaggtaagtagtataaactaggatgaacccccaagaagttttggttcatggtgtgggatgaatatggtttcaagggcttaagctatataattaactagatgatgccccgcgctttcctgcgggatatatgttagataatggagaaataatgaaatgatttggaaatgataatttagcatgtgcatgtttaattttaaaatgaaataaattttagatataattagtatatacttttggttgcgtgcctatgggcagaggccggagatgtaatccatttccattatctaaaaaaaattactatatgcttgcatgtcgagttttgtgtgcttaatgggttgatatggcatgcatgcatgtagcttttagtagtgataataaatactatacttgtgtgttgagctttaagtatttagtgagcattaagtttataaaaagaagagattataccccttattcatactcattagtttttcgattcctttcatatacacattagataagtcaaagtcacaattatattttcgttgctcaacaattatttttagaaagtcaatacaacgattgaattttccgataatccgagtattttattttgaacagaacatgtccggcgcctgtattgtgaactgcaaggagcaaaggttgtgcatccagcttttcaaaaatttcaaggtggagacaaagaattcgaggaggctatgtgtgaaaaacattctcatcttgcaaatgatcaggttttgtgccgtaacgattatcatgtcctgagcctagctaggtgggcatgacgaggatttcatgtatgtggatactgtagcctctgaatgccctccttttgcagatgattactgagatggagtttactaattgcactttgcaaatattaattgatgcaacatttccttgagtatataacagccaagctagcatgaactccttgagtgtataacgtcaatgttaattagcatgtattatagttcaaaggttttttctactgaagatatcctatcttagtataaagttatcccccactaactccttaagcttaacatgcaaagatgctacaccatcatccactaacaagatgccacatcatcatacactaattaacaagatgccacatcatcatccactaacaatcatcacatttaaatatcatgcaaacatgctatatctttatagtttttataatttaagagcttttcaaatacaaacatgttaaattatcatccagcataattcatataatgtttcaatgcatatatttattatgttttatgatattctatggtccaaattatatttctcattttttcctctaattcagttggttttagcctttagatgattaatctacggtccaaactatctccctacttttcttcttccataaagtcataccaccttactttttacgtttgaatcatcattttacatactatttaaatttatattatcataaaccacattaatttacttaatctgatgttatctaactatcttacacttttttttattgttatcgtactaaattcctgcagcaatacgcggggtttcacatagtaacacaaacacttgtgtcttttctgccttttcctaattacgagatcagcaatttcaccattttggctgtgtttgtgctcaagatgccaaatttcaccatacaaatcaggcatttaccatattaccatccatggtacctccaaagcatgcatctttttttttaacaaaaatataaacaatgtacatgtacattaggaaaaaaaaacttgtgattgcaggttggcaaatctatcacataagttaaatgccctggtcttcaaaatctcccccatacagatcatggcatctgtaatttcaaaaattctgaacatattgattactattattgcagtccaaaatgaaatcatatgaagaaatcagatgatcataggcaagacgaaacggtggctcgtcagtcgtcaagctgtacgattaaactaatagagtgatgtgtatttcactttcatccctttagcatatacctaatgaagattctctaaaagccagcagatagatagcctggtaaccacagtatctgcccatgttgcttctcttttatatatatattgtccatcataggaagtgatgaatacaccgcatctgcataaaaaccacgtcaggattcactataaacccatatatgttgtgccaataaagtgcaaaacaactgacaaggcacgcagtaatcctgcaaaactgtgtgtgtctgattagtggagacactaacaataatacttgtatcttcttcagaaaccattcaatctcaagcacacctggatggcatattctctcttcaattttttttttcagtcttaaagaactctacttaagcagctgaacagatttcaagaaatacagactagcttgagttatcacagtgcagtgtagtagtgatcagccatggctgttgcactcgcgctcttggctgccatgtcggcgctctcgtcgtgcacaagtccggccaccgcagagctcacacggcacgagcacccggtggccgccggcgcgccgctgcgcctcctcgtcgtcggcgactggggccggaagggcggctacaaccagacaagagttgcagaacaggtgattttgctttctttgcatcaaacattcattcaacaattcaatcagagaatgttaatttgttggcaccgatcaaaagaagaaaagagaacaactgtatatcgatcagagaattttgtttgtttgtttgtgaggagttagatggggaaggttgcggaggagacggagatcgacttcgtcgtgtcaaccggcgacaacttcttggagaacggcctcgccggcgtcgacgacatggcgttccatgactccttcatggatgtctacacggctcagagcttgcacaagccatggtaccttggtaatcaccatctaaacctaattaatttccatttaatactatactattagatcatatggatttataaacttactatgtgtttagaactttttttttctttgacatggtgtgtttctacaactttagatggataaaacaagtcagaacaaaataaatgatatttacattctccttaataaaggagaatggtcgaatgtcccgttgaaaagtcaatatcattatgtatttaaaaagggatggagtactaactaaaggttatcaattgttttcagttcttggaaaccatgactacaggggaaatgtgctagcacagattgacccagctctgaggaagatcgacagcaggttcatctgcatgagatccttcattgtcagtgcaggttggttaacacatcaaaacccacaacaaaccttgtttcttttctcaacatgcagcaattaaaatctgtgttcatagctagaatctttgcaaatttacaatggaaatcttttctgattaatactagaatccactgaacaaatttataatgtccttttttctgtaaggaattgtcgatttcttctttgtcgacacgaccccgtttcagctccagtactggactgatcctggagaagatcactatgactggaggggagtcgcgcctcgggatgcgtacatcgccaatctcctcgaggtcagttcctctgatcaatatccactgcaaaaacaatccgctcgttgcatcagcaaaactctgtaatgagatgactgtctatatgattgtatcacctaggatgttgatgctgcaatgaagaaatcaactgcaacatggaagatagctgtaggacatcataccatgaggagtgtgagtgcccatggagacacccaggagctccttgagcttctccttcctgtcctcaaggtaacactgataaaaagtagtactttaatcttctaccaattggtttcgcatatgagcattcgatgaaatttacgatgatttcacaggaaaacggtgtcgatttctacatcaatgggcatgatcactgcctggagcacatcagcagcagaaacaggtgagcacactaataccttgtgacacaatagaggaaagaagggttcaagaatcttatgttcttcctcctctcttttcagtccaattcagtacttcactagtggaggcggatcaaaggcatggagaggcatttttcaacaaaacgaagacaagctccagttcttctatgatggacaagggttcctgtcacttgagctcagtgagaaccgagctcgattcgccttctacgacgttttcggtgaagctttgtaccactggagcttcagcaaagctaatctgcagaaggttcagtcctctgctagtgtaactgaagaatgagagaagctggagccttcagaatacattcccacacagctgagtagatgtctacctgcataattctacttgtacaattatgtcacattgtgctcatcaatactggatttgctatgaattagcaagtgtttgattctactagagaaagatcacagaatgaagcaggtgtttttgcacgaagccaaagacaatcactattaaatagggttcacatctgacttgaaggagcttcaggcatcagttgacacagaaatgaattatgcagactagtgatcttgtcttcatacctaataaagctttaatgtcacagcttaccatggcatgtgcacacggtaactttagtgcaaacactataccagtaatactgaattcacttcaattattgtcggacgacataactgacaaacacatctcccacggtaggatgcaaatttcagattcgttatgcaacaaagatgacatatatagcatcatatacaaaattttctttcgaatttctcctcaaattgcactccatgagcaaatgggaggctcataacatacaaaaattgatgcttaagctctgaccaaaaaaaaaaagcatcataattggtcccgctgctctaatgacgccgtagagaagatgaagttgtgtggtgagtgcagttttgctttcagatagctacaatgttcaaaactatttgatcttgagcatcacgctgtcgtgcaacatttccaagagcatagcacttactcaagaatatagcctgtgtttggaaactcctgtaaccacttggacaaaaagaaatttcaatatcttcagctatctacttttaagataacagagatcttgtagccagcctactttgcgacaacattctgctcctctaaacctccagttgccttggcatgggcaacagagctaccaccatctgaactcccattgcactttggcttagcttcagccatatcatctttccttgttggtttggaagaaacactaccattagccttatgtgcacgagcacttacaccagatgaagaggcagatgattcttgtggaaaaaatggtttagcatcagcatgttttacgcccaacttctgagctgggggtggattgcctgatccaggaggaaggaatacccctgtaccctgaagaggtaaacgaggtgaagcgggcctgggagcagcttctgcgatccatgcggctgtactgtttggcaatgtgacagctgatgcaaatggaacagcttttggagtgataggaagtggtgcaacgaaaactgtctggatgccattggatggaatatggtgaagtccaggggttgaaactgcaggtactctattgctagggttgtagacaagctgtttaggacttgagggatgaattgctatgttccctggcctcaatggtgcagcccaaggcatcggaggaggtgtcaatgggggagtgataagcaagctgctttccgactgaacgtgcttccttgacacagacttcccaaaacttagtaagatacgctgcttacttgtagcagggagtgcccgttttgctatatcagcgctctttccctcaaaaactagaacagacctggaatcaacataaaacgatcattaatttagaatggtcagcttgcccatcagatatgtcctgtccccgagccatggaggtaatacacatttactcatattggtggatggcaataaacaaactagatatacttttcatgataaatgcgaactagaaaacaagaacagagcaagcagcacatttgcattaatgaagtttgactggcgtacttttgtttactacttttagaatttttaccctaattaggatatccacttcagttaagaatgagttgatttgttcagtctaaaatatggccattgaagtggaacagatgatgcaaaaacatgataggtagacaggtaaaaggtgtgacaagtaatccatgatgaaatattcctttaattaaagaaagatggctgatttagcatccttaccctgtagagagtgagagtttcagtggacctgcatgatcgcctcggctatctgctgcaataacatggccaaataccatgtcgcagtcagtcaggcagagtgtacaaatgggtctaccataccaaggaggatgatgatgagggtgagaataatctccctgaaaatagtaacttaatcagcatcactataaacttcagaaagaatcaactcctagcccacttcaatgagaatttacctcattgaagatatcgataacacagtaatctggactggaagggacaactttctgatgaaccaagctatcaaacagattttgaagcacaccaggaataggatccacctttacctctgcattccaatcccaagacagatgacaggtcataaaatcttagagctatcatgaatttacaatagagtaaatattgacaacctggcttgatgtacctcttaaatgttcatcttcaggagggccttctgtgatgggaagaccaagctgaataatttctcttccatgacccttcattggccttttggcaactacaactgtttgccctgctttttatcatagaattatataacacagcacattttacaaagatgcactgtgaaggtcagacaggacactatctgctgacactaaaacgaaatgctggaggcagtcactatgatgcagcaaacaacatattgtctaacttttcagaccagcgcaaccccatacagaaaacaaaagggggaatgcttcttccatagggtcaatagaccataaaggaactcctaaggctaagatgaaaatagacaaagttgcgacgatccctatggttgcataataagtacatacatacatatccaaaatcattttacataaataggggatctagtgtaaataatttgataaaacccgacaatacaaaagaaaaatggtgaccgtgcatctccaactcaataaccatatagagcaaaggaaccaacaatgccgtaccttccagtcctggtttacgccgcatagtcttagcttcattcacaaaagaaagaacctttcctatctcagttagatctacataccctttatacaacttaagcccctctagaacattcacctaaaaagaagcaaatgttacatacaagataataaggtaaacttgatgtactgaaataattacttcaaagtggaaattgggaatctgtccagagaagtgacataccatcctgccatcaattacttcattaaccacaaagcaagttgggactggaaccacattactgattacatgaagtcctatatggaggccaaacaagacatgaacatacaaaatgtattagatgtgattcaatcatccaggcattttgttgtattacacacagaataccagtatagctttaagaaaaatagagcacctttacaacctagttaactttacaaacagcaatttttgaaaactatagctgacatttcaaaagcaccaaatgcgcctcatagtcactgaaagaatgatggcagagcttgttgaggtataggcagtaatggaagagggacataggctgttgatgtgaccattgtgtcttaaagattatatagaatttagaacaagaagaaagcagtagtgccataaaattattgaatggacacaacacaactatgcgcccagcacttattgatcagctgatattgttgttggcatggctcactcaggtatattcaaatatgagaaaggaagccaagtcagatcaaaatagatacattgaatacaaggatcttgtgagctcacagacggttttaacacaagccatgaacgccatatacctttctgaggttgggcttctgtagcatgtgaaatatgagaaaccaactgagaattctgagttgcttcagccgatgtctccacttccttcacacctcctgtaggcaagaatacatgagtacgagattgatgagacccaagcgcatcaacagtaaagtgtaaagatcgagcatccataaatgcctaacataaagagcattaggtgcagactacattattaattttcattcccatagcacctaatgtgagttggtttggttcttctaagaatcatcatagataaagaagccgtttctgcggcatcaatcgtgcccttaaaaagtgtatcctcactaagataaaaaaaaagttactactccaattaattgcaattggatagattagacgcattcccttcccccaaaagtagttcgtatacaatgtattcataataaaggagagggggcataaatcacaaaaaggtgaataccactggcaatcgcagcatcatctccctcggcaccggcgctaccgctcggggggcgcggcggcggaggaggaggcggcggcccctggcgcgcggcggcgtggtgaagcgcgagggcgacctcggtgacggggaagtaatgctggaggtggaggacgggggcccagtggtgccgcctgcgctggacggcggcggcaacggcgtcgaacccggcgggatcggcggcgtcgcgggcgtgggcgaggaggaggtcgatgatggcgttggccgccgcgaactcgccgcgcagccacgcgacgaggccgtcccggccgtccaccaccaccgcctgctgctgctgctgcggctgcggctgcggcggcggcggcaccacccaccccggccccggcgcggccatcgtcggcgggctcagagcatggcggggcaatctgctgctagggtttcgccaattctgatggaatgccggatgcgatggatctcaccttgcttctcgtcactagtcagggggaggggagaagaagtgatgagaggtggttgggttcctggtgagccactgacttgtgggcccatggtgtatgacgtgtcatccccgtgttggggtgttggagagagaatagattaacttcgatcgaccgaacatcgatttcgtggaaggggtatagtttcttattgacgtggcgtccctatatgatcgtttctgatttttttaggattattgaaaactgtatagtcatgttggattactgaaaactgtatactcatgttagtgactatcaaaatggtcacaaagatggagatcattaccatctatgcaagcattaaatgtttaaatgctctaattgaagacagcctatagccatcacgtcgtatgagttatctacaacattagctcctgatgacatggaaatatattatagatagaagctatctatactattaaacatgtcttatatgttttccatgtgttttagtgattgctccatatctaggaaggggactttcttcagatttcccctatttacagtggtcattttatcttttctacaaactagtgcaaagaaggcttatatgaaaatttattcatttcaagggcaccacagctgatgagagacacggacaaaatacatatcatgtggtctttgtggagcatcatcaaattcgtgccatctgctgttcgttgtacctcagcaagagaggggaaaccttcgaagttgagtttacctgatgagatcaaactagcaaccaatttgactttttttaattaattagtaagataagactaagagtcgctctattaatagtcaccatacgtaagtgtgataattcagtcatcgtggatcttgccatgtgaaatttggtagccttagatggttgggaggtgggtcctccagccagtctttttttttttaaaaaaaaaaagtcgcctcatctatctgctcgtgtgtgagagcccatgcctgttacaaagcgtgggccagtacacgtccgcagaaatcccattctggcccatgaaaactctcatagtcacgtggaccagccacaatcccatcttgcccattaaatatgaggtcgcaggactagtcaaaattgaaccgactcatatatgaaaatactatagattaataatttctgtgtacaaaagaaagccctcatttgtcaatcgtcgtcgctcttcggtatatgatatccatttaccgtaacaacaacctaatgtagttagatttacctaaacttatcaagacatatagtaaccagttgaaacaagtgaattatcgctcttactgctcatccctcaactttagtttttattcattgggttaaactggtcagtacatgttaagtcacatggtatctaagcgacatagtatgtattagatgcctcgattatccgttctgatatcatgctgaattaaaaatgtatcaagccaattcaacctaaaagtttaaaccaatgagaaaaaggacacccaatttaattgtactcaagcaaccgtcgatacataaaatgatatccatataccgtaacaattatccaatgtagttagatcttttttcttttttgatgataatgtagttagattttacccaaacaaacttttcaaagttccctgggtgcgccactgctgctgctctgctggtcccttcaattcccttggatctctcatatcatatttgtactgtacatgcatgctgcccctgcatcctgcataccggggcacgggcacaggtgagaccacacatccacagcagatgcagagcagagcaggtaactatgtatgtaacccgttttctagttcatttctcacatgatacacgtgatagtatatgaagaaaaaataaactagaaataggataaacgagcttaaaaaaattcgcttgccagtcccacttgcatctctaccggtaacggctatgctacctattctattcgacatttcgattggagggatgctcgggcccagcgacagtgactaaagcaacagtgctaccactaacaggtggggacacaaaaccagtgcaccacgcctagtgcctgtctctgtctgtggccctccgatgctcacgagatgcacagaaatttttcagaaacacaggcaaaaaaaaaaaaaaaccgtccccacactgtcacaaagtcgcctaaccgcgtggttaccgcggttatcgggcttatcgcggggtacggtaatgtaaataccgcggtaacctacttaaattcaaataaatttaaaaataatttgaaattttgatgaattttgcacagttttgtacggtttttcacggttaccgcacgataaccgtgcttaccgccagggcacagtaaacccggtcccagcggtttgggaaaccctgcctccaatcgcctactcccttcgtaccccaaaatacagtaacattaggcgtatcctatcaatgtgtctaatctgattctaggtgttattgtattttagaattgagacagcactgcatagtactccctccgtcccatgatataagggattttaagtttttgcttgtactgtttaaccactcgtcttattcaaaaaaaattgtgcaaatataaaaaacgaaaaattgtgtttaaagtattttggataataaagtaagtcacaaaaaaataaataataatttcaaaattttttgaataagacgagtggtcaaacaatgtaagcaaaaacttaaaatcccttatattatgggatggagggagtataacttttacgatgtgtgattttgtttgaaaaaataatagatatgtacattatgtgtcatatatctacttccacttcgttccagaatgtaatgtaatgtgtttttagtttgattctatattgaacttttctgccatcgaccaaatgtacttagtaaagtacaccaacattttacagcatcaaattagtttagtttcattacagttcactatgagatatgtcttgatatatagtacttatttgccacggtatatgttaattatttcctataaatctggttaaagttagatagcatttgagttaggataaaactttaacaccttaatttggatggatgaagtaccgtttaattgtcagtgataatgtggtgcaaattcaggcatatcttggattcagaatttcaaatcctttcccacaagtttagatcgcctgctacttcagatgattatcagatccctaaaaagggagagtttcccattacaactgcaacatcaacatgctctattgcagtagaaacttaacatcaacatttgcttaatcaaataaaaagttactcatattggtagagaatgaactttagtaaaaaaatcatgatattagctctaactgcagcatagcctagctgcacgcgtttagtggatgctagaaatgaataatccaatcagtgttccaaggacacagttactgctactacatatatatgcatttcatatcatgggcaccatgcattattgtcatacaaacgttctacaaaatcagcagactacaatcaacaagcctaaatgaaatgctaatcttaatcaatataattaataacctaactctattcaattctaccatcaccaaaatgcaaatcaatctaagttgcctaccaattcatgcacaacactacccacataaattcagcaaaatcatcacataagccacacaaaattaagggaggtgagcacacactgagccaattgtgatgatcagaatgctagctgccacatcaacacaatgtagctaagatcagaatgctgaatcagctggaccacgacggtggcgcctagctcgtccatggcggtcgatggacctcgcctcgcccgtggggaggaatagctcggcctcagggccgacattgcactctgatggaggtgtaggataccgaagacgatcatagcagtagccgtaagtcatgtacttcgtcctgaacctctccatcgccgatcgctgcctaccagacatggccacggcattgtggatgttggcaatgtccggtgtgcacatcggtgcacgggtcaaggtgtccatagcgcagccatggagcatgagttccgaaaactctgcgacgaaaggggcgtacttgtagttcaccttgtaccggccaccggaggtagcccagctggagccatcccagattgtggcgtacagcgacatcggtttggaagggaactgaactcccatggatttggtcctctgaacctcccggattggagtctcatcaatgtagaatctgcagagagacatacagtgagataatcatatgataagaaccagcaagaatgagaatggggagggaaactaacagtgctgagaggaaaggaaaaataggaatagattggaacattctaaatatgcctgaaaatctcagtatttttttttgtgaaacaatgattcatccacagtagcatacatgcgtatatcgtaagttagaacagtagagtacaaaacataacatccaatataattgttggtccatgtatgtttcttggcattgaatggtttgttattagtcaaatacatagtcacctactttgttgtcttcaaaagatctgtactgcatacggttatgccattatgaccatgggaaatttcaaacaagtacttcaagagacagctttcctgacctgtactgttgatatcataagtactactaaccaacaatgtcctgaagttaggtgctcaactatacaaacttccctagcatgaccacaagtaattgtgccaagttgtacattttgattttgaaaccccagcatattaaatttctgggtgcaaattcccctaagctgtgctgcattttgagtctgtggtttcaagaaagggaagggatggaagatgtcattttggatgcatgaacatgaacatgtgaaagcacatgatgaaagtggttgtgtggtggtagaatggtagtggtgacaactttttcagtttctcttctctagtacatgactccaaaagttttgcctgtgactgatcataatagctttctatcattgtcgacaaagcaggtttgcaatgaatggtagaacaagaatcttggcggaaggatcaggtggaggatgatagatcatgcaaaagacaaaggatggaatgcttaattaaatgcggaaagtaattttatgcagaatgaaatgtggtgctgacagagatgcatttggatgttttagatggttgaatcatactatattcaaacaaaagaagcattgaaccccttttactttgaaatgcataattactcgacgatcttttgtgggaataccatttaactcaacttgggtcatgagtagagtacattattaaagtggcaataatccaagggaacatacaagctgtaaagaatgggaaaatcactcctctcaatcatggaggaggataaagtagaggggacaaggaaaaaggtacttgaaggtaataatggtaattattgattgtttcagtacattacatgagtaaaaggacaaccagatcaaacacaacagatataatagtgccatcttcatgagtacagataccatctaaacatcagtatgcttatagctacaaactcatattaattctatgattatggtaatggattacacattacaagcaaaagtgtttatttgaaaattttcgttgcaaaagcaacaactgtatcatgaaaaatttcactacaagagcatgttatttctgtgtgcccgcgctatttgctaccaaggtttacctttttgatttcgaagtaaaaaccgctcctcactggtttaccgaaatccaaccgaaaaccaataaaaaccgatgattttcagtcaacactgtattaaaataggctaatactgaccggtttccacaaatcgagacctagcagtttcacgaaaaccgaccggttttcgcaaaattccatcggttttgtgaaccctgtttgctacatctttaacaaattacccttcttgaaatagttctcagttttattactcaatacatgttgttactcaatactatttattcaaagcatatcgcatatatctttgatttataacagttaatttttaccttctttctgttgttcagattcttaaagatttacacctcgtcacaaagtcacaaaacgaagatagtaatgtgtttcagtgcaagcgattaatactactcagattcatgatggaaaaatcacattatctttaacaaaacaagtcataaataaaggatagatgaaaggagaatatactaaaaagcttgatcatagtattaaccaatcatgcatgaatgtgattaaaagtagggggggggggagtttccttacacgatccagtcatggctccaaagaatggcgtaacgatggaaatcctccgtcggatcaaaccacaggccatacctctcctccctgccgaccgatgtactgccattgccatacacgttggtctgcactctccactccctccccttaatgttccctaggaactcaaagtccagctcatcatgcgtcttctcatacacatcgccattcgacatctaagtaaaaccacagtaaaattaacattgtgactgatgatgacattttcagatacaatgttgcagaatgtgtttgtagaactgaaacacataatgtattatgcacatcttaatcaaacagtatgcaaagccattttgtgagatgttcagaagtatgcaggtataatgcacaattgagttgtgcatttgatgaaatatgcaaataataattaccaacggtaacatattttttttaccaaacagattaatggagtacaaatttggttctggaaatcagaaatcagaaagaaatgcactgtctctgataggggtatatatcagcaacattgcaagaggaaagaaagaggagatatgttacatagaaggcgacgacgacaccggcggcgtaatcgggcggcagcttgatgctggcgctgaagaagccatgcagatacgcatcctgcgacgcgaatccggcgcctgagacaacaaagcacacagattagattatccatccaatccaagaactcaatccacaaagagaatccgaaccaccaagaggcagagagaggaggagcaacctgtgcgctcatcgagggagatgcggacccgcttgccgtcgccatggagcgcgaggttggagtcgccgaacagctgcgtgtacccctcccggaacgacgccgccgccggcctccgcagcctggccgccatggccagcacggcctcctcctcctcctccccagcggacgccagtaagggagatagcagcagcagcaggagaagcaagaagcaccgagaggcggccatggctttgcttgcttcttgatgtgctctgcttcttgctttccaatgctctggtttgccctgtgcttgcttgccttccttcttggtgtgtgtgtgtgtgtgggtttaatagagagagaaaggagattatcttttctgcatttggtggtgtgaatgcaggtgcagcagcaagctcactccattgccattggtgacctcttttatgggcacctgcaagtcttgctgcaccctctttctctcctcttctctcttctttctctctctataagacaggttgcatttgcattgcatgagagagagagagagagagagagattttgcagtggattgtgtgcagtggtggcagagtatgtctaataaagaaatgagatactacactattattatttggtatagtatcaaatggattattatacatttattatttatttaaaacatcattggagtatctcacacattagacattacctgtccttttgtctctagcaatgcatccatgggctctcatgtgagaaactgagaactcacaagggggaaagtttttactactagttactgtgctgattgaccaatcactgtagaagaatctttttttgttatatggcctaatcttttgtgattttcttgggaacttctttggttgtattattatatttagtgctatctatcctgatgagtttcatctgtgggtgggatatataatcagttgggatgcaatgcatgcctggcattttgataagcaattaatgtacagggattctgtcatgaaagtctaccaattttggcaaggagaggaccctttgcaacacggtacaccaataatacctcaaagttgcttgagttaaatctagtggggaaaatcctcaatgtagtatttggatttagaaaaaaaaagggtccattttactcccctcgaactattttatcagcgcacttaatctcctaaactatttgttgacacattttagtccccaaaatattttaaatgtttcacttcactccacgaagtatttctcttttttttctctacataagtcatattttaccctgaaatttggtaagagtacttctcaatattttttagaatactttttatcattgttacataggatggcatctcttattgatttaaacttcaagattaaagagttcaagcaaacaatcacgaaaatatttgaaaacctgtactcctttagaaggcactagttatggtggcagtgaatttgccactgccacccaccattcttttgtaacttttataaattagtccataatattttatgatattctggaatagtctagtatttgtttcaaataagtgaataccatatatttaaataaccaaacaagtgatactaacatatttgataaaaacgtattttatctataacatattataatatattttcttttacccatagcaaaacatggtcattttgctagtattttagaactttgactatgtgtcatctatggctctaaaaatcatcttgaattacaacttatataaatataaagaaaaaggagaaatattgttaggtagtactccctccattccaaatttatctacatatttcataggtacaccaagaccaagaaaagctaataactctctcatactatatttactctagcaacaaactcaatgcatgcaccatccccaatattttctagccaatagcaaatcaagatattgcatgtgggttataaatacttgtgtgcatagatgcatgcatcaatgtccatttactccaatgcacaaataacgaatagactcaataaatgaatacaaatatgtagatcatttaggaataacctcagaaaaactatatgtagatcaatttggaatggagggagtaaagtggattatttttaatagtttaggtgtgaaatgacctaaaacaatagggggaactgatccaatgaaatagttcgaatgagtaaaatgatttttttcattggatttatcatagtaattattcgtagtgtgttcatggaataaacggatttaaataggaaatttcggtcccatggtagtacatttttagataatgcaataatattttacactttttccccaaaattggatctagcatacttatataattgcacatcactaagtgtagttattaggaattcaatctcttctatcatgaagttacattacctctatgactttttaaaatgttttgatctatgctgcatgttagataatactaagagagaatctattctataccactgataagagagaatctattctataccactgagtttgatcgagttcaacgatttgccatcgacattgtctccttctataatataccgacgactttatcaattgttctacaatatgccattgggctgggcattcttttcaaaaatacccaaaatacccttagaggacatacaagattaacaattgatttatctcattagaagtttcaaaaaaatataaaattttttatgtggcctcgttacacaacatggaagtttatatacatgtttcaagtttttttggtatatttagattttagaaaataatatttttatgtggtatatgagagaaaatttgtttatacgagagataatagcacaaaaatatcttatgtagtgtatgaaagatgatttatattaaaaacatcaataaaatgtattttatatagcatataacaaatgagttatatatttttttacaaaaaatataaatgtaaaaaacttgaaacttctatacaaacttctatgttgtgtaagtaggccatatatttttttttattttttttgaaacttctaataggataaattaattggtaaccttgtatgtacataagggtatttcgggtatttttgaaaatagtgtccagcccaatggcgtattgtagaacaattgataaagtcactggtatattatagaaggagacaatgtcgatggcaaatcgttaaactcgaacaaactcagtggtatagaatagattctctctaatactaaccatctttgagtaaacccacatttatttccaatcatttataggctttgcatagttattctaaggtgcagattgtctaattaaagcaaaaaaaaaaatcttcttgcactctaatgtttagcatttcatcatgcaatttttccgtagtaaaatgcaggagtcccatctatatttatctccgctcttggcaccccttcagggcccctttgaatcgcaggattcagaaaatagaggaataggaaaaacttaggaattgaatgccatacttattggattcctatggaattttgaaacacaggaaagtcttcaaactgtcgtttgattagcacatagaaaaaacgcaggaaccttagacacatgaagaggaaaacatgaggtgagacctcatgcttattttcctctaaaattgctctagtaaggttcattccataggaatttcaaaggaattgataggaaataatcctttgattcaaagggctctataggattatttcccatagaataaaatcctctaaaattcctatggtttttcctttgaataaaggggacctcacagtgggaatttacctcactgtaaatacaacttcacatgatttacctacctggtggctaataaattatgcatgacacccaacgtgtagccttgaatgtgggtatttattgccaagagacccttgttcttggtcattccaactttccaaggatcagagcatagcattggataggattgcgctccagtaatgatccaactaccttccttcaaacatgagacgatcatggggacggcggtttagttgctgaaatatcagatggatactcatcaattcctcatcatctcatgtgctctggtacaaattaatcgaagtgacaataccatatagtactatgccatatagtaggggtatatgtctgcattcatgtggcagtactgcaggttttggaacgtaatagttattcaagggtgaatgccaacatatgtctgacctgatcaccaccaagaatccaagattcatgaagaaaggattcatacacagcatgcatgttggatcgtatgaatccctaagttctaaaatagttatattgcaaattctttgccagaatagttgtcactgtaaagtactaatcgtcccctcaatcacatcttattcaaatttctttctattgtatcctcaaccacccttccgcttctaatcaataagggttactttagtcttttcttatgaaaccttaatttatcctaaacaacctagaatgacaagtgttgtattatatactttcgggtctgtttgatagagctcaaactcctagatttagctctaggagttggatctgtagtggatcggagttgtggaacagcctaaaaaaacccagctccacctctagtttattctgtgagagcgctccacccatccccgttcccattttagatggagctggaattgtttagctggactctagctctagagctgtgccaaacaggccattcatttgtcctcaaaagacacttcaactttgactatgaatctagacgaacattttctttccgatattcatatagtgaaaaatgaggtccacagtgagaaatgaggtcttttggggatgatgtagtacatgcagaggattgagatcaaatgcagttgctattgtaactgcacaatagcaactgcacacaatcgtggccattcgttttcagatccagcggctctagatgactgctacagtaaaggcataatatagtgcatccctgctacagtatttttgctacagtaccacttcatatcctgaccttccattctagatcatttgatacacatataactgcttaagttacacttataataacaactgcacaggatcttgatccacatgcagaggtctttcacagaggttttatagttttcgtgttgattaatttgtagcttcagggaaaaaagatttcagggatctaattaattttcataatttttcaatcagctaaaattgtacattttgtacaacgaattctgtttttcttattcattctgatcagccattttttttcttttgtgcaagttacctctcttgcatgacacaagcaaggcctgtactgtactcacatgcatgatgatgacaaactagggttcaaactttggcaactcaatgtcttaggttaattataaattaagaacacatggcatatattatgtatctaagtgtatcaaatggtgctaccttgtgccctattctaaacaacttaattatgtagataatatagattattactaccactttcaaaagtatgatttctcaaaaacctttttacataagtattgcttggacaacattttctaaagatatttttttactttacaatatatcattattcttatgaatatttttatttatttataacctactatatctctatgtcatagtaaatgcatttctagctttattgaggaacaccaaagttgtttcttcttaaccttaacatctgcttaacaacctagaaatacttatattttggaatagagaaagtacattaaataagggtgtgattcgaagtgagagagagaggttaattagaggtaaatgaaaagaaatatgacaggaggtgatacacacttgtggtaacgtgagatgtgacaaacttagtcatcaatcaaataaccccttaatacacttattttgatagggaggtagtagggcacatcctctaagcctaagggtagtcccaactctccatgtcacgtagtgtttagtataacattatatacatcactactacacaaaagattttcctagatatggagtcatttagattgcagacggaccataactggtcgcgtctgggaaaatagggcccattttcgcgtgcggacctattaagagaactgcatgcaaaaatacccaccctttctttccctcctacccactttaaattttcccctctttctctcctcttccctcctctcctctttctctcctctcctcttttactcctctcctcattttccatgtcgtcctctcctctccctgagtcctgacggtgcttggcggccgtccccacacggatccggctaccggccgccctctcctcgtagtatcccgctccactcccctccccttccttcctccccagatctggcggaggggagcggcgccggcggcggtgtggccggaggggagcctggaggccgacgggagcacggatccagcggccggccgccctcccctcccctccccccctcgggatccagctcccctcccctccccttccttccctggccagatccggcggaggggaggggcctcagcggcggtgcggctggaggggaccgcggatgccggcgacgggtggcgcggaggccggcggcgacgacgacgagggcgcgggcggcatccccggccgacaatgacgaggaggcggcgggcggcgcggaagccggtggtgacaacgacgagggcgcgggcagcgtcttcggacgacgacgacgacaaggaggcggtggcgttgccggtggatttttttttgaatttttttccggatttttattttcccatgcgggcgacataggcacccacacgtgaaaatcgcgattttcgtagacccttgggtgcatacgggccgcccatctgcatgcgaaaatcagtttcaaccgcacggaaaaacccttctcctagtagtgtatgtttgtcacataaaaaaacaaagtggcaaaagagttaacaaggagagagaaggaagatgaaatcatctctcatcaagaaaataactttaggcatgaagcaagaacaaagacaaagggataggtgaatgaaagaagagataattaggagaggtgattagataaaaatttattttgaataaaccatccactgagttttatacaaactccatatttatacaataatttatgagttaggatcgacctactccatctcttccagtataataaatttgaacatacatacatttttctgttctagatcacattttatactaggttggttttttttgacgaagggagggactaccctaaggttgaggtcttgacttttgttgaaattaattgctgaacaatttttctcatcttgtctcccacgaaggggaaaaggctgacgtggctgtgacctgtgactggcattcatgtcagtaagcagagtgcgtagccggtagccgtttgatgggccgatatatgacccatggagccgatgagtgacgtcctaccaggacttgtacagcgagaagaaaataccgttaggttcagcgagtaaaatcaaatcgtttccatcgcttagcgtaaaatctccatctgtcctaaaagtaacttagcttgatattctggtttatataaaaaaataagttattttagatgaaaggagtaaaaatatatgcagtagtagtttaaagagttaaaagtgctattgtgctctgcgttcaaaaaaacagtgctattgtgcttgtctcctctcttgaaaatacttttaaattttgtaggaagtttgaaggttcaacaaattgcattaataattatgccctagtctttataagttccttcctctaccactgtttttaagtactcctttcgtccctaaaaagatgtatctagaatcagatgtaatcttatgtatatttagattcgtagtactagaatgtgtcacattcggtactaggttagtttttttataggacggatggagtatatccctagctactaattactgatggttacatatacagtatgcatctatacatgcatgcatgtcacaaagctagagcgggtgtgccctaccattttcacaatcacggtcacagcctgcgaaatattccaagcagaagcagccttgtggcatgagacaacagtaccttgcaacttgctaatagtgtagctctagctagcagccacttttctcaaattcatatatgtcaattcacaagcaataatgtatagtacatccactctgcagctcaggcgccgtttaggtcccatcccaaaattttacacccagtcgtatcgaacgtttaaacacctatatgaattattaaatataggctaaaaaataactaattgcacagattgcgactaatgtgcgagacgaatcttttaagcctaatccatgatttgacagtgcggtgttacagtaaacatttgctaatgacagattaattattcttaataaattcgtctcgcggtttactgacggattctgtaatcaattttttattagtgcccgaacaccctatgtaacaccctatataatattcaatgtgacacgccaaaaactttataccctggatctaaacacccattagcgagctctcgttgccagcttcgttcttctgaaacaatccacaatttttatgtctagctaggtttgatctgattcaatctcaaaacagctgatctgaatgtgttcaacctaattaggagtacgtcatatattttcctgattaagatgcataatctatcttggtcttcatcatcacatttttcaaactactaaacgatgtttcgtgtaaaaaaattttatatagaaattactctaaaatatcggatagatctatttttcaagtttgtaaaaacttagaactcaattaattaattaattatatgctaacgattttcttgtttttcgttccctaactttgttctcaccttcattagaaacgaacaccatcactgggtataccgaaccgattccttggttgtttttagctgagtttagctatatatgtatatccacaagtcggtcatggaagcagctcctctgatgtaatgtcgcaggacgtgagtccctaataaatggggttcatccttataaatccacacatcatagatatatgtggctctgatttatgttagaggagcctcatcgatccgccatgcatggaggaaacaaaaccatactgtttaggtgtagacgtacgtagtacgttgcctgggcgatggaggccaacatcgacatggatcaatagagccaataatcgatcgatcgatcgccaataatcgcatggcagtcgacagcggcatacgtatgtatatgtcgttatttaattaggtatatatagtcatgcataatcaacatcatatatgtccctgacctacctaaacttgcatccatgcaaatatgcttacccatatgtgtgtatctgtgtgccgtagatcccgtgaagctagctagatactccatccgtttcgaaatatttgactctgttgactttttattacatgtttgaccgttcgtcttatttaaaaaatttaagtaattattaattcttttcctatcatttgattcattgttaaatatatttttatgtaggcatataattttacatatctaacaaaagtttttgaataatacgaacagtcaaacatgtgctaaaaagtcaacggtgtcaaatatttcgaaacggagggagtatatatattgggtaccattagccacactggctagctagcagccgcatgcatgatccatataactccactatttaattacttaatcgatcaaatagacataatatgatatgattaagctagtagtactatgatctctcgtgatcgagtttgcatgtatagctagctagggaccttccttgtcaagttgtctcagattatataaccttcgttacaatcttaactaaggtttggttcatgcatctcacggtgttctccctccggttcttttttttaattgatgttttggatacgattttaaataccaataaataattaattaggattcttattcttttttctcatattaaatatattgggggtgacacaattaaccaacagtcccttgcatctcaccttgttacagtcttggtataactccagtttttataggatcatgcatattgaagccatgaagagtagatatttaatttcacgggattttcgttcgcgagactttgcagtgcttattttttttcctcgcgtgttgaactttcgtgagcctattttttgtttgtttgtgtttggtaatgatttttttttgtgtgtgttttgccactggttttgagtattttggcatatgttgctatgcccttttggcgattaaacatccttcctaatacttctctatttaaacccatgtaacctaggagtaagaacacaacaacatgcacttgaacccaaccagagaaactaagtagcatggacttgagccgccagggggaatttggggctgaaccaaaagaagaaatgatcgctgagatcgatctaaacatggacgtatattattgatgacggcattggtaagtgttatatacttcttgttcttggcaatacaaccatgtgcttgtttgtgcaaccacaaattttacgcaatcctttttgagctaacaattgcttcttcttcttttttttttgtttgtggggggggggggggggatgacgatatgtcaatgctcttgtaggtggttttgatctgaactttgaaccaccccatgttggacttaacttgaacttggagctggtagattatgagaattttgtctaaggttggatcgtaataatgagcatgcaatccatccaagctatcgccaacaacaatgttatccaaggtaaaagatgacatgaatcttgtttttctattttgttgtgccttgttgccccatgttaatggtttcgtacaactttttatgtgggaaagatactccaaacaatttaagaaatcgcatatatcaagttttgttagtaaaaaacacaaatggaaaactaaagaggtatgttaccaaagaagtttttttataccagaacaattcgaagtccatctttgcactgtttggcgtttatggcagtaggtacgagcatcctcgatcaaagtattttggttgatgtttctagtagaaaggtgtagcaaagtgggcctaagcgagttccattggatttagaaccattatgcaatgttccttttaagaatagaacaacattagaagatatatgtatgttaacaatgctagatattagtcaatccaagctattgagatatatacaagaaggtcaacttgtgcgtcactcaaatagtataaagccacatttaacagatgcaacaagaaggctaggctacaatggtgtgtggatatatacttgaacatatatggaagcatgaatgataatccaaggtctaaggggatgcttgatgttattttcactaatgagaaatggttctaccttactataaaattaaatcagagaggtattacatgcttccagatgagggatgagcccttatgtacatgcaaaagtaagaacaacatccctaattaagcttatgttcttgattgtaattgctcatagaggaagtttgcattttttatagaaaattgggtgtttttctttggttgcatagggaagtagtgttaaccggctaactaggacaatggaagtgaagcccatcacttcaattactagggatctccttaaacgtgctaacagtaatcgatctccttgatcctatcgctccagcaataccatccttaatttggccaccattatctgaaccttttaattagtcttcctctaaatccgccccctaattccatgccactaaagagaatgtcgtcactttaaccatgagcatgggtcgccatatagtggaaggtgactcattatcgcggtattagattgagtgagaacaacagagggaggggggtatgagcaggagatggaacatatatataatactccctccgtcccagaatatagcaacctaggaccggatgggacatatcctagtactacgaatttggagcggttaaacatttggtgggtattgaggccttgacgctcgcgtcgcctcccgctcgggcgactcgggcggcggacccaagccaccgccgccgccgttcttcccccctcccctctgcctcgccgccgcctgagcaaacggccggcaaagccggcagcttgctaggatggcggcggcggccaccctagatctggcgcgggcggatctgagggtggaggccggccggagttgcgccgtcgtcgaggccggaggcgtgcagggtgcgcgggcaacgccggcaggtggacatggtggcgacaggcggcgcaagggcgcggggttggcggcggcaggcggagacgggaggcgacgcggcggggtgtgggccgcggtggtgaaggcggcggcgacagagcctgcgacctcgggcatcaccggatctgcctcggccatcgccggatctggagccaggtacgggagaggaggcgggtggcggcggggatgcagtggcggcggcaggtggcggggatgctggcgagggcggcggggatgcaggcgcggctctggtggtggtggcgcgtggaggatcgtggaggcgaggccggcggtgtggaggccggtgcagcccgtggagatgcggccggcggcatggcgtggaggccggtgcggcctgtggagcatggaggccggctcagtggcgtggaattaggtgcggcacgtggagcgtggaggccggctcgacagcgtggagatgctgccgacagcgggaggccggtgcggcacgtagaggcgcggccggcagcgtggaggctggcgacggcgcgtggatgtgcggctggcggtgctggtgctgcgacggaggcggttgcgagaggcccttgttggcgcggtggcagcctccagctgcgcccaccggcgtcttggcggcggtgcagcggggctgcgggcgcttgtggcgacggttgctagccgagcttcgatgaccggtcccttggctgccttggccggttctggtcgatgcagcagaggagtgtgggtgatggcaggttgcgtcgagggttgactgcttgtgagacgtcgtggactattgtgtggccatcgatgtgggggtacttatgtgggtaatgtgcagacgctggcgaaagccttgccgtgcctttggccggttcgatgacgatgacgccgttggcgccgtttcccttcttgaaggcgttatcatggcgctctcccatttgccccacaaatctccaggtgaaaaccttgctccggttcggacgagcggcggcggcgttacgcatcatgtcctccttgggggcgtcgcttcggggaagttcctttacatcgatgactattgatggtctctttggttcaaaagctttctttccttggtgttcagcgaggcctaagcctcttaggtccacttcgttctgtggtgggcgacacactctttggttgtttctacgaattaagtcggagctgctcgctgttggggtgcggcgacgcttggcaacgatgacgtgttgtagtctcttccaaagagttggtgctggccatgtgaaggaagtggctctttggtagcttggctaatgtccattgtggaagtcggagttgctctcgctttggcgacttttgtggcttcagtgtcgctgcggtagtgaagtcggcgctgctgggtcgcttgggcggctagctcggcaacgataacacctcttctgtgatgtcggggctgttatgccgcttttgtgtttagcttggcaacaatgtcctgcatttgggctccgctgttgttgttagttgtgtagttaggtcccatgctctcttctgtctgttgggtttcagccggttccccataattaaccgtgcagctgtatagttttcgggcccagtttcccttataaactgggtcattgtctcttgtctgtacagtttctccttctcttaatataaaaccagcattgctggcttaggtttcaaaaaaaactacgaatctgaacagactaggatatgtcccatccggtcctaggttgctatattctgggacggagggagtacatatgtattttgttttgaggtactaaggagtataagtaagaagcaggtggtgagaagttaacggttgagaataaaaggcttaaaaatattgtcaaattttagattggataggatgccagttaatataggtgataattgaaaatgatcatttatactgagaaaagtatcacgagacatgcgagtattgcctggccagctagctagattggggcttagggctctagattctcacgtactgcacagtacaacactgcatgtctgagactctgagtcatactagcgtgtaaagcccaatgaaatcaaatcactgagtttgtcgcatttctagccttctttattttcctttgagtaaagtatacggccggcccttaaaattggagcggggtgtcaattagatccataatctagaaaaattgttattagggtccacaatcttgtataagtgaatcatttaggtccaaagcgcctctggccgggctgactgccttacgtggccgtccacggtggcagcatttttgcattctagccccccccccgtgcatcttggctcccccattcccgatccaaccattctcccccaactactccgaggaagggcgacgattagggcggagtcggcgatcggggtcagggtggctggagacgcgttctggacggtgcgttgggccgccaaccgatcgggcgccatcatcagaggcgtcggaggcgcgagttggacctcaccttgtgagatgaaggtgcacctgcgcctgtttatagtgagtgtcgtcgtcatcttttaatccctttcatttggcaagtttaatctgt

SEQ ID NO: 7571 - DNA, 5062 bp, Oryza sativa
tgcaaatgggcggcgagggggcatggaattttgcaggcggcccccttgccgccctccgctagggcgattttatactgtgctctatatttttgtataaatatcaatagttatcaaatctttttatattgaaaactatacaagattaaaatctccaagactggtaaaatacaattttattattttttagggcatatttggattgttaccgtacaaatattttgttaccgtacaaatattttattaatttttagggcatatttggattgttagtgccaaatttttcttcacgaccaaatatttggtaaggtaaaattgcatttgatcatatttggtttgctgccaaaatgtaaaattatagtgaagaatgttctacataatctcaaatctagattacgtattaccaatgaataggcttccattttcgtgtgttgtgtgctagtgggaaagaaaatatgaagaggttgccttcagattgtcaattatatagcgtcgttttcactgcaatatatgtgaactcaatgagatacattattcattagatgtgacaagacgatcacgcgtgggcgtgattcactttatgtaaacaggcagcgccgaaagttgatagtgataactcgagctgccgcttttcatgtgtgctgttgtggactgtgcgcgctactggatctgacactaccgtgcagcgccgaaagtgtgttgtcgtgagcataagttgttctagcaccatatgaatgaaaagaactatgtagacgagacaaacacaagtagtactgcagtagtaatagcaaaagtagtactgctttacaagtttgtaagccaaaagaaacggtcacataaggactgaagaggtagaacactactgacgaggcctcttacccctgtccctcctaccctgcgccctaatgtgcccgtgggagtacgtgagtcggtccgggggtacggcacggccaacccgtcctgcctgtacaggtgtgacctctggctgctcctgagtgtgcgcctctggagctcctccaagctgagaggagcctagtacgtcgtggtggtctgcaccgtgcaagtcgtcatcgtagaactggctagtaggaccagtcctaccggcgtgagacgaagaggccccagtaccgaagatcccggctgcaaatcctgctggacaaggaccatcagtttcgtacaggtatttaacagtattaataaaaagtaaagtaccgtgtgggcgagggatcgacgctccgtgagaggaagagctggcgaacgcgcccgaagaggtggcgaacgcccctgcggagctcgtggaagcgccggtcgtgcctgcgaacgcgctcgaaggcagacgaggtcctgcgatgaggaaacgtgcagttaaaacatggtgacataatcgtgcaaaagctgaaacaaaaatgaactaatatctgggctgaactgtaccgtgcgaaaccggtgctgtaggtcgcactgatccaaagctaggggcgctcgaaggcaaacgaggtcctgcgaggatggatcatcaagttacgacggggtgatgttttcgtacaaaaacagaaacaaaacttaagaaacctctgggctgagcagtaccgtgcgaaataggtgccgtaggtcgaggtcctgctccgacggtaggcgcgcgaggccgtggttgtaccggaccagctggaggtacgacgtccacggcgctgcgacaggagaagacgcgcatgaccgcacgcatcttctcctgcatccggtcgaaggtcaccctctgctcaacgtcagtcaagtgcaaacctctgttcaacctcacttggactgcggtgatatcggcactgatatcccgtgcggcatcagcctatgcaagatggaaataacaaattcagtagttgtcctatattatgcaagataaatgaaataattgtaagaagtaatacaaattggacgtaccgccacgaagtagtctcggtcacggtgcgtgggatacgcgtccgtgacagcggcaacgtgcggctctggggcgtctggagtgaaggtcacacgcgcacgagtgcgaggaaggtaccagcgaaggtagtcacggtagttctcctccgtgtgtgggaagagctcgttgatcacctcctctgtagctaacacccagtcgtcaacgtactgctgtacacgtggagcccaaagtgcgcctgctagctgtccccgtcgagtcaacctgtgaagagaggtaaattatatggctcgatgaagtaattatcataaaaatttagaaatgaacaatccgaactcacgagtggtcggcagggaggacggtcggctgcacgttgcccggaaacacctgcctaagtccgaactgtctcatcacacgctgcgggcagtgaggctcaacgaaaatgtcgaacaccatcggcaggatggtgagccagtaagcctggtcgcgtgtgcacaaggacgaaagtcctagcggtgctctcgcagcgacggcctcttctgtgtacggctcccagatgacgtcgctcggctggagacggtcaaactcgaacacgaagtccgggtaaccacgtctcacctggacgtgagcgtaacgacgctgcaataaacatgatcggaattagacatgttatgtgaagaaaaaaaaagacgactgataaacttataacgcagcgaagttgcactaaccccacgtcgacaccagtaagtccccatcgtgggaccgtcctctggccactgcgcgctgcgaccaaccccgtagggtgcgctgtccaccactggtcgacctatggcaaacctctcggctgcccaaagctgaagcaacatagggcagccagcgatgatcgctcccgcgtcagtcttcgtgcacgcctcacagagggcacggtacgtggctgctagcacggcagaaccccagctccactgcggcacgtcctgtggctgagcatccgcgatggaccgtgcgtagtggaccagccggaagtccacagcgtgcccgtgggtgctagtgaacatcacccacccgaacaaccacaacaggtacgcctcaagggagcgtcggaccgagtaatcatcagcgtcagggtgcagaaggtccgcctacaattaagaatgaaatgttagtacaaaacactcattcggtcgcaaataagcacgtatgataataacaacttatttacttacagtgaactggagcaaccaagccttgctaggcccgactgtagagtacggaggaagggtggtggtcggtcctaggtgtggaaggcgcatcacctgctcgaagcgcgcagtgatatcctccttccacccaaaaacaccgtccacgggaccaactgctgctcccgccagcggtagcccgagcaggtacgacacgtcctgcagtgtcggagccatctccccacagggaaggtggaacgtgtgcgtctcaggtctccagcggtctataagagcggcaaggagtgaccggtctgcatcccaccgcttcgctgggtcacggtcgtccgccgccgcctcaacaagcctacaaagtggtagaaggcctgccgcacgcaacctgtatagagcaaaattcaaacataagtacaacacaaagcaaagttgagttgaaatgtgaacatacgcgtaccaaggaacgtgacgggggtcgacacgcaaccactcgcgcgacgtgcgtggacggaaggtgccgagctgtgcaccctcgactgctgacaggaacgagcggtggttcctgtcaatcccacggttcaacagcgccggtgtgtcgtacgccatacctgcatcaaataggttgatcagaaacatataaataattagttcaacataagtaataaatgttcataagcgaattactaacacatattaaacaagagtacaaacaaacaaaagtgtttagtccgaacactcatcacgataacattatgatacaacaccgaataattcgcaatactactagtacaacaatagtcggaggtactcattacaacaacattgaattgaaattacacgatagaagtatttagtccgaacactcattacatcacaacagcattttatttcctaaatcgaaagcattgttacaccatggaatcgcctgctgcgcgacgacgccttggtcttgcgcgcctgcttgttgttccttcaccaggtggtcgcctaccatcacttgcctgtccagatggactagcatttgcgccgcttggaacttctgcattcttcgggcatttcttgtaagtatggccgagcagatcacacttgctgcagcgtaaagtcctcccacctgcttctgactcatccatatcatttctgatgcgtctagtttggcgtcgaccctttttcacccttaacttagatggatctggaatataaaaaacttgggcactcagcgttgtgtaagatcctgagatcccgaacccatatatctcctcactccatgtatgaaagattgcttctttcctgaaataatttgagacgtacacattgggagatatgccacaatcaccggcagcagcaagaacgtgtgagcaaggaaggtgatgaagcttcggcttcatacaactgcaggtacatccaccatccgccttcaagacacattcctgcacggcttgcttgcgatagataccacgcctgctcctatcaacacacattatttcataccgatgcacttgtgtgccttgagcaacaactcgatgtctccgtgcctttttgattttatcttccatgtactttgtcactacgttgccaaacactatgttgttatcggccatggacggaccaattttcttgtatcgatccctaaagtacgcttgcgtgccgtgaaggatgaattcaacaatagcaaccaatggaagtacccgaactcctcgcattacccagttgtacacctctgccaaattggttgtcattatgccataccgagatccatcggtgtcgaacaatagagaccacttctccttaggctcattctcaatccactgagtgaaatttctgatggacgaccctgacctccttctcattgttggtgggtcatcatgtaatgcaccaagaggtatgggaggctcgtcaccttcaactagtggtctgcgagattgctcatggg

SEQ ID NO: 7572 - DNA, 32841 bp, Oryza sativa
  unsure (1)..(32841): unsure at all n locations
acctccactcccccttccccatcccctcctccccacgagccgccgtgcatgtcgaccaccgccatgtgcgccgctgcccatcgcccgtcctcgcgctatgccatgcgtgccgccatgtgcgccgcggcccactgaccgaccaagagagagaaatagaggaagatgggtatgacatgtaggtcccaccattttaaaaaataaaattatgactggattgccacgcgtacgccacgtaggacaaaaccgctctggattagatcgagggggtaattcgtctgggattggaagtttaaagtgagcaatgtctggttttcgggttcaatggagtaattcattcgaccatgatagttcagtgggggtaattcgtactttttccaacgtccagtgaaccccaccctacaatacagtattcgcgtgacaaattcttaagctaaaaatcagtattttagtcttttatagatgaatggagtagctagggtcaatttttcgacatgggtgcgaagtgatagtagctcaattggttaggttctttttggtgaaacttgtccatccgggtttaagttatagacttcaatggtgcttgtatttacagctaggtgacgtacccattgacacttaacagcgagacacttgtgatgacttcgtctattcaaaaaatccagtatttggggtacgctcatagggatacgtgttcattgggttgagtcttgagtgtgagcgcttacgtttgtaaaaggcaaattttgctacaggacactttgacttcgtggttttagccgtgggacaccatccgaactcacttttgttccaatcgggtgggcccctgccgtgtgcgctgcgtccccctcgaggaggggactgacttcgccgccgccgtcgcacgcgagggctccggctgctacgtcctctccgtcctccgccgctcccgcggcggccactcccgcggcggccgctcccgccgtcctcaccatctcctccgccgcgatgagctcgaaccccgtgccgcttcgccaccataaccaccccggcttcgccaccgcttgcccagcgcttcctcgtcgcagcctcctccgtcgacacacctgccaccgccttccacctccctgccccctccactcccgccgagagagggctggacaatgatgaagacgacgggcagcatagcggcgttatggaatgaagatagagagagaagagaagagagataggagagttgacgtgtgggcctaaaggcatttttgacatttcacacgatttttctctcctcttaaaccggaaattatcattctaatcggcgcgatgtccatcggtaaattaccacgtttatggagtgttttcctccaaaattgagttcgggtggtgttgtacagctaaaaccacgaagtcgaagtgttccgtagcaaaatttgccttcgtaaaaatatcaacatgtctggcaatcgttgattttactccagccagatttgtatattaagttacaatcaatgtacaattatgataaaatctcccagataattccgttcacaatctatctaattaatgcgtgggcgtttcgatatgatccaaagatatctcacatctatttcgtctataaatgcaaaattaattgtaatatactatatatattcgtcggccaccaacaaagttatctccaagaataatctgctgttgtgcgagaaggagtaatggatccagcatcacgctccctctccattattttcttcttagtcgcagtgacatttgtggtaatgtatttttttcctttacaaaataatttattttatttgtcttctaacaaccgctgttaccaaaccattaaacttcagacaatattgtttagtttgtttatttggtgttccaaaacaatatggtttctgtttattttcatcacaaaggatgccctcgttttgttcttcaggttgaggtgtctgggcagaagaatgaagcagtataccatttggtaaatttcatatcacactagtattattcttttgttcgaacactaggaaatagcggtacaaacagaatccttcatttgtttgcattcaatttttctcctcctttccacttgattgattatgaactttgtgttgcagtttggtggtgaaggctcgctcaccaaaaatggtaatgattatatccgctaccctccaaactaaatctggtcttttcttattaaaaacacaacaattagttaaaagtaggggcgcacgatgaaacatggtcaaatcacctataatatctatgagtagcatatgtataggctcgaattataaatctaacacgagtcaagtgaatacttcctccttgcatccaaaagtcttatgcgtttcttttgtaaccaagaccaaaaaaaaaaattatctcaaatgtaaaaaaaactaagaaaccaatgtatacatgtagctaatgagtacttatttagatggttgttcgggctccgattaataatttaatctagcacagtaaaacaaaaggacaccatctttcttttggtcttggatgtacaaatattataatctcatttggaaaattagaaaataaaatatgtacaagactttgaaatatgttagctaaaaaatgtttctgtcgttttgaaatgccttaacacgtgtaattttcttgtgtgttcaagaaatctttcttttttaacaaaatgtcaagaagtaactacccctaattagatttacattgtgtttctctttgtgctatgtgtagagtgcccagggaaatgcagctaccgttgctcggccacatctcacacgacggtgtgcatgacatactgcaactactgctgcgagaggtgcctgtgtgttccatccggtacatacgggaacaaggaagaatgcccttgctacaacaacatgaaaacccaggaaggcaaaccaaagtgcccctgaaatcaactatgaacaatcgatccatccatgaaagcttggaatgtaccatctgaaatacaatgcttcctgaagcttagattcatatatactacttgtgttgtcatttgtattgttggagaagagtagttcaacttaataaaagttatccatattttggcattataaggcaatatattggttgacatggattttccatgccattttgaatgtgaagtgtctgtgaactggggatagaagagaaaagaaatgatacaggggaataggggatggcacgttagagcatctccagtgatgaaccgattcatgcagccacattggttgctctaataaaccaaaacaaaagtcaaaattttaaattttaaacttaattttgaagttgatttaaaaatatttttaacgtgttttttttctgcattgacttttaagtcgttaaaacacatatataaaagttttatctataaattaattttttatttcctaataagctattttggcttattagggaatataagcaatcgatgaagacctaagatgacttctaattcctgaaagaacaatagcatgggcccaacttaaaaatagaaaaaatcccacatatctcaccaactcatttaactgtgtgttttaaacttgtatggcccattttgaaataaaaactccatttagagagatgagaacgatggccgactttgtgactcaaaattgagagtcgttgtctctagctcctcgtatgcatcagtacgtcaatccatgtatcgatcactagagatgctcttacatcgatctatctttatttttcctatatctttaaacaatcatttactacagaccgtttattttatcaaatacaaatttatagcccatcctgcagctcatattttgcaacctctgctgcgaagaaaagcttgtgtgttccattccatcagtcaacaaggaggagagcccatgctacaacaacatgaatcatgaagaacaaacaaaggcacatccaagtgcccctgaacccgaagataatgaaacagacaagtagataacgttaattaggagtagatcacgattgctctttagaactctagagtagataaataagttttgatttatctgtcatcatgaattcatgatgtttttttttaataatgaaatagaatcccggcctttgctcaaagagttacaaccaaatgaattcatgatgtatccattttgttgcgttatatctgtactttactttttatatatagttagtacctattattttctaaagctcaacatgtaaaaaatatcacatcgtcacacactaacaattattatctacaatattttaaatcacatataaatatatcacatcatcactcactgacaattattatctaattattttaaatctcatacaaacatgatatatcatttatgattttgttgtatttttagatcttaatatataagcgatgtcaaatcatcatctccacattatttaaacatatacatatatgatttatatgatgtaacatatattcattcacatatcaatatctccacattatttaaatatatacatatatgatttctatgatgcgctccctccgttccaaaatataacaacctacatacatcaacctaggaggggtcacatcttctaggttacccctcctaggttgctatatttagtgaaggagggagtaacatatattcattcacatttcaatttctatgatgtaacatatattcaatcacatatcaactaatattagtacatacctatttttcatgtaccatctagcatcattttgaaaataccacggattcttgaagccacttatctttttctttaaaaaaaaacctcccaaaatgtaacaacttttggcagtgtccagattcatatctaaatatgcttatattttaggatgaagggagtaactatcttaatagcaagtgacgcatttgttttgttccataaatcatgcatcatcatcatctacaggcaacatcagaaggttgaattattttctaaaaccaatatctcaacacgaattgccaaaatgttgatgatccagaaatctctatttcctacggcggatattcttccacattcagccatggtaaagcgggattacattatgttgcatcccaatgcaacagacatgtcaagaggaacctaaaactagttaacaaaagatacttcaatattggaattccatacgaaataactgtagttcatgtgctcgaattacaaaacctttctgaacagagtactgaagcaaaagatgaatccaaaacaagttctagcgtctcatacaatacaaaagcagggaagtgcaaaaacatcttaactcccaaaccacaaaaggaacaacagacagtaacaccggtattacatatccagccttgcaaagcggcagagctcaagcgccaggcaacaagtaaacatgcttctgcctcttttggcaacaatgacgagcacctagaacaaccgttcaagcagctgaaatggtgcaaggatttgacagagatcatcattaacattattaggggaataattacagtactagtaaagaaaactgtgatgccaacaaaaacttactgcagcaatcaaatttcagttattgtgctcatcagcagcttggtgatactggtagtcaccttcatcatatgcctcgccctcttcagggccttcaggttctgtgttgttaggttgcatctgatagtactcatgctcatgtcgctttgagcgctccgtctcataagcatcatggcttttgtgttgctcatagttatagccatattcctgatcatgttttggctcaccgttggcaaattcagcatctctctcatgcatgtgaccacggtcccgttcatgacttgcacgctcgtaatctctctcacggtccctgcctctctcacgatggcgatcatgaccacggtcacggtctctctcataatcccgaccacgatccctgtccctatctctatcacgacgatcacgctcacggtcacggtcacgaccatgatctctctcccggtcccttcctcgttccctgtcccgagtcctgtcccgatccctatggtggtgtctatcttcttttgaatcacgctcgcgagtacggtcatgggatcgttcacgagttctctcatcacgatctctttcccgtggcctttcacgagacttctcgcggtccctgcatcaaatcatgagtaataagcaccacaattagatgttaatgcaggaattccatttatttgataagatatacctatctgcacgacgctcatctctcctaggctcctccgatcttgggcgtccagcgtgctgctgatccctgaacataaaaaaaaacatgcatgtgttcagcatcaattacatggatacttaaatatatgaggaacaatagctatacccaaataagcacccaaaatcttcactgcactaaaaaaatatgcacctattggagtcaatgtccttacataacaatatcaaacttcaatataccgaaaaggtataaaatcacctctgataatattagtaatgaagctcaacatacagtaaggggcaaaaagagaaaaatggtatcaaaggaacatatccaagagcgcataaagcatttatgatcagttaatttttagtgctcacatcacttcttgttgccttagatcatacaaaagtatttgcttccttcatacaataaaatggaaaaataataaatatacctagtggagagcttctgttcagcattttcaccaccaattctgcttgatccaagtccaccacccaatctcctgggacgccaatttggaacagttctaccacgctccacatcaactagcaccctcctattgtccacttttctcccatctgcttgcttgtaagcatctgcgagaacacatattagcagagaaaatgtaagacagcacttcatcagtgatgacgccaaattggactgtatagaggagatatgctaaaccagaagctttacttttcatgtcccgggtgtgcatatactcgatgaatgcatatcctctaggtttatttgtttccttgtcggtcacaagccgtacctgcaaaaagctcaaatgtacccattaaggtctttccaaaaagaaatatgcactgaacttaagaatgttgccggttgtcattacaattgtttgtttgttttagcatatattctatgctgcacgacagacaggcataaagcctaaaacagccgtgctaaccttgcatatgtagatccttcattacgaggagtgaaatccagcacagatcaacacagttggaggcaaaaagcagtctggctgattggcgtttgtgggaaatacagtgatacccccttaccagggaatttactagattaagaaaagaagatggtggtggactaaatacaatacccatttaccctctccattgcatatagttcgttcagccttcgtcggtaagaccatcaaaatagacaacggttacataaatggaggtgacaaatagcaagtcagtgatgtctattccttacgctgttacgcatcagaaaatggagccatcttcaactctaaaagttgagatgtcatttgcattatattttgctgttgtttcctccaagagaagcagcacttgaaagcagaactagctttaacagctcagggaaagtaacataaacactgtactcaccagcaacctaataaatcccagaatgtagaaaccccatgcctgcagataagctgcttttaaaagcataaagtgatctaagcttacttgtgccatcgccaacattcttcaagcttgtttgctccagttaatacacacgagaagcaagttcatagaatgggaaaacaaatgatacattgtgcctactgcagaagcaaatggtttgatcttttccgagagtaaaagggaaaagatgttctaagaaaaaaaaacatcaaggctgcatgcagtaaaaatacctgcttgtgtgtatttgtatttcccaggattttttagtcttctaatggttgtaccaaccattcgcacattaaattgctcaacagtaactcagataatatgtctaacaaaaattaccagaagacataatttctgctggagctctatattacttatccactaagtacatcaacagagcccacatgtttagaaatggataacaaagaaaagactgtccgaaccacccaaaccaatacatgtcaatacaagataaaagtgttatttaaataatttgagaagattatttggttattttctccttggtttagcaaaatgcaaccaacatcattattgagaagcaaacagcaaatgcatgcttacacacaaaacagtgaatgtattgcccaacttgaaaatgagagtgctatgaatactgtttgacaaaaacaagaagttatttttgtttgctgcaaaaaaaaagacttgacagaataacttatttttgttctttacaaaaaagaagacttcacagcattttgtttgatttagaaacaaatactacagacaattctgcccattgaaaatcggagagagatagaagatatccctttcatcctttagcaccttgttgtgaaattccaagtaagcaatatataatggcagtgaaccagctttttcttaaaacatgtttttgtagatgaattagaacaaccaaacaccttaccaaagaggaataagtccacctgcactggaatttaccacatgtacttacccttttaataggcccataagcttcaaactcccgcttgaccctatgctcagacgtctcatagttctgtaaacgtttgctggagtcaataggaagtaacatacaaaaataataccaactatgtagttcaaaataatttgtgaatgatgcaacaaaaaaacttacaagtcttgcaacaaagagtgttttgtatggatctccagtggcattggggtcactctgtgggtcatctacattaagaaaccacaccaatgatgttatcagtatctatcatatgatacaaagggaagagcagctaagaaagaacttacatttctgaagctcttcagccaccttagccgcaccttggtcaagcttacttttgcggatcctatccttcttttcagcctgcgtaaataaaacataatcaccaagtcatgacctggaatgatgaaatgacaataggcacgaataatacagtagatctagaaacaataacagacatggaaaaaaaaagagtaaagccagtagtgccaacaaaaagctgcgtatttgacatagtcacatacaattaccagaagaagaattttggcaaacaaatgtttggacagctacacatgtcttattttgagagagttttcatgtggtgaaagtggaaatattcatctcagaggtgggaacatttgactccaactcttacctcgcaatttcaggtagaacttattggacctaattttcctgtgctgactatagtggaacaatgctcaaacagtcaaattgtgagtgactttccagcaggtgtagtcatagaagctcacatactaatactaacagtcttaagaaatcctgattgttcagagaccagcaagcgttctgacaccattacaaataattgattttgtcgattgaaaaaagcaactatatggttgtggaaactatgcaatatggttatggccacacgaaaagtataccattggcataaatacgacatggtcacgacaacataagaagtaggaacatcttgcactacggagacataaaacaaaatgcaacactaacgattgcgcttcaaacgagttaaaattgatacagaaaacaaatttgcagcagtatcagtataccttggtctcgcatgtggggacgggtggcgcgtactcagggtcaccgggctccgcaaactgcgacacgaactgcgccatccctgcaaccaaccaatcaacaacaagagtgagtccatccatcaggaagcaactcatccacaaaataaatctaacagacaaaattaaaagaaaaaaatatattcataatccccctagaaccgaacagatagaatagaagatgaggcgggtgagggaatataccagtgtaggccggcaacttgcgcttctcgacgggcggcttgaagtcgagcggcgggcggggctcgaagagcttgagcaggttgggggtgaggcccgtcgggtgtccctgccccatctgtggtcgcgagccatggagagagatctcagatcgaggcggatccggagaggagctagggttatagcagctagggtttagggggggggtgggggcttaccagcttgagctgctgcacgttgacgcgctggcccttggtgcgggactgcatcccgccgccgtccgggttcccccgcatcatcccgctgccgtagtcgcccatggccgcggcgccggcggtggcggcggcggcgcgaggagagagagagagagagaagcgagagggatttgcgattcgcgaagcgttgggggatctctctttctctctctcgggatattaggggaggagagagagaagtaaaaagagggggaagccgagacggaagaattttatgtggggcccacacgtcagcgccctctcgcacgggcccatgcgtcggtgacttagtgtatgcttttgctgcctgagcgttgcagggatctttgctgccgctattgaatcacgggggctataatcgtgtgtcacattttttataaatagtaaaatgcccgtgctaacgctacggcgatatttgatgatgcaaatcccttctctactattataaaaattgaagatgttttcgttagaattttggtacatcatctgtattggaataggttttaattttatgtttctattaaatcatacgcgtacgaagtaattaggcatgcacctttttacgtgccccttgccgcttgcagacctgcgcctgagttcattttccacatacgcctctgtgctcctctgcgattgggcccgcaacaccctcacgcgtgatttttcgcatgcctgattgggcccgtgacgtcctcttaaatctaccctattagcatataagcactttaagggaaaaaaaacgagattcccacttgatttaatctttggtaaaaaaaatacaaattcctacttgatttgatcttatcaggcctttatttacctgcatgatatcatcaggcttccatttacctatatcttcttcaagtttattggacaacctgattgcaattaaacggcatatattttagttgtggtaattaagaattaacatttagttaccaaacgtccatcattgatattatttggatgcaaatcgacgcacatacctcatgagcacatgggaatgaggatatgaagaggagcgctgctatagacctagggatgaaatgctccaataacaaatggtataagcacagcagagccataatatatagaactggccatcgttccattttactgcctaacgataggttgaaggctagcaagccaaggaaggctatatacctctcagttctgacaactaccttttcatgaactcgtgggcttttttaagctaaacctcagaagacaatagggaaagcctgtttttcatctaagaataaaagacttggcctattattttagaaaaattggaccaaaaaactcacaaacacttgcccatgaacctgtcggctaaatattgtagtgtaaacttatctgctgcaagcagctttggagtaaatctaccctatcctaaacctttcttacatgcatattgttagtttgtaccaagcacaagaaaataaatcactcactttaaaaccatctcaaaattacatatatgcccactttcatccattaaaggcatagctgcaacttataaatctgaactgtacatatatgtgtcaaccatgagtttacaatcgaaaggggaaagaatggaaaaacagttagaagagattatgccccagccttgcttccattggctctgcactgatcgaataatcgcatcctaccttgccattctgcactgatttctcttgacaactgcacttcatttagcaaaaccatgaaatggagcatgttcctgtcagcctgctaaatagaaacaaccagcttcttttgttaatgagtggcttccaagcttaacttgttttgctaaacttttgaagcaaatcatgctagcttatggtacaccacaaattgatataccagatcagtgatgatcaataatgctatttgctttttaaacagataaatatgaccataagtaacagagaaatgcagttgttttatatttcttttttccccacaaatttgttgcttggtaatcactattaattggaagcaccgtataactcaaaagcagaggtcatctctcttgaagcagctcctcttaatggcgaaaaactatgtcaagagaaatgagtacagatcagtggtgctgcatttgaattcctctgcaatggcaatagtccagaaaaaacatcaatttcaaagatatttaaagaaatcgagggcaacattagtctgcattgggttggtaagatccgtccgctagattggttctggaagcaagcaatgatgctctgttagcaactgtactttggaacgttgggtcatgcatttatggaaaatgggagatagaaaagagggaatgacaagcaaaatgcaaaaataaccatatgtttgaaataccagctattcttgtacaggaataaatttatatgctagtaaggaaacaataatctcagctctcacatcaccaaacaacattgaagcgatgaactctgacagtctgccattcatgtgatcgtgtaaatcagttagcgtaccgcttaaattaattatattaaagatagggtaattcaaaagcacattcctgtaaaatcactggatattttaatcaagtagctaaaatgcataacacaataatatgtacccatcggcaaatgaaaatacatgcctgtttgaatggtcaggagcagtggaggacaattgtcatcatctccaacaatggtgttttcttgagcagaagattagcctgttccaatctattgtgataccatgaaaaacaagggaatacaaatcattcaggattaaacaaagattgctaattacttcagaaataaattcagcaagcagaccatcagtggattaatgctgggttagctgtttatgaacaaccaagtatcacatgtcctattttgacccctaaagctctaataaacttttccttttgtccccagactatcatgaatgcatcgaacaatatgttagcatttcaggcagcaaaccaaaaattagttgtctctaacacattggcgtaatacattccaaccatcgataacaaaattgcttgatgacaaaacttgatttgattagcctggataatgctagcttcctgcaatataacaaaacttgatttgattagcttgcagtatcattttcaagtgacattggaaaccaagtcctgagccatctacttaagaggatagaaattgttctctccatcaataaacaataaacatgaattaaaaccttttagaacttccattaaaaagctttcaaagaatggttttttgttaaaatgcatataatggtatttatatcatcatccattagccacaatgtctgttaaatactatatattatgcacttatgtacattcctgatcaatggaagagcgtgcgggtctgtccagttcatactaagccaagatcaatggtgaaaaaattgacgtgatcctgaaatgatattttgaaagatcaatattacgaagagaagaggtatctgatgacttcataccatgtgactgagcctcatatggctgttggatgcaaagcaccaaacacttctttcccaatagtaaataaccaatccgtatgtgaggacagacatttttatgggataaatcaaatttcacaaaagaacaatatattccatttcataatttagaaagcacaagaatatatatacttaaaaagcacatgtgaatccttcgtcatggctctgcaattgcagtatttagacacgataaaatttcttacagttcaaaaagctcaagtttgccaagttcagctggaactcaaactttgcacaggcacaactcttttcatgattgttacagggaggagggttgtcacttgtcagttgatgacaggaggtcaggattagttggtttggaggtgacaagctaatggtcgcatttgttttagcacatctacatctttgagtttctattgaaaattagatttgtgatggtgatgacaaattcaatttccttttgagattccttcagtgcttccactattcattcataaaaaaacattaaagattggcatgtggtaatccatggcaaatgattacaaagctacagaacacatcaaccatgaaactcaaaagtacctgcagacctagtcaataacctccatgcagacctagtcaataacctccatcaatttcttgttcgaagaaaagtagctgtagagaaatatttagcgaatgagagaattataaataatatcccaaaattcaaaagagatgcagaagataaaagcttcaattccagagcaaccgaaggaagaattaacctcataccttaaatttactttgtgcggctgaggttactctgattacaatgcctgaccgagcttgttcttcgcttatagttacaccataaaaaagagcacattgcttgtcaacctataaatagaaaaatatatgtggtagccatcccattataaacaagataataaaactggtagtggcagaacctttcctcttgctgatgatccaacagggagcggtctcgctgtaactgttccactcatagcttcttcaagaacattcaagacaaaaggagaactggaaggataaaaactgacctttcttgtttaactcgagcgaaatatttttgttaacctgaaccattgctgaaagaatagaacagaaaggagagaactgaatcctttctaattcttcattataccaagctgtcacagaacggctaccggggcgtatcggccaccacggaggtggaccggtcggcagctaccgacggtggccgccgcttcggaggggtgggggtgtcgtcaagcacgatggttgacgccgcgagctgccaccgcttcgggtctggagggggaggcgtgggagggaggtgcggtttccgcgtcctcggtggcggcggggctaggcggtgcggatgcggcggtgcagaccaatgtgatgggaggaggggcggcgaaaggcgaggcggatggccaggagcgatagaaagaggagggagggcgcggtgattttgccggagggaggggaggcgatccgatctggatcggatcgggagggaggtggagagccgttggatcaacgtcgtcagatgatttccgatcattggatatgtcacatgatgaatgagtaaaaactatttgttgaacaatagggtagactagtaaacgtattataatcgtgcattgcacgtctttaactaaaaaaattaaggctaacatactacaagtgcaatcatatactccttttgaaaacctaattcattgcgtaatatcaataaaagctagagcacatttttttgtttaaaaagatcatatttccgagtcacctacataatacgcagcaattaataaaatgctcctttcttttaacatatatgctggaattacatgtaatgacatgttcggaaagtaatttgggagatgtattttggaacaaaacatatgcatattgttttctatttggatgtgtacagaaaactcatcatatagtgcaactgaggtgaattgaatttcagtttggatcatattgttcctaaacttcctaaaatgggattgacatactgtcaaaaaatcgcaataattgattcacgttcagtttcagcaaaacaatacacataaaaaggtaatattcaggtattgctcattcaatttcagcataaggaacaaccaggaaatattcaatctcgaccatgtactggtcaaaggtaatttacccattaccagaagattaatagcagtgtactatactaaactttggaaggcttaccagtatagattaaactaaagaaaaatggtatcttttatcaggaccaacatctacagttcaacacacatcgaatatgatctaaatatggccatttgcacaaataccagaaaatatgatatgcaacatcgatctataaattgtatatttgattcaactgcgcatcttctgtacaatggcaaatagctatatagatgacctaaaattggttaaaagttattttacttgcgtctattcatctattgagatagtgaatgactgagaaacataacatggtcattgatgttagctctgaatctatatgtgtagctaatatttatccttcccaactgatgattaattctgaattaatcagtacgtatttgtcttcctaacaaatgacataccatttattgctgtcacgaaaatagataattgcagtcaccttaggaatgtaaaatataaatgtttctactctgcctagagcagcttatattagcccacaaacatgcttgatgcccatatgactatatatataagtacgtgatgccagctaattaccaaaaaataccagatgcaggcagtagagaaaaaccataaatgtttctactctgactgaaatgctttataaaaaataattattggactacttaactcaatgaagagtctgttaccatgcttacggactgaaagctcagttaaccccaagcacattcagtacaggagacaagctcaactaaccatttcctctaacataaactgaaaaagcatataaacaaatcagtttttcctagagaaaaagatggcaactattgctacttttttttatccaactacaaaatacaaatgtacatgtcgatagattgccgtgagatcggtggagataaaagccacaagaaagcatgattgctgctctgatttgtcacttgaggcctgaaagataagagaaaacaagtcctcgtcatgagggaaataaaaaacctccaagtacctgacatgcacatcaagagcaaccagactgtggcctgaatgcattaagcccgtgctcgcatcgagttcgattaaaagatggaaaataagagttcaaagttgaagcctgagaccaacctcatgtgtagagaccactgtgctggtggagacgaaaactcgacgcggattgaggctgccggcgccagcgatggtgtttggcggtggggatggccaattcggcttggaccactgctgctttggaggagacagcggcagccgcgtcggtcaacatggacacggaggtgattactcaggtgtggagggatgcagattgtagcacacgcagaccattgccgcgagagagactggggcaagccagcagattatattagtatttttatattagtatagataatatatagtaaactgttgaaataaccataactgtctgttaataatattcaaagcttaacagtagttaaatgaaaatgtatacaaagaaatatcatcaaacggctcatattattcacatcatttgctgagatgaaatgcagtaaaaaaatctcacaaaattggaaagaggatacatgactaacacaaaaatctggttacagtttcacgttcgcttaccttatgaactcctccgtaaatgatgaaacaatggaggacttaaccacttacttttgttgttactatcatccatcttgagcatctaattttaatgctatcaataggggagaacatcttctggagcgggccttgtctactccaagtctatttctccgatatgcattccctcttctgtaagtgctagacttgaacgtgttaataaatcactatacctatatgcgtagctcatttgatcatccattgttggcaggatgaattacatggaagccgaagcgatgagaaagcctgtcggctacctaaactcgtgcaggataagtcagccgaaccacacatacacgctagatgagaggaagctaccggaacacatcaaggcgatgactcccgaagagaggacaacttacatagggcaaaggcatcaggaaaaactgctcgatgtcactacttacgtagctatagcgcttcaatctacgcaggacaaggagtgcgtttatgccccatatgcctttgagtaagttttaatatccactaagagtatatgcatataatcacggctcgactaacaattttgtttgcagcgaccattggatactctttcttctctatctaaagtacaatgaagtcatcgtcttggattctttgacgaagacagcaagacatatcaggaatttctaagaactatcgacctgcaagttatatattatcatgacgtgttttaatctttgaggaatgtaaattaattatatctgcaaacagtgcatttaaaaggtattaccagcaaggcggacaacgcaaaaaatcaagagaacgcatattcgtccgcaataagtggccggtaagtacatatgaatgccaaacagtactactaaaatttcataaatgcatgtgtctatccatttaataacctaatataccttacaatcaattgatgttgaaagtgtcacaagcaaccggtgggaaccgtactatgcggatattacaccagcgagttcctaaggggtaatgggaaatattgcgcgaattacaacgaggtaagtaatacacacttgttaaattaatcgctaacttgtattattgcgaataatttccttaatttttcgtgatttgatgcagcttccaaaattccccaagtctgaaagaggtaatcttagagcagtacctatcctaatttttaattcggtttgtctaggttaatctccgatgttaaccaagaaggtatggagcatgcgactaagtctcctgtcttgccgtaattgagaatttagattaaagtcaagaaattttgtctcgacgggtacaccatcgcttcattccataatccttgtctaactccaccaaccgttctcggataatcgataaggtgcaaagtctgcgacaaagccctgaaatctgacttgactgttctgatgtctgactttcctgaaatcagtagtcagaacatttgtcgtactcgcttagtcgttcccggtgtagaatcgtagagacatggagtcctcgataacgctgaatggaactttcctgaaatcaatactcataacagaatattaaatagaaatagcccctgagcaaacgctcaagggtaacatgctataatatgtatggaaaaattaaaaataagttgaatttgcgtgtgacaataaaagagtatactctctagagtcccttagcaaacggagttcggtactcctcctagcccctagctgtttttatggaaaaagccattttccacaaaggcagtttaaatcttataacaaaccagcccccagccgtgaagttgagaaaaccaattcccgattacacggcttagttaatatgcatccagtgagcactctaacatgaccagatctgacatggtcgtttggctttgcagtatctaacaaagccttatcagctctgggcgttcctagccgaaatccccttaggtttttcggaggctttgttagaatagtgtaaagggacgataggacagacttcaagacgaggcaatacaagaaaaggagatcaacggacaaatattgcacatataaacacttacagaaattggcgtagatgatgagatgaccaccacattgggcaaagaccaggtgtatagttgtactcaacaaatcgctgagttagtaggagaatcgctacaccactagtcgaagaccaattatagtcataactcgaccactggagtttaaggtgcgagagatcgctacggcctaatggttgacaaccaggagtaggcgtctctcaaccatttgaagtcgaggtacgagaagatcgctactacctattggttgagaaccaagattaggtatctctcaaccttttgaagtcaaggtacgagagatcgctacgacctactggttgagaactaggagtaggtatctcttgatcgtttgaagtcgaggcacgagagatcgctacgacctattggttgagaaccaggagtaggtatctctcgaccatttgaagtcaaggtacgagagatcgctacgacctactggtttgacaaccaggagtaggcatctcttgatcacctgaaggcaactgataggcggcgagatgtcgctacaactgtctagtcgataaccaggagtaggcatctctcaatcacctatagggatgctagagttggttattacatgtgcatctcatgtggccagcatgactcacatacccaacttatagcatatctgaatgtctgttcgtaatcatgccgggtgatcaagccgacaacatttacgaggaattatccgttaacaacctattcccaaatagtccagccatagccggtgctatatatgagataaatcgtcggtcttcgttggtaggtttggtgcaacaactcagcctttaccgagaacgttctcgataatggggtgtactcaaccacaacctactcgagtgctcaattgttcctgaaaaatattgtctagaaggcaagatatgtagcatagaatattgaatatgtactcaaaaaaaactgcatgaatcttcttgtattatcaggatatgacgagcagattaaatatcaggcattatgtaaaccgtaaacaagcatgatttatataacaggaacagagcgagcccccaatattagaccgtagtcggcctaacatcagaaacactcgtacaatagatattgtataaaaacatgctctaggtaaacataataaatcatggatttgactatattgtattgatctgaagaataggtacaataaatcacatatggaatattgcgtacctttatagatacatatcggatatatctacgaaatgagtagcttaattttaaaaaaccaatctagcaattaccttgttgcgtactcgtttgacatcatataatccgacatctgttggtacaccgcgtatcttgtggcttggatgatctcaatggatcaaaatgttgacgacgatggttccgatcttgtcagggcatgtactctggttgggtcaaatctcccaggtccaaagtagtagaagtatccttcatcgaaaaatccgcagcgacattgcctcgatgaagcttgagatgacgagggtcctgatccgccggaaaacgcacttcgttcgggtctatcaccccacagccgaagtcgtcaagtagtttgttgttggggaatatatctcttgaacccatcccatcgaaaaccttgaagcaccaaaatcccctacctggcacgccactgtcgatgtttgaggtcacgactagattatttgcatggtatggggatcattggtaccagggtatatacgagattgagttaaaagagatggagaaggattttatacaggttcggacccctttttataggtaatagcattacttctgttgggcgaagccggtgttcctctatactcatcaaaatcacacaagtacaatatttgggataacgtatctagtcgtcgttgacttggtggcatagataaccaacacgtagtcgacgacaggatagtctgcctcctcgaatataaactcgtcgacatcaaagatagcgctagatccctcttatcagcctctgcaggcaccatattgggtttgtctaggctaatctctgatatcgatgtctggcggcgtgtgttgatcttggtcttggtttatcttgtatgttgtgtgtcttccctctcctagggggtcttgtatttatacccatagatgtccccttgtccaagtagaactagggagaccaatattgatgcaatccgagtagtccttgtaatttccatatagaactctactcgtccttccttatccggaactccttctatatatgaggtatgattccgtataagacttggtacatggtgggccccaccgagcttagtcgattactattgggtatatggtatccataaccctgacatgcatcaaccaagaaaccatatcagagcacaagttcttaccaacttgactcattgttagcaaaaaacagtattacatacgcatgtcatgtactcatcattgtgaccgccattcaattaagcaaccactttaccactttatagtcctcctgttgattccgtacaagacttggtacattgtgggccccactgagcttagtcgattactattgggtatgtagtatctataaccctgacatgcatcaaccaagaaaccatatccgagcacaagttatcaccaacttgactcattgttagcaaacaacagtattacatactcatgtcatgtactatcactgtgaccgccattcaattaagcaactactttaccacttttacagtcctcctgcccaaaagtttttggcccctggcctgaaacttctggtcatcccctaagaccgattagaggagctctcacggaagttcctagcgaaaatcatgaaacctccgggcccctggtctaacttggacaaaacctcttctttcgcatgtgtagcagtcccttccttgccgaacgtcaagcattgtttgccattcacaacggcacttgcatggtcgactttcatggggacaaaagccaagaccatgtccaaacttcttgttgcgagtggtgatagtcttgtagagtgcctatttggattcataagttttcatgcacccatacttaccaaggttcctaacctttcattctctttcttaaaggtcaccatagcttcaagattagtaccatagaaatccaaatcataattatagcatctagcacaaccattgctaatggaggcattggatgagtaggtttgtttctagagtagttgaacttgggtgagtaggttccaaaatcaggaagctaactagctgatgggatggtgacaatggttccgctgaactccacaagccattttatctcctaaatgcattgagtgatctcctaatgatccctaaggatgtgctgatggaaaccggcactagaagagaggtatgcactctcatcttgttgaaacaaatgcataattatttcaatgcctaaaatatccatatgaaactatgaagttctcttttctgtgaggaacaatctaataatctaaagcggtctcttttgctagctttcgattggtccatgtggcgcctcttactttgaagaaaaattataaatttatactagggaaaaaaatacctaacaatcatttttgaggaaaaatctagagaaaaatatgattccagaggcttccaaaactattttctctttccaatcacacggacttctactcatttgtcttctataaatataccacacctacttggtactactcctgtaactctagaatatatatagtaaacccaaaattattaagcaaaaaataaatctaaaacaacgaatttacactcattttccttctttaaatatactatgcatactcggtactattagctggctcttttgctagctttcgattggttcacgtggcgcctcttacttattataaatttatactagagaaaaaaacacctaacaatcatatgtgaggaaaaatctacagaaaaatatcacacgaacttctactcttttgcctgctataaatataccacgcctactcggtaccactggtgatgggataaatataccacgccaaacatcgttgatatcactagtgatgggataagctaatttttaacagttacatcatttttcttctgaaaacacaatgtagcggtacttttagaaatgaattctagatgttagaaaatggctcaaaatggctcctaggagagggaaaccacatttggttttggcatgatttttggtgtggtacctgcccattgaaaatcactttcttaatagtttttgaaatctgtaattaaagttattttaatttcagaactggtactgggaagaataggctgcctaacttttagaagatcttttggggaagatgaatttgatgaatggaccactttaggagatgtaattgatgacttaatagcaaataacaatcctgatgctctaaagtggtgtctcaaagctagcaaaaattatagtacacaatctgtttatagagctatcttgttttgtttagagggtaaaggatagaaaaattcaggagatctggcactgccctgccatatgaaaataaaacattttgtctggttggctatgagggactgaatccagtccactaagcagttaaagagaaaaggcaaggctgggaagggactgatatttgtcgcttatttggtgtatttgcagggatactttctgctggggcagagtcccaatatagttttgtgatttctttttaattattagtcagtataataatgagaaaagtagagtttttgctgctcctttagctgctatcggttgggtgctgtggattactataaataacacgattgttagatctaaattgatctattcttctctaatccttcccttcaaaatcatttcccatttgcaacgttggaaaatgctaggtgttaaggatgctgatgccattaacaaaatgaccgaggagctcacaaagacaacggcaaccctgggtgctcagagagctagaattgattgaatagtttctatttagccgcggtagtttttagtatgatagagttgtgnnnnnnnnnnnnnnnnnnnnnnnnnnnnttctgaacttcacccattgcaggtaattttgagccagttccttggtgttctacatggaacgagcataaatgttaatattcacgcggctttgtgaatgggccatccgagttgggacatccaaggctgaggttgagggtgttgctgctgctgtgatctgttgggcagtcgtggatcaaggggcgctgggtggcggcgactgaagattgtttttggaggccgccgtattgtcctcactgcgcgccctgctctaggtctggcaagggtcacctcgcgtgccttttgtcacagctgcactgtcagtggtgtcttcggcttctctttcacccaggttcatcttcgccatctcatttgtacctcggtatatcaggcatcgctacaggagatcaattaggttcagaaatcatcctcatcagttcatatgaataatcgatgctttatcaagcatctctgaattgcatctttagataattgaacaggactaggaatatttttgttattctggttagaaatatccattaggttcatagttcttactcctggatttttgttagatagcaatgcaggaggaatgtgtggaaattaggttctaacatgatcaacactgaatattcgttgcacacaagatgttgaaacgatatttcttcacagttttgacacatccatctcctcctcatcagtcaaagtaacacttgcagtgctagctatctcctattgttggtgacagtagaaagatagttagcccccccagcttccccttgacccggagcaaacttttcacttttttagacgtgactcatgcattgctataacacttttggaagccgagctcggccttatctcctgacagtgtaggtgtgggccctaccgggaggaaaaatatctcccctggctggctcggctcgattttttcggtgtccgttttttaaaaacccggcacctacaatatacaatatatggttggtgtcggatttttttatcggttttttaaaaaaaccgacacctataatgtaagtgccgatttttctctaaaaccgacacctatcttcgtttaaaggtgtcggttctaattttttttcatcttatgaaggtgggaaaagcactatatattggtgtccgttttaccactttcggtacctacagtgttgacatctatccgatgttttgtagtagtggtctgggtcattaggatcttagataattacgttgtgtactgcatggatggcctagtcgtgagcgtggcatgcggctgctagtggcgtacgtcttggcctctaatctgtctatttaagcatgtacttagcatctttgttaattgagagtaaaaaagagaaaaacgctgcgtttgtgcagctccaaactccagtgttcttcgccagttcgcctctggtgtgtgtgttcatcaggagtgtgtgcgactagtgtatctagttagggagtgattcccaacattaatcaagtcacaaaccaaaaaaggattttaaccttcaagtaatgccattctatctttctcacagctgcagctttgtagtcatatacaggatagtataagtagagtcaaagttgtagcatatctattgtgccatccctgaataagtaatattattatccttcaagcttaaaatgagaaaagcgcacaagtaacctaataactaataaatttccaaaggctcgtccatcttttactggtaaaaaaaatagtggtggtgatggtagcatattatatgcaatatgatgaatagtattgcagtatctttttggtaaatgagtgaatcattccattatctattatctgtatatgtatgtggccatttcatttaatgtgaattatgccaattttctagatttggggatactattattttctagtttagaacttttggtatatttataatttacatccatacaataaaccggcaccaggttggttccagtataaaaaaatgctagtgactaaaatatatctacctatggtcttacagaactctataattgtagtcatgatacctacagtacacgtatgtagtatttaggatatctcgtgaaatatatatacttatggtcttacatgagattataactaaatataacggctgctgttggacttggagccctagccaagagaagccgctaagccaaccaggcggcataaccagtaggtttgcactgcatccaatggaaagatgatgaggagcagaacaatagcattactattacgcttcacagtgagtggacaaattgtacgacccaaaaaatagatgtagaattacataatgaaaattttctttccaaattgtaaactatgcgcaataagtttttttacgaaacatatggtattatcgatggcaagccaatataaacaacaagagagaattacaaatatgccactgctttcatctcctaatttggaatagccattataaatacacaaattgcatatttgccaccaaagttggtgtgtgtggcttccgtttgccattgcagtctgaactggtataattaaaaggtcaaaagtttttttcacaaaactaatgtagaaaacaaggaacatggtatgaccgttttgctcttggctaaaacagatccctcactggcttctctctccaagagccctaaatcctcaaatccccttatctcttcctccaaatcgagaacaaaactattcaaaattggttccaataggagatcgagggcaagggaggaatggaggaatggtgacttgggcggtaacagcaagcgcagcggcggggagctgcttcggcggcaacagcttgatgtagctgttgctagtgaaccatgtacatgtctctccaaccttaaactagtgaaccatgtacatgtctctcaaaggcaaagtgaattcccttgttatttttatcttttcaggataataaattacaaaatacttcgtaccatagtctagcccatcagaaaaacacaaccatcatcgtctcattgttataatggcttgcactggttttcctctctaaattaaaatacaaaataattgatttataataaatagtctatgcagttgtatagatatgttatatcactgctagagaaagcatttgtagtcccagtttgtaaacccctttagtcccggatagcaaaccagggctacaagaacaggactaaagatcgtcccggttcagatacccgggactaaaagttttttttctacttaaatattgattttaaactgtcctcaaaatcatcctcattcacaaaataatccacaaattcaataacaaaatcatccacattcacaaatgcaacaacaaaatcatccacatttacaaaaacatcagaaaatcttccacaaatttacaccacaaaatcagtcaaaaaaaacatctaaaaataatcccctattcttctattttttttctactccacgacggccgttccgggcgccgcccttcgctccagcgctgggcgccgccgccctccgcaacggccgcgccgccaatgtctttggctgccgcccgctgacgtgagggtaaagggagaagggaagccagcaaggggaggaggggaggaaaagatagaggatgtgagggagagaaagagataaggatgagaggaggagggaatctctgaaatttttctctccctcacatgcgcgcctttttgctttctctatctcacgagcgatttttttagtctaaacaacagggactaaagatattagggggcctaccacgtcctgacaataaatgaaccggtctttagtcctggttgttaacaccaaccgggattaaagatcaagaaaaatacctccgaacttataactcgggattaaaaatagtttttagttctggttttttatcaaccgggactattgtggtttttcccaacccacaaaaaatggtttctccaaaaatgtatgtctatcaggtttatccaggctcacaaaaattcctaggtccgccacagttcgcgtcccgtccgagcgaacattcgcaccaccccgagttcgtacccttgctaagacaaccatatatttttacccattctttttaaacgtgtatgtttatgtaaactagtgagaaaaaaagtatttttttttaaaaaaatgttcattctattattggtagtctgtcggtgcagttggtagaacattcataaaattataaaattatggcgaatgaaaaacgtcacaccattcgtgacgaacgcctcttcccactacgcacttactgcaaccaatgcattttatctcaaggtgctcacagtcatgtttgtgacaattttcacatcctttttacgaaagtagaacgtcacagaaggtaatgtgaaaaaacaactgaacactacataacaagtcatgaagagataggtcttgacatttttttcccctatatggattctccaacttgaacgttcacattttgaggtcgtatgaattagttatgaattttacaagatttaatagggttaaaaacattagaaatgataaatgaaatagtactttataccactatgctcagtttgaaacaaattattgagcggattgttgccatggattatctacttgattatataaggataacatttacatttttcccacattgtatgcgtttttccttgacgggggaccttacgtttttcccacatttataaatgcattgcagaccaatgaattgctgatagctgaggcccatcgaaagtacgatgcagatgatcagcaaaatttggagtgaaacaatcaggcataacaggtggctgcttttcatacttggggaagtgatcaagacatgactgtacaatagcattttgcatctgacggaaagattttcattaaaacaactggaaaagaatatgaaccaagaaatcaaaatatataaaatgaattacctgaacattgcgacagcagaaggcatgcaaggcaacatattccctttgtgttgttgcaagggaaccaacactaatcagactaccaagtaatctgaggatggagtttcttcaaaatattggtccaacagctgcacatacaacacaaacataatttataagacaaatggaagtaaattattaagttagcaaatgttgtatacaatggaaaaggcattgtaatattattcgtatatcaagcaaagttagcaaagatatacaaggaaattatatacaatcatgagtatatgactcataacaggtctttcaagatgagtctgcctgtttttactttggatttagctaaattcacgcaacaggctaattgggtcatgtgaatccgagcatgttttacacgtgtccaactgttcaatgcaactctaagtgtggggctcacaaatgaagagcaaaactcaagttttgcaacttatccttacatttggaatttaggaagaaatgcaaccagagaacatttcaacataaaagtttgtgatgcaagttgtggtaaagggcagggctcatgcttgacactgcagttggtagaaaactgggacaaatgctgctggctgcacaacaaatatctgaacattaactcgtttttttttaattcatattccaactagaagtcttttctgtgctcctaggtttcagtttagtggttgtctataactcagaacatgttgctttaaatcctgttttaagaaaaatagcaatgccatctgctcttcctgaaaaacaaactgtgactgtgcttgctaagactttagccaagcaacgcttattgggtagtgcaagctctaataataccatgcctaccagaattgaacaagcctgtcctaatcagaagacatcagatatatgaacatccaaacaatataattctaaagaataataacaaatgcatttgcaatgaatggaaagattagcaaaaagtgtagtacactgtaccaacaagccatccacaatgactcagcttctttgtttgaaccaacattctgcctattagatatacttgattgagaagttgaaaacaaagaatagataaataagcacagttatcaaaataatttcattttagacaaaaggatcttcaggctttaacaaatgagaagaacccagcatagctacctgaaccaggtcaaggaaatgatattcatgcttcacagtaccacaatgactcaacttcaccttttctgaaagtacatttatattcatgctttagtagaacaacaacatcataacatcctgaaatcattggcaaaatattattaggtgatttcattgcaaagacatgtttgtatagttgctccacagaaaatgccatcaacaaaacaaggtggaaaccataacgtacctatttcatgcatccactgctttcacgatggatatgagaggatgggctctcatattgaaatttattaagaggggtgaggctcgaacccaggtcaactagcccaaaccttgtggtgctagccggaagacccccgggcctttctcatccactgttttcaccgacagcgtgacatgcacatcccttgatacagattcatgactattctcataggaattatataggtgagctcagcattcctcaaaatagcaagggctcaaacgttctaatgtactcaacagattcaaagcttccagaaacaaattgaagttctgcctctgttcaggtaaaaaactgcagagtatgaaatttgcagttaagaatatatacagttgttttggcgcttcagaatgaaaacagaaacaacaaagatttatcaatcatgtataaggcatgcatgagcccaagaaaaaatataagtgaaaattacaattgccacaatatctgacataaaagaagaaacacagagttcgactttgagcaaacttgaacagccttaagaacaaagcacaagtggtgaactatccctaaagtttagaatatttaaaaggtttgtatacagaaatagcattttacatccaacagaaagatttttattcaaacagctggaaaagatatttaccaagaaagaaaaatataaacatgcattacctgaacaatgagatggcagaacgcatgcagtgccacatattccctttgtcctgtagcaagtgaaccaaaagaccagttagataccaagtactgtgaggttggagtttcctaaaaaaaaaacattactcactgctgcatgtacaacttaacagaatgatatgataaatggaagaaaagattcagttaacaaatgtatagacaataaatataaaaggaaattagaatattactcataaatcaaacatcgtaagcaaataatgcaaggaaatcctacactcatgaacgcatgattcacgacacagagtttttggatgagaactctgtcttcacttcagttttaacaagaaactcaagcttgcattgcaatgtgccccaaggtgctggatgtacagaaaacaactatgagaaatacagcatcacacgcatacttaggacatgtcttacagactttttgttttttgcttagtgattaactgctaaatatacagaatgatatagtccataaactaatacttaagtacatagaacagggcaggctggagcagtggagagttaatgctgactctatataatggatcagagcagatgtgctcgaccctaaataaatgttacctgaagcatcctgagttctgtctttgtgatctcccaccaatttataaacatcctgcatggctgcatagtgccattttgttagcatctgctcacagctttcctccaatacctagctcaggcttctcgccttcctgaaaccttgaagaactccaagtagctttggtaatcactttggcatttgatgccttctgtagcatacatccattatcctactgcatatagaggcacgctaccctccatttcaaaagccaaatcaagttccccctgtttatagcatagctcctctaaacatttctttgtttttttatcaagatacttccttttcttcagcatcattgtaaaaatcctgtcagcctcactccatcgtccatcttttgcaagtaccaatagcaaagaagtgtagttggcatatcgtggagtataaccctggaaaagcatatcttcaaataactgtaggacaatatcaattgcattttcagcaagaagaagctccattagtttgtcataggaagccttactaggaacaaagcctcttttgtgcatcatcaataaaaacgaaagtgcttctttcattcgtccagcaagagaaagccccttaataaaagtgttgtatgttatcttatcaaagacacatccgtcactgttcaatgagttaaatagttggatagcatggttgatgtctcctaatcttatttgattattcatgagtatagtatacgtcacatgattgggaagaataccagtttggtccatcacagataagaggctgtaagcatcatccatcttattggctctacaaaggccattaatcatcccattgtaaatatgta

SEQ ID NO: 7573 - DNA, 28264 bp, Oryza sativa
  unsure (1)..(28264): unsure at all n locations
tcctccgatctcccttccattctccttcattcccgcctccatctcctcccatcccccttccccccctttgtcgttgttgcatggatgacacttgctgttgtggcgttggtggccgctgcgggcgaggaggtagccacatgaacgggaccatgctggtgctcggtcggcctccgcctccgccaccggccgcccgggcgagctcttcctcggccgctcagcgagctccgcctctgcctccaccgccgtctgcgcgcgcgtgcgagagagaggtatgacgggtgggtctagggaggtttttctttttgccgactggaatgacacgttggcgccacgtgtgcaacctcaaatcaaaaccgctcaaaacagtgttgacgagggtaattcgtccgacattaaaagtttagggtaagcaatgtctgatatttaggttcagggggtaattcggttgaccgcgatagttcaggggtaatttgtaatttttcctttttattaatactactttatcgttttttttctcgttttaggcatcaacatggtagtgcgtacataagtgggccagacaggcgtaagctaggccgtgctcatgcttaggcccatgtggtggcttggctaagctgggttgggcccgacccacctatacatccctcctagcttttattatatatcaagaaaaagtaaataaaaggaggaaaaaatcgttgcggatatttccccgtctcatcgtcccctatgcgaggcttcctcccacttctcctccgccccccgcccgatctacatccattcctccctccgccaatcgcacatcaccggcgggcggcggctttgctcctccccgccgcaactcggtgagcacgcattctcactttctctcttttttttcttaatttcttttcccttctcgaatgaaccctaggtaagcttcttctcttctagatctggatcatccggatctggaaccttaattttcctcaacccttgatactaataacatctttttgtttgtttgattctttgttccaaaaaataaaaaagttttggggggatgttcggcgttagatccgcacttgtgcattgcggcccttgttcgaattcggctggtgatttgtaggattcggcggcggcgagatgaacgacgacgccagcatgagcagcatgggcctgaggggttggggggccttctatgagccgccggcgaggaacctcggcctgcagctcatgtcgtcggtgcccgccgaccgtgacaccaagcatctgctctctgctacccccttcctgcatcatcaccagcatcagcagtatgtcccgcaccaccaccatcagccccatcacccgcgtgactgcggcaccaatgccaatgccaatggcaatggcaatggtggtgctatgcctcctcctcctgctgccacggaggctcccccttcaaatgccgatgaacttcgtgcacaatgacatgtggatgcacatgcaacaacaacatcatcatcatccccgcgagccctaggttcttcacactctgtccgttggccatggtggacacattgcgcatcatgaccacccagttggctatgggatgatgcctgctacgcatactctgcggatgttgcagcaccaaccagagcctcaaccgcaactgcaacacccaccatcacctccacacccaaaagaggaatgcatttccccgccattgatggaggaaaatgtgccagttaagccaccacctcccaagaagaggcagcagggcaggcaacccaaggtactaaggcctaagaagcccaagaagcctgctgctccatgtgaggatggtgcaccacccagtgcgccagcaccgcggagaaggggtcccaggaagaatatagggatggtgattaatggtattgatttggacctctcaaggataccgacgcgcatttgttcctgcacgggcgcaccgcaacagcgctatcggtggggtgctggtggttggcaatctgcgtgttgcacaaccaccgtctcaacatacccactgccaatgagtatgaagccccgtggtgcacgaatcgcaggtaggaagatgagccatggtgcgttcaagaaagtccttgagaagcttgctagcgaaggctacaatcttaataatccgattgacctgaagaccttctgggcgaagcatggaacaaacaagtttgttaccataagataaggtaagagactaaaataaattctaaatttgttggctttgtaggttcctctgctgctgtttggtctcagtaattgtctgtatgtactctagatgacaaactgcagaatcattttaggtgtaggttttagccatgtcctgtcccttttgcagtagtttacatgcctcatctgtgacctgggtgctgacctgtatggtggctatctgcatgtatctttatcattgtcttcacaagtagcaatgtaatgcgacagtctctaatttaggtggcaaagttaatcatttgagtgtttctcattgtgcttaaatcatatgttatacaatgtttcactgcaatgtttggatgttttacagagcacaatatagttggtatctaatgaagtagagatgttatatgtttcatgttgtgttctgtacgcatgtgaaatttatatagcctatatgtacaatttgtccattcttttattgtactgatctttgcatgcatgatgcatgtgggcataaattcagtacacaatctgtattgcttaaccaagtgtcgttaatgttgtgaatggtagcaagttttttccaatttcatttaatgtgctcaaatctcccagtctcttttccaaagtcccttggaatcaagaatttttagaatgaatgctggggactttcttctgccactagtctaatgtaacatgcctttggtgcccccttatacatagatggaacttctctgtcttaatgaataatacgcagatctcttgcgtgttctaaaaaatacattgatggaactctgaccattgaagacaaatccttgatgttcattgatgaatccttttgtatagtactccatgtgttattttctgcacttcttttgtaagcattccttgtcaagtaatcgaagtcctacttcaatcagtaaacaacagtcaaaatatttcaattatatactagtgatttttgatttgttatttttttttggggataaggaaatttacctgtctacagttttatcatattgtgcttcctcattatgctgcaagattttaagctgtctgcataaatcttgtaatcctgaactgttgcaaaagaaaaaaaaactgaaatgtcacatgttatgcattcaaattgttgatcctatctactagggggatttaactccagtccatagctttgtagttgtcaaggctaattacattagtatgcatatttatttatttttagtttctagattacagggaaagtggtgccatttgaataaacgatgttactcctattcaacaattttcttttctgaactataataagtactgtaattttagagtgggtttcactagttctctttagccatcgaatcagtaatactccctcctcgttttctatccacattaatgaattagtcttttaacctcgtgtttaatctgacgttgactatataattttccacatcatatctaaataaaatattagacaaacccatacaacggattgtctagttagccatttcaaatagattacatcaattaatgctttgatcctagagatgacttctatctgtatagtagatggtattaagctgtatatcggaaaacattgagcagcgcggtaggggcggccgctgggtgatgccacgtcggagtgctacagtgcgcgcacggtagaattttgccaaaaagtcctccgatttgtgcgtaattcgatctagctccttcccaaacagtacctctgaggtgttattttacgtggattcccttaggaaatatggatattgcatgtgaagaagagaaaaatcacggattagggctacgctctaaaatgcggaagccgagtggctttttcgcaaaaggacacccactaaccctaaccacccccaaaccctagccgccatggcctgctcccactcccactccctctcccccactgctgcctctgcctcccctcacgctgtccccgtcaccagcgccgccgcctccacctccccctcgcgccgccgtcgcgtcaccgccgagtgccccctctgcctcccaatcatgctaccacctccgcctcccgccatccccatcgccgaacgcctctgcctcgctccgccgcttccgccgtcgccgagcactgccgcagcaccgtcctccactgccgctgccatcgccgagcgctgccactgcgtccttcggcgccatcgctgacggctgctgctccgccctccgttgccgctgccatcgaagaaacggcagtggtgacagaaccgacatcaaggaaggcggtggctgcagcgagaagaggagagccgtacgttgccaggctctcgagcttgcccctcatcaccgatctgtccttcgctcaacctcgctgtcgttgcaggctccaaacctagatggcggtacaaatccagtggagcttttggccgcttgctgcgcgtcacctcttaggtcggtccctctttccctcaggttgttgtcttcgtttatacccatctattttttgctgtccatcgcctctgcagggaagaagaacatgaggtgagagtgagggcgttccaaatggaggagtgcggtgtcccctagtgatagcctgtacccacggatccgccatccccacacgtcgactcatccacggtatatcttgattcacatgtatattgtctgctttttgtggagtgaaactgaaatttgatagccctgtatctgtcccttcttggaatgacttcagtgattgctgtgttgtggctctattggcaatggttagaagacagtgctggctgtgacaacaaaaggtgaaactaaagagattgaaaagataaaacggtgtcagtgctctgctctattccttccttttttttttctttcttttttttggctaaaattggttggttggttttctccttggcaggttttttttcgaaggagaccatcatggaggaaagaagagagggtggagttgcaaacatgaaccatatatataccttttgtcatgcttgattaatttgctcccagatgaaagtaactcattgctgcacaactccttgaattgagggttccgattctagaacacaacatcctctgcagattttttactggaaggtgttccttttgtgcttcttaaactgaaggtgagttcactgtgtgatttactggaagggtttcgattttgtttaatgttcactgtgtgaggaaagtatcttcaagtactcctagctctcgatacatcaaaatcttacttattgttgtaactgagattattttcttactttggttgtttcttggtttcaattatatgtacaaacagtaccttggtgaatatgcacttgaatgacttcaacccttcctttagcccactgtagagatttgtgttttatactctctttgaaagactattcttgtggcccttgatattttttgggaacttaatttttcctccagtttattggcgtggtctaggtatcctatagttgcatcattttgctatggactttactgtttaaggggcacacttgtcagaattagcctttcgatctttcatgttatctccgagttaatttaagatcagaacaataaaatcgataaaataatgggagctgactagattttatgattgggtgatacggaaagttgattgtattttgtggacaatttggtttgtatggatggatggtcgtgccttttctttctgtgcctttgccctcttgcgagatgccagagtgatgaataaataaaaactgaactgttgattttgttaggtatgtttatatcatttttggtatttttacatgattgtgtgccaatgtttggaataggacaatgctttgttttctcaagactaacgagctgttttctcagattgattgcaacagagcatgctgcaacggctaccatatacagtactccatggttggtgccataaaagggcaaaaaaaaaagccatatcagtagatgactcgtactataaatgagttgatctagctagactgcatgcacaatcgaagagccagatacatggaccaagattttttaattatatctagatgggttgattaatcatatgctcgtccgatctatttaactagatacgtgctgaaattatggttataaaagaaactgcgcagtgcagtttatgatagtacttatcttccatagctatttaaaatgagtaaagcatgtttattatcttagcttttcagttctgattttggcgctatcttttcttcttcatgtattctaattcccatttctcctttggttgggaactccgtgatgtgatacaggctttggtattacatttttattatgttgctttaactatagattgataattgaactttgagattcatccgcattgcaaatatcactttggtattactgttcttactctgattaagtttgcaaaatgatgattctcattgtatgctgtgcaggagctatccaaggaaaaagaataaataagatcctatcgtcttcaacgtgatgctatcatccttggtcatcaggaaaaactcagaagaccatggaccgctcctgccactcatagtaagaaacatgatcataaatctagtctaatatttgttctgtaaacctaaatttttgttttactctataatatcaacaaatttagtcgacaaaaaaacaatacgaagagatcatgcttaattttataaatggctgacctcgggaaaaaaatgttgtgaggattggagaaaaattgttgcacattaatcttccttcatgagaaaaattatagtattaatgaatttgcccacccatcttgcttacaagatgatatattttacgattggtgtagggtcatatgcgttatcactttttctcaattttatgctaaatgtttttttcatatgatcagagataaattgtggcactgtcattataggatatatacatttcaatgttaattctacacagcaatatttattgtttcaaagatagtctatcaaattagcgctacactttgctatgattccactgttttgttcaccacgttgaatacaaaacagtgcaggtcaggggtcttctttgtgaaaagagtttattcaaacagcctaattgggttacagttcttcgatggaattcatgaaggcacatatgaatggggtacaaaatttatctaaatgctccaaaacattgtaggatcgaacacaagtaaccaagcctccaaaacttttttcaaaacgttttttgtcaaaatcaacgcatcaagaacacgatcatgcaaagcaaatccaagagcaaaagaagactccaactttttagatttttcaatctcagattccaatttcttgcaattaacagaatagacatcttgcaaagcattaatttcagaaaataaaactttacaagatttgcagtcatcatcattaggaatcaaatattttaatctatcaattcagcatttagaatctcaatagtgtgatccttctcatcaagcatattagaacatgtttgaagttttttagcaaatttgaaagcagcatattctaattgatcataactaagcttttcttcactattactatcagattcatcaacatcagaacttgcattacgagcaataaaagctagatcaacaacttgcttacctttgctctcatcttcatcctccgattcatcaaaagttcttattaattcttggattagccactgcatgcaattcttcttcttctccttcgtgatcttcttcttgtcaacttcattctccaaaactctaccatcatcttccttcttgcctctcccaagcttaggacatcgtgaacgaaagtgatccgtagaaccacattcaaaacaacgatttggtccacctcttttcctgtacctaacattagccacagctcgagaaagtttgttagtaaccaaaaccaagtcctcctcgaactgttcgagttactcatcggacatggcattaatcaaagcaagaacagtagaatttgatgaagaagcaccaacatccaaagaagtcgaggaagaaaccaaagcactagaattagaatcaattttacgagaaagaatattcatctcatgtgttttcagttttgtgtaaagtgaatccaaaatcaaagtagacatatcgacagactcctgaattgatgtaaatttcatctcccaaatagacatgtcaagaccattcaaaaagtgacgagaaacttcagattgagagtaatttttgtcataagcagaatcaaccgatctaagatcactcaaaattttgttgaatctagaaagatagtcatccaaagcttctccaggtttcatctcaaacttaatgtactcctttttaaaaagatcacgacgaagttctttaatatttgaagtttcttgatgaaaatttttcaaagcgttccaaatctcatgagcagtttgaaaatgtgaagcacgcgcaaaaatccgaacgagaaatcccactcaatanaatattgcgagctttgcaattttgttcaaattcagtttttaaagcagcagtactgatttgatccggaatcacataaggattagaaactttcctccaaatatcaagatcctcagcctgaatataagattgcatcttactacaccaataaggaaaatccgttccatcgaaaacatggggcttagttgtaaacttattagctatggcaaaactttagatcggttaaaatccaaaaaagaaaacgaggctctgataccacttgcaggatcgaacacaagtaaccaagcctaccagatgggggtgaatggtaaggaaaaccaaaaacccaaaaacttttagcggaaataaaagttaccctcaaatcgatggaaatctcgacgtagtcctgtcgccgccggtcggaccgctcgcacgccgccggttagatcgcctccctgccgcctgaacccgaagaaacacaaatcgaagaactctcaaagtagatgacaactttattgcttctctctgtgtttacaaagtgcaccaacagcactccttacaaaaatctcgactaaactcgaaaccctaactaaactagaaactcaattgctatgaaaagctatacaggaagcctcacgcttcctctctatttataccgtaaaaatcccctactcaaagtaggtgtcaaattaggtgtagagcttctatttccaacaggattcaattcctcaatttccttttctccaaaaccacagccgtaccagccatggaaaatcctgctccggatcggacgcctccgtaccgatccttcgccagctcgcactcggtctcctggccgcctgggccgactcggcctgccatccaaccgagccactgctgctcctcccagtccaagccacggacctgcatacatgcatgctacctgcacacatgtacatcacgttcatgcaaactacacgctacagtacatcgagtactgtagcaaccatgccctccaccgtacatgtacatctccatcttttctcattcctcctcgcgaacaccgacgcttgcacgcacacctcataaaacccgttgcgaagatctctcacacacggtgtccatccaccgtgtgccatcttgtattcaacttcgtcacccggtatccttgaccatttggacctcaacttctccctgagtttagtcccggtccccaccgttgaccgaagttgacctccaagaatcctgactctagtcaccttttcacatggtatcctgaccgcactagacctatgttcctccctgaacatagtcccgatcctcaccattgaccaaggctgacctcaaatcacctgcacacaatcagacatcaccattgaccaaggctgacctcaagtcacctgtacacaatcagacaaaacaactgttcctgggcatagatatcacaacctgacccacattagtcacacgcactcacaccaacatccacacatctttccaaaccaattcactaattaaatcatttgcatagccaattattcatcacaaacattaatcatgacaacgatttcacaaacattactttgtgcaatatttttagtacaacaccatttctcctttatgtttgtcgttcttttagttgagaaaacatttttagaggtgccaattgccagcttcgaagctaatttttgatgcaagctttagctcagatcaatattcatgagggaaaaaaggtttgttcgcattgatttaggcaaatggcattctcatttttaccattctactgcctccagaccccagttgcaagaacaaaattcaaatggtaaaaatgaaatattgagattaagagcactgcaaacaatattctttctaaaaatagatgcaattcttctgagtccatgtgatgcaccttttcgagtgattaggatctgatcatgagaattatcagttatacacctatttaaataatctcttaaaatgtatatgattaatgcaacgatttcaataatttagcatgatgcctaatctaatcctttactcaattatcttgcaggcaatcttgatcaattaattgcttcagtttagagagtttttttcctacaggcaggtgagatgaccaccaggcaccagcacaatagctcattacaagagcacaaaccagactgaagattgtttggcagctgaaactgcactgtgtaggcagtagcccttcttgagaagtgatggccatgacttttgagcctttgatcatctggaacagcaacacttgggacctgtacaaatttgctgatggttccttctacaaaaattgaatgtgcaatatctgaatgttgcctacttctgaattgtcgaaacaagaatttggcaataataacaagaattcggcaataataaaaggggatagcgcacgagacctaaaagtggatggatgcggagacaaaggatttagacaggttcaggtcctctcgatgagaggtaataccctactcctgtttggggatttgaatccaccgggtgtagtatagatctgacgatctagttgtctcatgccccctagagggccttctgcccatcttatataggatggggggcaggattacaagatataaaccttaaccaatacattattggtttcataaatctactttacaatcttatcaaaccaggattttaagccgttccataatatacaaggaaacgtaatacccaagtcatgatccgttacatatttcatagatataagttatcccctgtatcagtcggataaccacgccgtgtgggtatggggtacccataatctccacagtagcccctgagaccttcacagtcgaaaagataatcttctctcgaaccagattactccaaagccgagtgcttcaatcatctttgccatggtctcctaagtacttttaccaaatctgaagactgtggagggctgaaaaataactgaatgtaaacttaggtgcatcgactagatgcacctaataggtgtagctcccgactatggggttaattgaataaactaagcatatagtcagggaataaataatccaaccaactgagtggtttttgataattatagtcaaccaagtgacttgataccaatatatagtatatgcggtgtgaaatcccgaataatatgatccaagtgatataccgactgctttgtagaatatgatgcgtgcaacctaaagttgacaacatctttgaaaattcacatagcaaaacagctataaagaagcttgtatgttgtgaataaagaaatttccaaagtattgggcatacgccatgcgcacattgctttaacagatgtgcttaagtccctaaaagacacatggcttcaccacacccggaaatatacgatatatgtggtgtaaaatccgagtaaataaactcataaaggatttaccaaccgcttgaaaaatgaccaagatatataatcagcctaagccttaatattagtcaataaaaatgcacacttacatggcaaaaagcaatgatattatatccaatcaattgcttaaaaacccaaatagcaccttgacctatataaaaaagtcagcgggtcagctatataaagttttactgtttgacaccttttaagatgcattgtaccaactcctaaaaagttgagtaactgcggtataaaaggattttaaggtattaggcacttgatcacgcgcactttggcctaagcaaaaagtgcctaagtccctaaaagaacgtgaaaatatgggctgcagatatattaggcctaggccaaaaaatatgccttcgacacccttcaaaggatgacgcatgtaacatgctcctgagtaataaatcttccgggtgatatagaccaagtgtagctcatatgaatagcttatgatctgagtgattatcccttataggatactccaaaatatatataataattgaatcccgattggcgcgagtattcggttgatgaaccttacggggaataataaatagtccagtctttgagcatagaaaatagacccatgatcatgaattcatgttgcatgtatccagaacgagttcaaattgaaggtatgatacttgtgtttgagttagtaagcccctgatcatatagcttgtccttctgtcgtagtcagaatggtccattgatggtagccgacgcagttggcatagagacaagacgaccaatatagagataatattgcccacctgaggtggcaaaaatattggtggtagtgaagatagtgataccaatcaaaagtgatgaagtcggtgatagacaaggcagctgatgaagaagatgaagatgcccattagtggtgacataataagccatccgtgaaggcgaggataccggtcggtggtgacgaaagcaagccgacggtgaagatgtagacacgcattaaaggcgatgacgaaatccaccaatcatgaagatgaagaaaatagttggcaacggcaaatgcaaccgacagtaatgatgataagcagcaatcatagatgagcgactatgatgacgaagatgcccatcaaacagcagtagaataggctatgttgaagaggcttgacaggatattgatgaagatgacgatgtcggtgatccagtcaatagcggtgtagcagccgatgataacgatgagatcctctatcggcagttgcgtagtaggccaaccgtgaagacgaaataacaagtcggcgatgaaagtcggtgatgacaaaagcaaccgacggcgaggacgtagtcaccgcttagcaacggcggagacatcagggccgatgaagtagatttgctggtgatgatgtcaataacaacaatccatcaaactgttgagaagatatcaaagctcgagtagtttcattgatgcgagcgtgtgcataaagaagactgatgcaacgcttcttgatctataaagatggcagtagaacttggaattgtagctgttgtagatgcttcacttgaaggaaagtaaatgttgttgtccaactcatcgaaactgagctgattggttgataactctaaactcccgaacatgtagatagaatctcaaacttgatacttgaaaaatttggagtagattatggcagcttccagaaaccaaaattgctggtgaaataattggagttgctgaagtagaatgtctgctccgaagcaaagataaagataatgactcctggagttgactcgttgactgattaattgatttcttcagcttgtcgaattttgagagtcttgtatctgtgtagcccccgactctttggttagttggaaagcaactgaacatagagtcgagaactgtagtttattgtcgtcgagtagccatcacttgagtgaagatatgtattgaggatgtccgggtagaaatctttactagaacaccacttgttataataacatggcatcatatttggcgacgcataccgagatgtcaaagctcttgtagaagtcatggctggtgaagtagcaaaacttgcgaagtagcggcaatagagtttgccggtgctgaagacaatgaagatgaagtagctccaccatggtgacaaagttgcacagccatgatgaagtgaacatgagtcgatgacagaagcaaaccggtagcaaagacgcgcagttgtgaagataataacaagtcggcggcggaagaagtagaataatgatgaaaaggaagacgtccttgagtggcggcaaaataggccagccgtgaaagttaagacaccatgagctgcggcgaaggcaaaccaacgatgacgatgacgccagtcaatgatgacgaacaagccagtcggcgtcagacaaggcggccagcaatgaagatgatgacatccatcagtagtggtagtggtataaactagccgtagaggcgatggctctggtcagcagcagacgagacaaccgacggtgaagatgataaggccaatcaacactggcataatcatgcagccgtggaagtgaagaaaccagtcggcagcagacgtagacagcttgcgttgaagatgatgatgacgcccatcaacggaggcggagtccaccgtccttataggcgagaacaccagtcggcggcggcgaaacgggccaacggtgaagtcatagatgcccaacaacggcggcataataggccagccatgtaggcagagacaccagtcggcggcggcgaaggcgagccgacggtgaagacgtagacgcccaacaacggcggtgtgaccaaccaaccgtataggcgaagacaccagtcggtggcggatgaggcggtcggtcggtgaagacatagacgcccaacaacggcggcataataggccagccgtgcaggcggagacaccagtcagcaacggcgaaggcaagccggtcggtgaagacataggcgcccaacaaacaatggcataataggccagccgtgcaggcggagacaccagtcggctgcggtgaaggcaagtctgtcggtgaagacgtagacgcccaacaaacggcggcataataggccagctgtgcaggcggagacaccagttggcggcggcgaaggcaagccgatcggtgaagacgtagacgcccaacaacggtggtgtgaccaaccaaccgtataggcgaagacaccagttggcggcggacgaggcggccgatcggtgaagacaacaacgcccaacaacggtagtgtgaccacccaaccatataggcgaggacaccagttggcgacgacgacggcaagccggtggtgatgttctgactgatccattcctggagcgtagtagataagcttaaagccatgaatcccttttatgcatatctggatctggatcgtacagaacgaacatatagatgtaaatataatactcgatgaaaattcaagtattttaaaatgtttataaatatgtatttctcctctcgtcaattttgatttccccgagcagatgactcgttacgtttaaacactctgcccgactagtcatagccaccaagcaccgggagtcggcctaggcacttcccaaacatgcatatgagtgacatgagttcgttattaatggaacaaagtttcatggatcagaatttactacttgggtacttttacaattattaagagcagaaaataaatttatctcatctctatgcttatgatttattccgagtaatacttagcaccttgcattactcggtccatccaacgagcccccgggtgctaggaatcggcccaaaggcaactatccatcgacaaaccaaacgaaaagcataggaagatagaactccataactcgatgggaactttattgttactcggattattttgcaagcaatcaagataaatattatgaaaaattgttaaaaaatatgatatagtatctgtagcccctgactcactagtcaacggcgaaccagttgatgtagtgaggcagaggaaaaggaaaatatcatataaagaaaagtaatgatgacttagcttttttgtatctccctcggtgacgatagaggtgaccgatgtggaaacaaagtcatccatcaatagcaatgaagacaccgggcagcagtggcgaaggcaagtcggtgtagatgacgaggcccatcaacggcggcggagtccgccaaccgtataggcgaaaacaccagtcggcggcggaagcaagccggtcggtgaaagcgaagacgcccatcaacgatggtgtgaccaaccaaccgtataggcgaggacaccagtcggcggcggcgaaggcaagctgacggtgaagacgtgtacgcccatgaacggtggtgtgaccaaccaaccgtataggcgaggacaccagtcggcggcgacgaagacaggccggcggtgaagtcgtagacgcccaacaatggcagcataataggccggccgtgttggcagaaacaccagtcggcggcggtgaaggcaagccggtcggtgaagatgtggacgcccatgaacggtggtgtgaccaaccaactgtataggcaaagacaccagtcagcggtggcgaaggcaggccagcggtgaagtcgtagatgcccaacaacagtggcataataggccggccgtattggcggagacactagtcggcggcggcgaaggcaagccggtcggtgaagacgtggacgcccatgaacagtggtgtgaccaaccaactgtataggcgaagacaccagtcggcggcggcaaaggcaagccggtggtgaagacgtagacgcccatcaacggcagcataataggccaaccgtgcagacggagacagcagtcggcggcagatgaggcggccgatcggtaaagatgtagacgcccatcaacggtggtgtgaccaaccaatcatgaaggcgagaacaccggtcgataacgacggaggcgatttgataaacaaccgccattatgtactccagatgcagatccatgtgttcgtatgccagcccaagcatatatatatttgtacatatatacatgtacagcttgtaacgacttgatgacgtggccgttgagcctccatagccgaggtggagtacgcacgagtactgccaaaaaataagctatcgcttggcatcgacggtactgtcaaaaaagtaatgctggaacagatcaatctgcaattagaaatataatatatatggataagaaacgaaaaactcggatcgggcaatgaggctgaatcatgagtgacagccgacgacgcgcgatgcagcgtatataagcccctgtagccgacgacagcttgatgttcagcactgctccgcgtgcagggacggctgttggacaacatgacggtgttcggattggcggcccgacgtgcgaggtcgccgaccgcttcgccttgatctcatagttgcatatatagaaccagaaagtatcaagagatcaaatagagtaatgaaaaattaatctgataaaagtttgatcggaacagcaaacctgagtagaaaattgaaaccgtcgaactcatcgagatcgatctcatcacatctccagaaaaattggttccatcgcacttctcgacggaatactcgacgcaacacgtacctggggcgccaactgtcgaaacaagaattcggcaataataaaagagggtagcgcacgagacctaaaagtggatgaatgcggagacaaaggatttagacagattcaggccctctcgatgagaggtaataccctactcctgtttggggatttgaatccaccgggtgtagtatagatctgacgatctagttgtctcatgccccctagagggccttctacccaccttatataggatggggggcaggattacaagatagaaaccttaaccaatacggtatcggtttcataaatctactttacaatcttatcaaaccaggattttaggccgttccataatatacaaggaaacgtaatacccaagtcatgatccgttacatatttcatagatataagttatcccctatatcagtcggataaccacgccgtgtgggtatggggtacccataatctccacagttttgttgaaactgagtgtgaattgattcttgtgaattttcttacagtatgtcaattccatttcagaaagcttagaaacaatgtgatccaaactgaaattcagttttcctaagttgcactatgtgattagttttatatgtatacatccaaatgaaaaatagtatgcatctaatcttgttgacattgagggatatctctgaggtaattactgccttgctatttcggtatggtatacatatattgatatatactggtccctgcttaatttatattgggctttacatcttcagaatagtctagaatgctttacatttcagcttttatgagctaaattaacatttgttcttaaataagttcactggccttgcaatatacaagcatttgccagaatacattctgaacatctctcttttgtcaaaatgagcgtttttgtgtgtcgaaatgaaccggtaagaaccagtttggtatgctccgatctttttgtttgtttatgtataataacttaaatgatagtattattatttgtagaaactatgatgatgaaatctagaacactttaaaacatgatgaattcagaccacttttatgaaattgataatgatcaattgttggtggaagaggaaaacaaggaagattcttatgcataatgtatgcctggatcttattcaattcttatgtgtccaacaataggtgtgtcagcatggaattgaatttgcattggtatggtgtaaacctttgatcccatatttgtatttttctttggacatttgagctgaatgtcagttgaattagacttattgtaaagcaaactttatatgtaaagatggcatatctgttaaaagatatttggttaattcaattgacatgaaaagttattttttaaaaaggaaaatgtgtgctcctacttctgatgatattctgcaatgagtatattcttgaagttgtagtatattagagttaatttatattgcctaattgtcgacgggggatacccgtaaaccggatatagagggtattagggtacgcttgtacttagatctacgtagtacgacatcaagcaaacagaaaacagggattatactggttcagacccctcgataggtaatagctctaatccagttggtatgggattatatgatgaaaccacagattacaaagggaatagcagaactcgatgataccgacgagaccgtagtcgagttggttcgactagatcacccggcgacttggctgtggtggttgagttggcgacaagattcgatgccttatgtcctcctagggagtcccttttataccgtaggtcagttggtctccaagtagaactcggagacatcggaccctacacgatacagtgacgacccagttctatctgagtaggattccttccatctgtggactccgtgatgaatttccttaacgtgtacaaagaacgtccgtatacgcgcagatataccatatcgatatatgacgtatatccaagggtagagggtataccttatccgtaaccctgacactaatgacgtgcattgcatgtacacgcttactagtgtgtagcagggtttaccaaaccatttgggttaacactacggtttgacggttactacggtaaccgcgaggtatcccgtggtttaaaaactgaaaaggttatcgcatgtgataacctggataaatgcgcgataatcgtacggttcgtacagttttgtaaaccctggtgtgcagtagtatggatagtattatgctgtatattattagaatgtcttgttaacaaacatcaatcttctctcaattttctttccccttcatatcatacaaaatcctaaaaggtcattttccattttctctcagaccattgtactttggactgtttcttttggaactttgaacacggctttggtgtgtttgagtacaaccacctaaccctccagatcaaaaataaggatacatattcatagtattatcttaggatgggggtgtactataatatggactattatatattaagaaggtagtatattaggatggtgaaaaacgacgtaaaccttgaattactgtttttttatttatttactgtattcaatttaatctaaattaatctgtccctaacaaagtgatgctattaggcccatagcccgataccataagccgtcccgtttcccatggttgatatcatacaatgggtgtgtttagttttttttaaagtttttgaagcatacagacatacatttgaagtattaaacgtatactaataacaaaacaaattacagattccgcctgtaaattgcgagacgaatttattaagcctaattaatccgtcattagcaaatgtttactgtagcatcacattatcaaatcatggcgtaattagtctcaagagattcgtctcgcaatttacatgcaaactgtgcaattggtttttttttcattcacatttaatgctctatgtatgtgtccaaacatttgatgtgatgttttttgtcaaaaatttttggaatctaaacaaagccaatgtattttctcaaagggacggatctaacaagttttttcaccctatcacatcgaatgtttggccacatgcatgaattattaaatatagacaaaaaaattgcgtgtaaattgcgagacgaatcttttaagcctaattgctccatgatttgacaatgcggtgctacagtaaacatttgctaaattaggcttaataaattcatctcacagtttacaggtggtaagttgttttgttattagactatatttaatacttcaaatgtgtgtttgtatatctgatgtgacacggtaaaaattttcacccttggatctaaacacagccaaagtcatcatggcacgttttccttacaaacgcctacgtttgaatcgatcaaagaatcgatggattatatgtattatgatgtaattggttattggtttaatttaatacataagtaaaaaaagaaaaagtataagggaaatattagggatagtctatgtgtcaaacaacttaaaaaaataaattttataaaaccctacctattatggtccaagttttgcaaaattgcgtaaagtttggcacgtggcacataattctaggtattaggtattatggttataaagtttcgcaaaaccacattactaatcattttgaatttgatttaccacacttttgagatctacaatcatatctcaaatttatgagtattatctatcatatagatgttacagagaaatttcattatttaccatccaatacgctgacctttaagaatttaccactcaattcgtaagcctttaagattttgccaccggaaccacgaatttcttcatttcataccactcccgtcaaatttacaactcatccgtctccttctgttcacactgacgtagggcgccgccgccaccatcgctgggccctccctcgctgccatggcgcacgtatttcatcttcatttgtcatccccccaatcgacagcggcgtggtcggggatggcttcacgctgcggctgcggctgagaggatggcggcggcaaccatatgcaagctcgggcatggccgcacctcagcagcagacgaggtcgggaacagcgacgatggtggcagcgaagcttggggacggtcaccgatgagctcggaactgcggcagcgaggtgggcatcggagagcggggaggggagcagcgccgtgagtggctatgcctaggtggggttcgtggagcgggtggtgtggacatcggcgagcgaggcggcgatggctgggagaccagaggattcgggctgtggctgcggcggaggcggcagcgtgggagaggggtgatgcagggaaggagcctaaatatgaaacgcagacgacgcgacagcgacggcgacggcggcggtaggagaaggaaaagcggaggcgagcgggaacatcgacgatggtggttgcgaagcttggggaaggtcgccgacgagctcgggtgtggcaacggcggcgacctagttccgagacggcttcgtgtagacggacgatgcgaacgggagggcggagtggtatgaaatgaagaaattcatggttctggtggcaaaatcttaaagacctacgaattgaatggtaaattcttgaaagtcagcatattggatggtaaataatgaaatttctcgatgttacacccacgttttctattttgatacaggagtatgtcaaaatggttaatggtgtagttctgtggaattttcgaaccataatatctatggttctctgatacgcactaaaatatatatggttccgtgtaatttggaccataatacctgtagttttgtacaattgatataatccaattagttaatgtttggaacaataaacaccttgtattattagttatcacagaacaaaatgtattatataattttttttatcacaaaatttcagataacatagagtgagtggaggaggagggcaggataaaacagactcggaacaaaaacgggtcaaaaacccaaacctaacggcaagtcttggtacgatccgacggtcacaaatttgtaaagaaatacaaaggaataaatcttttcatctccctcaactcttgctcctaattaaatctgtctccctcaagagtataacacctccccaaccttcgaaaccagagcaaatcgagtccctcgattgtttggatagcagtttcatctttcatgacgctcaagagacccacgtgtcagtgagaaaaattaaaataataataacctcacatgttagccattcatttcttacctttaccctattaggaaacgataggcaaataaataataaagaatagtagatcaatcacagaagacacgagatttgacgtgaaaaaccctcccaaagtaggagaggaaaaaccacggatgccagccagcgaatatcttcaccatatcgggtgaggttacaacaccgaacgacggtttacaggaatatatatgaaggtgaaaccctaaaaaaataacgatccataccgtttcgctccgtttgaagtgggcctgtttagttcactaggtaatgccacatctagtactaggtagctacattttgaaacggaggaagtactgagtataacacctccccaactttcgaaaccagagcaaatcgagtctctttggatagaggtttcatccttcatgacgctcatgagactgtcggtgagaaaaattaaaataataacagcccccacctctccctaggccctagagcaaatcgagtctctttggatagagatttcatccttcatgacgctcatgagacctacatgttaatgagaaaaattaaaataataacagcccccgcctctcccaggccaggcccacttacatttggcaactttcatatgttgtagactgtcctcacagaccaacacaagtcttttctgcacactaggccaagcacgcttaacctcagagttctttagatatcggtttctggaaaataagttgcaacttgttgatgtaagtattctattaattctattaagccttgggccaagatgtcacaatccatgagccctgcgctgcatccgctggccttcgacccggttgccgaggtcgctagggtggtagacggcggccgacatcggcgagctcgcagggagtgcgggtaggaatagcgaggagctactatcctgaaattgttgtcgccgtccgacaaggcatcgttgccttgctcctctcctgacattcgatgggagtttcccggactaggatgccacatcagtcaaatcagctatccatattgtcttactacttcagggcctgtttagttcactaacgaaaatttttagcgtgtcacatcggcgatacggacacacatttaaagtattaaatatagactaataacaaaacaaattacagattccgcctaaaaattgcgagacgaatttattaagcctaattaatccatcattagtaaatgtttactgtagcaccacgttgtcaaatcatggcgtaattaggcttaaaagattcgtctcgcaatttacacgtaacctgtgtaattattatttttatttatatttaatactccatgcatatgccgaaacattcaatgtgacagggtgaaaaatttttgtttgggaactacacagggccttatttaacccggttttgaaagatggatgtttaataatttctgaagataaaggacctacagtgaacttattccatcccaaaacagtgtggtggtgtggcttggatgggccgggctgggcctcctacagtccggctcggtccaactatatatctctcccacctttatctattctattaacaaaaaagtgaaaaataaagaaaaattcattcttcttctccttctccttcttctcttcttggaggatatttcttccccctccgtctccggcgccgatctgcatccacccgccgagcagagaccagcgccgccgccgccgccgtccgttcctcctgtatcgcgtcctggtgagcatccgcccctcgttacgcacatttttttattcgaatttttttttcaagaatgaatttctgtgcgttaaccctagatagtacgtagcttccgttgtagatctggatctggaaagcttttctcttgatttgttcgtaatgtgatactaatagcagtttctttgcttgtttgtttgtttccctaaagaaatttcttttttctgggatgtccgacgttggagacgcccctgtgcagcgccgctcttgttcgaatccggccggtggtctgtaggattgggcggctgcggcggcggcgagatggacgacgacgccagcatgagcataagatgggggggattcttcgagtcgccggcgaggaacctcggcctgcagctcatgtcgtcggtgcctgctgagcgtgacaccaagcagctgctctctggtagccccttcctgcatcatcagcatcagcagcatgtcccgcaccaccaccatcagccccatcacccgcgtgactgcggcgccaatggcaatgccaatggtggtgctatgcctcctcctcctgccacggaggctcccccttcaatgccgatgaacttcgcgcgcagtgacatgtggatgcacccgcaacagcagcagcaacatcatcatccccgcgagcacaaggctcttcacaatctcactgttggccatggttcttcgcacattgcgcatcatgacccagtgggctatgggatgatccccggtacgcataccctgcagatgatgcagcagcaaacagagcctcaactgcaacccccaccaccgcctcagcagccaaaagaggaatgcatttcctcgccattgatcgaggaaaatgtacctgttattgatgagccaccacctcccaagaagcggcagcagggccgccaacccaaggtaccaagggctaagaagcccaagaagtctgctgctcctcgtgaggatggcgcaccacccaatgcaccagcaccacggagaaggggtcccaggaagaatatagggatggtaattaatggtattgatttggacctctcaaggataccaacgcccatttgttcttgcacgggcgcaccacagcagtgctatcggtggggtgcaggtggttggcaatctgcgtgctgcacaaccaccatctcaacgtacccactgccaatgagtacgaagcgccgtggtgcacgaatcgcaggcaggaagatgagccatggtgcgttcaagaaagtacttgagaagcttgctggtgaaggttataatcttaataatccgattgacctgaagaccttctgggcgaagcatggaacaaacaagtttgttaccataaggtaaaagacaatgaaattctaaaatttgttggctttgtaggttgctctgcagctgtttggtctgagtaattgtctgtatgtactctagattacaaactgcagaatccttttaggtgtaggttttaggcatgtcctgtccctttgcagtagtttacatgcctcatctgtgacctgggtgctgacctgtatggtggctatctgcatgtatctttgtcattatctttacaagtagcagtgtaatgcgacaatctctaatttaggtggcatgaaagttaatctgttcaacgtttctcattatgcttaagtcttctgttatacaatgctccattgcaatgcctggatgttttacagaatacaatatagttgctatctcatgaagtagaaacgttatctttttcatgctgtgttctgtatgcatgcaaagtttatatagcctatatatacatgtcttttcttttattgaactgatgtttgcatgcatgatgaatgtgggcaaaggttctgtacctaatctggattacttaaccagttctaataatatctttactgtgagcaaggttcttgccaatttcatttgatgtgctcaaatctctgtcagactctattccgaagtcccttggtatcaagaatttttagagtaaatgctgaggaatgtcttttgccacttgtctaatgtaacatgcctttagttctgccttatacgtagatggaactctgggaccattgatgtcatctttgctatttagtgattaccctttaagtccatgtgttattatttgcacttctttaggaggcaattattggctagtaatctaagtcctatgtttcaaactcagcactttgtttaatcaactttgtgcaaacagtaaacagcagtcaaaatattgcaattacattctattattttttgatttgatgatcttttttgggataaagaaaattacctgtatagtttgaacatattctgctctattatgctgcaagatatcaagctatctgcataaatcttgtcatcctgaaccttcaaaaaatacagtaatatttcacatgttatgcattcaaaatgttgatcctgtctactagggcaatttaactctgtcaaggctaattgcattataaggtatgcatgttctctattttttctatttgtagattacagagaaagtggtgccatttgtaataaatgatgttatgattcagcaattttcttttttataataaagtactataataattagaatgctgatatgagaatgaacgatgatgattaatgagcatcagaattatatgaaatgttagataattaattatcacaaaagctattttctttccaacttcatatatgctgaaatgtgggttgctgctagtttcgtgttgcctaaactgcagtgttacatgagaatattgaatgtttgcacatatgttttagaggccttgagtgccacaaacgatggacagcacctttttgtaaaatgtaaatacccagtaaaattattgtgcaaaatatttggtagtctatgaagccattaggaaaataatgtaattctgagcaaatagaagctaatagtgccaataccagagctattgtgatagatattgttcactgatatgatatgtgtgaaacgttataacttgagctattgcgaattgcggtagcagagtgtgcgatttatcagcatcatcatcgtacatctgggaatgttgtcttgggtgatctgtacatgtactctagttccatagatcttacatgctagcccctgctgttttttcttgatctgttctgttcttggtgtgcattcgccagaccgatgtatgaagatatattatctgcatttgttgatcgttgtacattttttttattttttgaaagaaaagtatgctatgtttagtttgctgagatgcaaatgcaatgcatcatcaggctagagttgatgatcaggctgagatgtggctgcaaatagtttttactgtgatgtttctcattgcttccatgttctcagttaccatggaagcagcagtattcccatcatcaatgccatggaattttgtgtatatgatgtgatatggttttccctactgttcatacttgatgtgttctaaatgagagtgtgacactacgtatcttgaagctacaaaatgaataattacccttttattctgtctatacatgattgttcctccatttggtcatttcattgtctcgtgtggtcttcacatggcttcattgttacttgctgagatatatcgaaaccaatctcgccatcattcatccattctgatgcattttgcagtagtgcttattgttttgttgtacaaaagattattatttattagtattgtatagaagaaataaacaaaagcagctctaataaggtgaactacagctgcggctaaaactgggcaagtttttgcattttaacttatggaaaatattgtttgtgcaactctccaaggaccaaagggatctgtattggccatgtttcagcacacggcaatgaggttcagacttcagaagtccaaactgatttgtgtcttcccttcccaccatgcactactgataat

SEQ ID NO: 7574 - DNA, 23344 bp, Oryza sativa
  unsure (1)..(23344): unsure at all n locations
gtgtggccattgttgtcaaatgactaactatcggccgaattcgtgctctgtaccctacctcccctcttccctctccactgcgccgccgctctcgtgccaccgcaccgccgttcccgtgctgccgcgtcgccgttcccgtgccgctgcgccgccattcccgtgccaccgtgctgccgctcccgcgccgccgtgcgccaccgtcgccgccgccgtcgtcgctgccgccgtcgtcgccgctgctgccgccggtgagccgccctccttcccccctcgcgtccaccactgccgccgctcgggtgggagagagccgagagagagagggagaggaaaagagaggccggcagagagaaaaagagagaaagagagaaaagaaagaaaaagagaaagagagaaaagaaagaaaaagaaagaaaaagagaagagagaatggaggaaaagaaaaggaacaataaatagaaaattaggaagaaattaaggaggttaatagttcaagaaaatctaaaataattagaatttaattatagattaattatggtcatagaattgcaaaatttaatataaattataggttattcttggtaatttctaaaaaaatcaattcgcggtagtagtttagatgtaattaacgactaaacaattagatgaatttttttagactattacagattagttttggataatctctataagtaatcgattcactgtagaagttcggatttaatcactaggaattttagacgtatatttggatctttatttgaattttaaccgaattcaaatcgtttcttcgcacgtaattttagagcccgagggagttgcggatccaagcgaggaccaagaaccgcaagactttgagcaaggcaagtcatcactatcccttgaacacgttgatcccaattgcgaaattatttcgtttataaataaaattgcatgcaatgatgaacattctacttgtgtttataccatgccttgattattgtttaccccttattccttcgtaaccatatttacgtatgagtccctagtcaattatgacaattgcttagaaatgctattctagaatcatgcatactcatatttatcaaatgctaaatgcttgggcaatcacctttgggaaggtaattgagatgcggcatgtggagacatgagcaccacattgccatgaaattgatgacatgatttgggaaaggaaaataaaatgaaaacaaccgttttcgactggggcagacggaggatttgggtggtatctggaaaaggctagtaccgtccccggtcaattaaggaccgagccatgaagttaaacatgaaacgacccccgtacaaccgtacttctcgaatgggtatagacctagcggattagatagccgagcggaggcagtatccctgcatagatggttcacccctgagtgaggcaggcgcgctacggtggggcagccgttgaggtagggccgagaggcatgctctacatcggtgtcgccattggtaggactgccatgagtgtgtgagagagaacttaacttgaaccataatttaatatgtgtgtgagacttctcttttccgggagcgctagaactcctctcactgctagaaacatggacgcctagagtgcatgaggatttaagttcatggagcgggtactgccaatgcgaggttatcaaaaggctttgccatggcgcgtctcatgtgttgggacgaggctcatgtgttgggcagtcgcagagtgcgggtaaagtgtacatccactacagtgtgagtaaaccaaatctattcgaatagccgtgctcacggttattgagtaccgggacatgtattacacttggctagactataaattctttaacttgtgtgggatgggatattacatgatgatttttatgctgatggagccacttcctgagaggtgggaatgtggacgtcctcagaaaaccatgacgactcaatggcggaaagctatccttgggatcacaatggatggtggacagaaccgtcgttgtttaatgtgaacactggtattaaaacttgatcagtctatgctaggttttaggcttatgaaaagaattacaaaacttgctttgcgcaaaagaaccatagccatcctttgaattcttctgtcatgtgcattattgctgtggtggcttgctgagtacggttggtactcacccttgcaatattcaaacttaatcagaggccggagatgaagcttcggaggatccctatgcctattaccaggagggtgatgaggacgatggcgctcaataggtcttagttacggtcgttgcctgtggcaatagcgtgccgctgccttaactccgctgccttacctacttctgtttttgaaatgtattccggaccgctcggtccgatgatttaagactgtgcctgcgggcttatgatgtaataattcgtactagactctcatgtatgtgcacttgatatttcagctataagttcgtgtgtaccagactacttgatccagggaaatggtactgtttacacgattaattcctgttataaaaacgggggtctaaggaagctcaatttgagaagttttatatcccgggagatattcattaccgtattcatttcactctatattcgatccatatctttattgataatattttattacgtttttatacaagttttcaattctgattatgtttctgaaaaaaatgaaaataaacatggtagatcaaattttcatccgtttctgttccattttcataactagctaatactgaacagaataattgaatgcggcaggtaaaatcgttgcagcaatactcatacatcaacctgaaacgaccatcctaggctgtgaccaagatgatatctattgatgactttttaagaaatgctagataaaaaagtattcatgttcggtatcaatatctcgaaatttcaatattattttggaaaataccatatttatcgattacgaatagaagaaagataacaattgagcacatctggcgctccatttcacacaattattttgcgagaagacagaagattaaaattgaattacaaattattttgctagatccccagcaagcatgatccatccagattattggtgcatagggccagcctgcgacatgttaagcaccatcccacaaatcttcgacgcacttgtaaggcccattgtcacagacgaactgcattccagtcagacccctctgctgggggagtttgctgattttgtctctctcttcctcagtgagctcccagtcgaaaatatcaagattctccttcatcctattttcattgtatgtcttcactaacaaaacatcaccctgctcgtacatccacctcaaacaaatctgcaccgcaaattaaatattgaagtctcaattaacatggtatgcccatttaatctcttaccttaaattctgtgaacaactgttttctaaattatttatctgattgaagatctgattgcaccgttaatattaaatcctcttaacaaaatttcataatataatattctaataaaacatatatgtgtttgacgttttgaaatagtgtttcatacgtgagaagaaaaaagtgaatgtttcaagtggaaccaacctgagcaagcgtcttgcccttggtttgggcgatgtcgtgcaggacgccggagtccatcaccgcggcgctgccccacggcgtgcccttcgcccccagcggcgagtacccgcacagctgcaccccctctcgccggcacacctcccgcagcgtcctctgctgccacatcgggttcatctccacctggttcgccgccggccgaaccacggcgaacgacagcagctgctccagcttcttggcggagaagttactgacgccgatggcgcgcgcgaggcccagccggtggcactcctccatgccgcgccacacgccctccatgtcgaacgccggcgccatctcctccttggggaacgggaagtcgtagctgcccggcgccacggtcgccggccagtggacgaggagcaggtcgacgtagtccattccgaggttgcggagcgtctccctcgccgccggcacgacgcggccggcgtgcaggtcgctgcaccagagcttggaggtgacgaacacgtcggcgcgggaggcgacgaggccgcgccggacggcctccgcgacggcctcgctgacgcagccctccgtcgcgtacagcctcgccgtgtcgaagtggcggtagccgagctcgatggcgcggagcagcgccgccgtggtttcctcggaggaggtgaaggggaacgccgccgtgcccatgccgatgcgcggcatggtcgggagcagcgcgctcgcaggcacctccgggatggtcgccattgccattgccgtattgcagtgtagtgtagtggactagacaaggacgtgtgtggctatatataaagaaaaaatggattctgttcaacgcatgccgcaatgcagacaacacatgggacgataatgaaggagaaataatgaaagagaaattcgatcggcttgatttttcgtagctgagtagttgatcacgttgaattatcaacaataattcagtttttctgatttacattgtactattattattagtttactagtcatgcaaatcttgcaaaatgattaattacaaactgtacatgtaatgcccaaagctatgtcacgtgcaaagtgatttgtacacaaggctgtgaccaagacgagatctgttattgtcttatcaagaaatatatataaatcttttagtatcttatcaagaaatatataaataatgattcgatttccctctgacaacctagaaatttcgacaatcgcaccaaccgggatggcaacgatcaggatgctgttcgtccacgatatgcgatcctcgccatcggctagtgagatggggtctggggactccactcatacctaagatgtggatggttctaacagtcatggctatttgttttttcgaacgcgcaagctccctgtatacgaatcaattgttattctgctccaacagttgtaccgaaataatgaataccttgagtaggtagaaatagaaaaaaacaagaattttcctaaatgagaaatgttttctttctaaaggaaattaaataatattaattttgattaatatcagaatatcgaatgagtttatgcttcactaattgaatgataaataactgcaagtaaaggagataggtggtttaaaaataaacccaaaattttaaacatgtatctaaaatcacaacaaaaatagtgaaatgaaattagctcgtcgggaatgcatccaaaatcattatagacccagggaattaattaatagttcccaaccacgggtggagtgaaatccaacaaaaatagatcaagagtcgtatacatttaaactaaatctaccatcttaaatttagcatcctaaataaatttctaggtagctaattaaatttgcaatgcatcatctatggacctatatatgtataccaggggagtaaccatttttcgtgaacgtgtcgacgtgttttaaataagtggataggtatacagcaattaatatacatgtatggtccatacattaattgatcgcagaacgtgtacgggaatggtgccgtgcccatgcctgccgcacataattaagatagatccacatcatgatccatcatgattatttagatatatactccactgtatctaagtagcttgctagacgtcaccatcccacaaatcttcaactgatttgtaaggcccatggtcagagatgaattccaatccaggcaggcccctcagttggggcagctgactgatcctctccctctcttcatctgtgagctcccagttgaaaatgtccagattttccttcattctcttctcattatatgtcttcaccaataaaacatcaccttgctcgtacaaccacctcaaacaaatctgcacgacagagtaattatatagtgaaactttatttgacctgattttttgtttggtttaattaaatattttatattcatttaatttctaaactttcgtgttttgatcacttttgatatacatcctttgattccataatttttgacgttttaaacatggttgggtcaaacttttataattttaactatcgataatttttaaatatttattttaaaagcactacaacaacatatttagatttgtcttacaaaatcctataataaaaataaaaaattatttatttattttatcatagtgattttttatgtaatttgtatataagttggttgagtttgatcacgagatataaacattagacatatatattgaaatattcacttaaagttttctttttaccggttactagctttcacttacaaacaagtaaaaacataataatagtatggtatcacagtataaggataaattgatggcttacaactgatgatatgtaaatatgttatattagttatttagagttgttcttttaaacatccaaaatatgcaaaaccactctccaaaactatcttagggagtaatatagatggtattgcaaagtttagggggttagatgttcggttttaaagtttagggtgctaggtggatttgcatccaaagtttagaggggtatttggacttttttccttgttaaaaattttaagaataatggaattggagggagtagtatatatggtatgaatttttctcctacaaaatttagaaaataagtatatcaaccaacctgagcaagcgtcttgcccttggctccggcgatctcctgcaggacgccggagtccatcacggcggcgctgccccacggcgtgcccttcgcccccagcggcgagtacccgcacagctgcaccccctcccgccggcacacctcccgcagcgtcctctgctgccacatcgggttcacctccacctggttcaccgccggccgcacggcggcgagcgacagcagctgctccagcttcttggcggagaagttgctgacgccgatggcgcgcgcgaggcccaggcggtggcactcctccatgccgcgccacacgccctccatgtcgaacgacggcaggatcacctccttggggaacgggaagtcgtagttgcccggcgtgaggctcaccggccagtggacaaggagcaggtcgacgtagtccatcccgaggttgcggagcgtctccctcgccgccggcacgacgcggccggcgtgcaggtcgctgcaccagatcttggaggtgacgaacacgtcggcgcgggaggcgatgaggccacgccggacggcctccgcgactgcctcgccgacgcagccctcggtggcgtaaatcctggccgtgtcgaagtggcggtagccgagctcgatggcgcggagcatggcggcggtggtgtcctccgaggaggtgaaggggaacgccgccgtgcccatgccgacgcgcggcatggtctggataagctcgctcgccggcacctccgggatggtggccattgcaacctgcagaagtgcacagtgtagtgtagtggagaggaggacaatgaggtttttctctgtgggtagctatatataggaaaagaatggatctcctccttgaggtttcgtgctgcaagacttaaacaacacaagtgacgatgaaggtaacatttttctaggtgaagcatgggcagggatagagctagagcgaaacagaatgtggtgttactctcttaatttactttactttagattaaagtttaacctaatacaaatgtctaagtttgtattaagggggtacatatacggtgaaaatagataaggtatagtttaaaaaattttctttatcgggttcctgagcaccccctaatatatactagctccgcccctgcatgggtaagttagtaagagatcaatatgcggtacaaagttcatttgcaatataaacctgaaatatcatgggataaacaaatgagcatctgagatttgttcttgttatcatgagtaattttttttgccacaagattaaccataagtaacttttttttttggaataaactatttagtggcatggataaatcttaaacaattatttatatatgctacggtagcttacaggtttgcaaatgctgtgttagttagtaccaacacaagactaattcatttttaccttttctattttactagtccatgaaaacttgcaaaatgtatgattagttgcacctacctgtacatgtccatgacccaaagccgcctaggctgatgtgccccgttgaaagcgatcgagatagaagtctgacgaagactatgacgatctattagttaccttattcagaaatgataaaaacgcatcgaggtttaggccctgtttaggctgtgtttgcttggggaggttgggaacaaatcttcttcgcacggaaaacggagcggtccattaacgcgtgattaattagaaattagctttttttttcaaaaatgaatcaatatgattttttaaagcaatttttgtatagaaactttttacaaaaaacacaccgtttagcagtttgaaaagcgtgcacgcggaaaacgatggagaggtgttgggaacccttgggtccgaacacacccttagtcacaaaacaaaattgttcacgctgtcacatcgaatgtttggacatatatatgaagtattaaatgtaggaaaaaaacaagagttaattgcactctggtccaccttttattgccaaagtttcactttaggctatcctctagctcatatttttactttagactaggtaagattatctttggtgcactttggaccgcccaagtcattttctttagctgcatctactctataatattgtaaacaattgcctgtgtaagttggaaaatattaccgggttacgggctgctgatgtgtttaaagttggaaaagtcatttatgtattcctaaaaagtttatggggtggtccaaagtaaaataaaggtaaagtaacctagcccaaagtgaaaaaatgtgttaaatggtggtataaagtgaagctttggtaataaacggtggccctaaacgcaatttactaaaaaaaacaattacacagattgtgtgtaaattgcaagacaaatcttttaagcctaattagccatgatttaacaatgtgatgctacagtaaatatttgctaatgatggattaattagacttaataaattcacctcgcagtttcctgacggaatctgtaatttgttttgttattagactatgtttaatacttcaaatgtgtgttcatatatccaatataaaaaccaaacccaaaaaatttttccaactaaataaggccataatctgaaaacgtgtaaaatgttgtgatattaactagagaacgaaatagagtgaaatctataaccgtagttctagagtgagtactacatgttattaacaatgtaaatatattaaacgacagagtattgtaaaagtaaaatttataaatagctgaaatttgaattgtggaacgaagaatagatgtaaacacagtatgagattaattgaaattagaaatggaagataaagtaaaattagcaattgaaattcaatacgagttaccaaacttgagtccctacaatactaaattaaactttggattaaaatgaaataataaaataattccgagtcaatataaaacaatacacaatattattttaaaattcaaaacaaaaattaaaacaaaactactcctccaaaacatggaaaatggttaattcaaccagtacaatgtacggaattggacttggtgattcttcactctctagtatgtcttgttatcattgtccatgtaatctctataatgattgattatagccttttaaagaaaagatgggaataaattctatgattaaaaaatatgtctctccctaattgttttctttatccgaccctgcatccatgtatgctcttgcttttgtcaggatgtatgtcagctatatactccataactcttggtcaagtatgctatagctagagctagcttatggcggccactttggttgaccagaaacagaaaggcaagtggctgatggctgatgacattgttccgcttgaagatatatgcttttttaaaataattataaagtacaacacagacactcacaacatacgtacactcacccctataaacgcacgcacgtaaaccctactcctacgagcatctttgaagactgagctgataaatcctaaagactgacgaagttactacagacgtctcgttgtggacgggtgcatcacatgccactaaaagcacaaaaccgttaaaatctaaaaaattctctcccataaaaatcaaacccaggatttaaggtgctactaaagtttaatgaggcgcgaagatatgtgctgatgcagtaatattgttgcttctttccatgcaaattctttgcccgtcgtgtgtcaaaaagatggggccactagccaccaatttttggaattatcggagaaaacagccttcccctcacacacagcctaactgttggctgcttacctggttcgttgcatcccatggcgactagcgtaaaacacaactacgaaaagcatttttccgtgggttcaaaaagtgttttttctacagagatcttacccgtctgcatcaggtgtctgggaaaataaatatttttccatgcgggcgatcaaccacatgaaaaaatacatctttccgtgtggtcaggttaagtggaccgcacggaaaaatctgatttccacgtgcgggtgcttatatcacctgcacgtaaaataaaaatcccaaaaaaaataaaatcaaaaaatccgaacccaaaccctagaagccgttgtcgccgtcaccatcgccatcgccgaatctgccgccacccacatcccctaccaccaaatccgcggccgccgcacgtggggagggcggcgccactccctaccgcctccttgttgtcatcggtggcggcggaggcggcggatccagccatcgtggcggcggcggttgcggaggaccgtcgtggtaccgcaccgctaaaatgcgggtcccgcgtgcaccgtgctgcctagcgatttttgagactgtgcaggcactgttttcacactgtttgacacggcttcatactgtttggcactgtttgagcgacgatcccgcgttgtggttacgcagaaccgtcgtatgaacagtacaaaacagtgtacaaacagtgattgaacagtgccgacgcggtaaaaaattcgatgtcatcgtggttccgcagtttcaagctgtgggactatcgcggtcccacgctttcgtcccgcgggaccatcggttttgtgttttggatctgcgggactgtcgcgattccgcgttttcgttccgtgggacggatatatttttatatgtatgtatataaatgtaaattattaagaataagtatatttgcaatttttttcccaatccctctcacctttcaagtgccagccacgccgtgctgaacgcgatgagcagcagctggggcaatcgcggtccgacgtgtcattgagggtgggaggcgaagcgaactaccccatgccgatgaggacaaattgtgggcttaaagaagacttttaaggctctgaaatgatagtcactttttatttttaataaacctggtttcaagagaatttttaggggaaactagttttacattccttattcagttagcatgcgttttgagaatttgtagtgtattggcaaatatttgggcggcatgttttgcacagctcgctgagctgcttccaaacgatatttttacagaggagtgattgttgggctctaggctgattcggtgaagtgattttcggagctagtaaaaagaagtggcttctgctgattaacctagtgaatcactttcagtcgcagaaacgctcctttcagaaaatcagaagcaggaggaggagctttacgtaccaaactcaaactgacccaaagtgtgtactggcagcagtggcggaggcagctgcccgggctccatgccatcgcaacacacattgctccacagcataaacatcatttactcattaattgcttacataattaccttgcttcctggttccaaggaaggttaattagatgactagcgagttgtaccacatcctaatcttgctttcctgatgtatagtagccccgtactctaactccttgacaataaacaaccaacatttcattgataaattgtaacttggcaacaatcaactttaagtctagataaacggtacaattttccatatatatatatagggcatgttcactttgatgcaaaaaaaaaccttaccaaattttggcattggcacagtgtcggatcccaaaactaaatattcggaaaccgacatgtttaactgtatcaagccctggatcagtagattgatacagcttcaacaatctggattttcattgcgtacatttgaacaaggctccaaaggagatgttattacataaattaataggggaatttacaagattgtggctaactattacagcagaagctatagagtgtctcaactctaatattttgctatagacttaaaccatctaactaatctagatttgaaaactaggttgaaataatgctaacttatatgattgaactcctggcttcggcaagaacttcaatttaactctggaaaaaggggtttgaagcaagggtgagtacaacgtactcaccaagctattatattcaataatgaatgtataaaaaggtaatatttgagtaggattacgattacttgcagaaggcagagaatatagaaatagaaagcctgatgttttaaatgtagcagcatttagtaaaatcttgaattaggtttctaaccaaagtaccatatgagtcccgatactcaattccgtgagcacggctattcgaatagattcaggtttactttactgcagtaaatgtacgctttacccgcaatccatgacatgccaatattcattagcttagtcatggcaaagcttttcggttactaacatcagtggcacctgttccatgaactctcatcctcatgcgctctgaacgtaacgttatcagcagcgagaggagttctggcgttcccgaggtttttagagagagaactggttgagagacccccgtcatctcaaccaggttttcacaatacacacacacttgagctcaacaaatcatttacctgcgcctcggtaaatgttatatttgcccttcgcggcataggtttgcctcctgcgcgaggacttaaataagaaccactgtacagaggtaccacctttgctagataacctactttgcaaggtctgtccccattctagaattgcggtcgtactcgttcgtttgacataagtagttggtaataactatatcgactgagacagtactagccacccggaaatcaaccaattcgtacgtactgtcccaatctaagttcattatatttttatgcaaactaactaggcagggctaagcaaagctagcatatctggtttgctatgttcaggttatgtattcaaaatcatgtatgactaatgcatagaatataagagatatagaatatagggcatttatgctcaaaggggaggaataataacttgccttgctccaacgcgaataaatccaaggtaggcaacctgattatctgatccttgaaataccacaagttgccatccaaaataaaataaactctactgaagaagaggaagagccaaattcaataaaatccataaaataacaagaaaacgataaacgactaaaagggctagggtttagggtataacctatctcctttataaggtataaggattactgggctaatatgtgtaggttctaaaagattggagactaaagtggataggagattaagcaacatttgtcgcttatatttcatctgtgggttttagttgcttggagagtaagggatataactggttaagtgagtatgtggctagtaatggtcgaagttgggctttggtagaagaatggctaggatttacttgttctcgagtcgatgctgaaataggatagcatatcggctcgtatttcatgtataggttatgagtagttggagggtaaatggttgggatgatattgtagctggcgtggagtctagatagcaagctgattgaggtaggataaatatcagttagggtttaggtgtttgctagtcgttgctagagttgggcagcatggcgactagacttagcatcttctctagccgatgtcaacagacagtataacggctagagggataggaggtttgtgtgggtttagtggggcggaagtgttactccgacaaccgtgagtggcggcggagcggctaggatcacacagagcccaagagctaactgtgcggcgtgctgtggaggtcgagggaatagtgaagctccgaccgctgtacgcatcaaggcgtggggtgccaggagcagcatttcgatcttgggtttgggttttgccaggctttacaaccaacggtccaacgtcggggtcgatagaccgcacgaacgtccccatgaaaggcgtaaagttccaaccggcggctttttagtggctaaaaggtattttgaaaataaacggaaatattcgaaaagcaaatataagtttaaattgtaaattcaattataagatcaaatatttatccaaatggtatttgaataaattaaggaaatttaaataaaatattaaaatagcaaatttggtaccaaaatgtagattttgaatttagatgaatttaggtccaagtttcactggaatcggatctacggtttaggagatatgggcttctaaagattgggttttgaattaaatctagaaaagacaaaaatacactgttcatgggcccacctgtcagcctttctttttctttttcttttccttcttcttcctcccgtcatctccttctctcttctcttctggccgagtaacagggaggaggggtgctggggctccggtggccggggatcgacgaagtcggcggccacgcgtgttcccgcgcaacgcgcatccgaggatggtggtggccagtagagggagttagggaggaggccggaacggcgacaacaagagctctcttcggccggcaaaggaagtggttgtggtggttgctatggggtgggggagaaggggaaaatgggaaaaatgggttcgccggaggtagggggagtcagtggtgcaaggatttggctaggggaactatagaggaggagatcgaccgatggcggcgtcggccggacttgacaggagagagagaggaagagcttcaattcaagctctgataatgtgaggaggggaggacgatctcgccggctatttaaaggcggtggatgtcggttgcttatggcggtttcagaggagaaggcgagaggagacacggctgcggcggcacagaaacaggagcacggcgtcgactctatccgctgattggccatcgaaggcggttcggctcggcggttgatgtcagcggcgtgaggtggcggctgacgtcggcggcagttgcttagcggcgaaggaaagacggcggagttggagggtaaggcacggcgacggtggcggcgcgacttggcggcgacggcaaggaagcggcgacggcgtgtgcgtgtgcgcgtctgcagaaggaggaagggcggctcggctgtggtggctgggccggcttgggctggaggagggaaagggtttcggcccagtctagaaagaaagaaagtctaattttcctagagattcaaataattgatttagaggaatttggatggctagattttaaaaaggatttgaattcggagagggattttaaaataaggatgttctaatttatttgagtgcaatcttttgagagatagaatataacggaatttatttgatgcactcgattgagagggaagggaaataaataggatgttagcctcaaattatttggcaagaatttggagaagtatttgaggctaatgggaaacttggatatttggcgataaataagaataggtctgaaatcaaaggatgggtcgacaattaattccaatgaaattggaattgctttggtttaggttcaaaggtattgttggaggatttcttggaccacaattcataaaagtaaaaaggatttttagactaaatttgaataaaggaaattttggtcaaaagaaggtttaagatgcaaaatcaaatcaaagagaatacctcgatttaacaagatcaatttttagaataaaaaccacgaaaaattttaaatactagacagggattttatgcatgttagttttaggaggtccctctaattataatttcttaagtttaggaagttattaagaatagaagaatcggcatgatacatatttagaaaatagcaaatttttagtatgttacacatagttgccaaaaatttggcaacttactaaaattttgacaggatttcttaaatagttaccaaaatttggcagcaaactaaatgtagccacttttttgacaactttaccaaaatttggtaaggttgaaaatgacaacaaagtgaacaggcccatagtttttatctcttgctaggcttgcccagcctcaagaaaatcgattttgctaaacatcacacgggtgattttttcgttgatatttgacagatttttgcccctacaattatgcgtcgagatcagtacacgattctgcgtcgatgttgtcgtgaggtggagaggagacctcgtgggttacacgtttgccgctgatcacgattcacaagaaatttacatcctagctacgtgtaaatatcctatataactaaaataaaatataaaattacagtcctatttaactaaaattacatatgtaaattcagttgatattaattacaatcctatttaactaaatctacatttgtaaattcagttgatttgacatgtaagtgcactgtaattttgataaaaataatgtgtaagtaaatatgtacttattattttctttaaaatataaaattacaatcctatataactaaaattacatttgtaaatttagttgatttgacatgtaagtgcactttaattttgataaaaataatgtgtaagtaaatatgtacttattattttctttaaaatataaaattacagtcttatataactaaaattacatatgtaaatttagttgatatgacatgtaagtgcactgtaattttgataaaaatattattaaaaatattgtgtaagtaaatttgcattagttattttatttcaaatataaaattacagtcctatataactaaaattacatatgaaaatttagttgatatgacatataagtgcactgtaattttgataaaaatgttgtgtaagtaaatttttattagttattttattttgtaatccgttggatgcaaatccaagggaagaaaaaatctgggtgattttttctcaaaaatcacccgagcgatgcataggcggtcccaaaaaaatttatggctccgccaataactggcagcaaagcggcatgaatttctcacaacgggccacaatattgttgcgggccggaccacaacccatcgtaacaaatgccttcctaactaacaagcttggcccaacctttctcgcttttcctttgtcgtcggtactaggaataagttcaccggagatccctcaacttaagagcgagattattttagtgccttaaccacaaaaccagaaatatatacccctaaacttacacaaaccgtacactcaaggtcctataacagcatacgtgggtggttttgctgacgtggcatcctagtcagaaaaaaaataaaaaaagtacgtggagcccacatgtaagattcacatatattttcttctcttttctcctcctcctcttcccttttcttcttatcctcttcacttttctcttcaccagcggagcggcggtgggcagagcatcgatgggcaagcacgacagcggagcggcgggtgtgcacggagccacggcccataggtcacgagaggttcggctgtcggcggtgccggcccgcgacacaagagaaggggagggcgtcggcgtcggtaggagagctaggcgcggggggagggggagagggggtgggttggggagtcagcaagccgcgggcggcggaggcggaggcgccattgccacggaggtagcatcgtcagcgactggcgtctgatgatgagttgatggcgtacatgaagtattaaatataggctaaaaaataactaattgcacagattgtgactaatttgtgagacgaatcttttaaacctaattgctcaatgatttgacaatatggcgctatattaaatatttggtaatgacggattaattagacttaataaatttgtttcgttgtttactaacggaatctgtaattagttgttttattagtgttcgaagaccccatacaataccttatataatatgctatgtaaaacgctgaaactttacccggctgtatgtaatcaccccctgaacgagaactcatgttctaatatcgagacgcggtcttgaccgtgtctccgtctacagtgtggtgcaggtgaacagttgaacagtgcctgtagtgtgtatgcacaatgatttgtcgttagcagcgcattcaattcattaaatttattactcctaccaatccgtcctacactccacagcggcggctcttttctctcgccatctaagaaacttcctcatccagagttgactgagtccacggtaagacaaggcttcattcggtacagcttattattgcccagtgtttctcgaagcacgcaaaagaacgtatatatattactacctccgtcccaaaataagtgcagctatagatattcgagtccagcgttttgatcgtctatcatatttaaaaattttatgaaaaaaattaaaaatattagtcacacataaaatactattcatctattatcatctaataacaataaaattactaatcataattatttttcaaataagacgaacggacaaacgttgagcatgaacagtgttaaaactacacttattttgagattgagggagtagcatattactccatccttccaaaaatctgagacctatttattttttatcaaaatcaagaagcaataaactcactcactatgtgacaaaaccaataagcatgcaaccaataagtattagaatgatttcttgtttttcgatcaacaatttaatttagcacatggtgactatcaataagactcagatttttggagaaacaaggaatgaaataggtctcaaatttttggaaggagagagtattaattaagtattactctctccattccaaattgatctacatatttcatagatacacaaagaccaagaaaagctaataactctctcatattatatttactctagcaacaaactcaatgcatgcaccatccccactatttcctagccaatagcaaatcaagatattgcatgtgggttataaatacatgtgtacatggatacatgcatcaatgtccatttactccaatatacaaataacgaatagatataataaatgaacacaaatatggagatcatttaggaacaacctcaaaaaaactatatgtagatcaatttggaatggatggagtaactaatactccctccacctacttttgataggcatatttccaaatctgaaaaaattatttttgataggcatatttcaatctaataacctatcatcttaatgaccttctcgcatttaatgtgtgactctccattcttccatacaagattggctacataggtatcgagaaatgcaaatattaatgaatcgcttgtttacgaggaatgactagtagcatgtttaaataactgataagtagaattacttatccttagtctatgtgtcaagatgaaatatgactattaaaagtagatggagagagtattataaattttaaaatagatttattttagctttataaagaaactcctataaaaaaagtgcttttaataaaaaaaggagatagtaggagtaccatttaacaggtagataaggttgtgttcgctggagcatgttcccaactgaaacagtgcacacggtaaacggaacggcctattagcacgtgattaattaagtattagctattattttttgaaaaatgaatcaatatgatttttaagcaacttttgtgtagaaactttttgcaaaaaaacatcgtttagcagtttgaaaagcatgtgcgcggaaaacgagaaagataagttgggaaacttgggataagaacgcagcctaaggtggtgtttagatccagggactaaattttagtccctgtcacatcgaatgtttggacattaattagaactattaaacatagactaataataaaactaattggataaatgagagctaattcgcaaaacaaatcttttaagcatgattaatctataattagcacatgtttattgtagcatcacataggctaatcatggattaattaggctcaatatattcgtctcacgaattagtccagggctatagaatgggttttgtcattagtcaacgtttaatacttctaattagtgtcaaacatccgatgtgatagggactaaaatttagtcgctggatccaaacaggcctaaggctgtgttcgcgggaggatgttcccaaccagccattagcacacggaaaacggaacggtccattagcgcgtgattaattaagtattagctatttttttcaaaaatagattaatatgatttttttaagcaactttcgtatagaaactttttaaaaaaacacaccgtttagcagtttgaaaagcgtgcgcacggaaaacgagggagatgagttgggaaacttcgggcaagagcacaccctaagagcaggtacaacagcaggctataggccagctataaacatattttaaagagataaaggaagagagagaagagcagcgggttacagatttgtagccagctgcagcacagactccaagacgtaatgtatgtatgataggtgggaccatgtattaataatatagtaagcaactattatatgaattgactattacattggctatagatgatttggagctagtagtgggttatactattaaacttgctctaaggttgtgttctttccttcaagttcccaacccttctcctcgtttttcgcgcgcacgtttctcaaactgcttaacggtgatttttttgcaaaaagtttctatacgaaagttgcttaaaaaaatcaaattaatccattttttttaaaaaaaatagctaatatttaattaatcatgcaataatgcgtgctccgttttacatgccggaggaggggttcagcttaagtatagttacggaaaacgagtatcgaccactagctgctttcgtttacattctgaaagagagtgaagactggttacgccccacgtggatgattccattccagtcgcgctcgcgccagacggtcgatgcgcgcaaagtcagggtcagctcttcaatttgagtaccaactatagataattaaatactccttatatctgaagtattattgtatcctcaaatctgaaggttcctttgctacactacagatatcgatcgaagaaaactagtccataggtagataaatattgtatcgttgaatctctcaaggtcgtttcctttgctttgctagctagctgcagaagaaaggaaaagctatagctattagagagagaggagggatcagaagaagctgctagctgctagctcgctgccggccggccggccggagaagtacctctaatatatataagtccgtcgatcgtgtcagccatcgccggcgccggcgttgatcaggaccatcaccatgcatccaccatactgaaatctctgtggaataatcctatatatcgcccaaggtatgttactactcccttaattcccttcgtgttcttttgtttcgaactaagtagcatcatatatttagaggaggagtggtatgctttagctatatggacttcaaaattaaccatagctgatgtacttgttcttctgcacaaaattaattaacctaacctcgtgaaattgcctagtaagcacaaaccaagatgatttagcaatctccattccatatgagcacacgcatgacatgagagagcaaattaagtcagcgcaaacgccgtagtgcgctgctatgctgaatagcaattaaggttccagcttgcactggttctggatcaaggccaattcttcattaggctactaactaaggggatttaatttctgggtccgaatttagcaagatttgttatattggattatccgagcagcaattgatcgagcttctttctgcgagtttgttaatactagattaatctgatgttttctttgattaccttcggggaattaatttgtgagtctatatcatggtaattaatttatttaactttttttttgaaacttaaacaactttattaacaaagacagagttaaggggatacaccctagtacatccacagatggatacaaaggtagcagaaacaccatctttaacgagatagagactaaccaatctaaggaaacaaacttccagatgcgactaaacagcagaagaggaccagatcgacggagctttgcggcactgccgcgacgactgaatccttgggcctccattggtgtgcacaccgtttgacagaccgaaaggctcctacgcctgccaccgcggtaacggcacaaatcggaggtttgatactgagccgtagattttggtgtatgcatcaccggactcagcaaagtggttccacggagtccactgttaaatctgaggagcaaaaattgctcaacccgaacggtagacccagcatggatactgctattttcgaacaaaaggaaatttgattctaaagaacagctagccaatatcacaaagttaaacagatggttgtgatggagcttctgtctttctaggtggccaaagattgctgagatagagagccactgagtcagatccgacaaaagcaaaagtaatgaacctttaatgttcaccgccggcgtcggcaacaaggcatccgccatctggaggtgttcaaggccatcggctgagagtagcaaggagggcaacagcttcgttcttgacttaattaggtcatttttttgcaaacacgcaaaagacttatgcattgatataatattagaaggaagcaaatagttacacgcgcaaaaggctttgcttcaactggtacaggtgttttcatcaaccttatctcttttttcttcatgacgtgtatgcttaacgactttaatatgtatagctctgatgctgcatttacatagaatcggttacatcaattagctcacacttctgcaacacaatattagccctccattgctaccaagtactgtgcttgcatgcttgaaatggagagtgctaaaaatatgaggttttctcatatgttttgtgcacaggaatacaaacatgtgtgcttttatatcacaaatttgctctatatacctgtgaaatttgctatattgtttctattaaaacaagtttagaagaannnnnnnnnnnnnnnnnnnnnnnnnnnnnnnnnnngataatagacnctcaagggccg

SEQ ID NO: 7575 - DNA, 18406 bp, Oryza sativa
ccggcgccctcgatgcaccagacgcggccgcggaccacgatgtgggcggcggagggggggcgttcggatgcggtcgaggcgacgccacgcgtacatcgctaggtcgaaccactcggcatcgcgctcgatccatcgctgggcagaacggacaacgacgacaccgagacaccgtcgccacggtcccggttccttctcgccatcgagcttgccgcctacgccaacggccgtggccacgtccccgtcgcctccttgactcgttccactcctcgtgggtgcgcttccgtgtcgcctacatcaccccactgctccagctcctcgtcgacgcctgcgtcgtgctcctcctcgtccagagcgccgaccgcctcgtccagtgcctcggctgcctctacatccatctcaaccggacgggcgaggcgagcgcggcggggacggccagctcgggcacgtgctcgggtggccaccttcctcccgcctccaacgcggagctcgccccgcctccaacgccggccgcccaacttctctccgcctcctcctccaccggcgcggatctcgcctccccagctgctgttgcggctgccgccttcctcctgccgcagcctcccgcgacaccgctggtcacccgagctcgcctccaccaccgctgcccgccgcccaagctatgcctccgctggcggccatctgagcgagcggcctccgcctaagacgacgacgacaacgcctaagagcgggcggccgagtaagagagaaagcagagggattggggaggggagatggatgacatgtgggtctaggtgtttttttaatgttatttgcttacaggattgccacgttggagctacgtgtgcaagttcaagtcgaaaacagctcaaaatagtgcttggggggggggttatttgttcggtttgcaaagttgggggtgaaggatgtccagatttttggttcaacggggtaattcggtcgaccgcgatagttcgggggagggtaattcgtactttttccttttaagattaacattggtgtcagctgagtaatcagtgccgcattcattgtgctggttgggaaaaccggtacctaagccggttttccaactggcacctatctgtggttctgtagtagtgtaagtaagaagaaaaaggaacagtgtttggaacacttccagctctatctagcttgcgtgctaccaagtatcattggttatcgcgtcatgctacttatgatacctatcatgctactatcgagtatcagctgatactgttaagtataatgctgtgatacgtattaggtatcatgggactactaagtatcacatgatactgataaagtgatactaataagtatcattagtaatcacctgatactagtaaaacaatactagctagtactccctccgtcctaaaaaaaaacacaaaccctgggtttctgtgtctaacatttgactgtccgtattataagaattttttttataatttctatttttattgttgttagatgataaacatgattaatactttatacgtgacttgtctttttaattttttttcataatgtttttaaataagacgaacggtcaaacgttggacacggaaacccagggttttttttggacggagagagtaagtatcattagtaatcacctgatactagccacgtaagccacgcgttgcgtggctcttaaagacccgtttgaaaatgtgtatatatggctcaggccaacggtgccctactattgatatctcgttgatgggcaaataaatagtgacactatagctggtaggtttacagatatcaatcagcagttttttctaaaatccaatggcactgtaaattgaaaaatcaacatacaaacagcttcggtaacacattctgaaagtaacagaagcataaaggaagtagtattatattaattagttcgcttcataatataagatgcaacttaagtatgaggaatcagtcaaaggataacgttgattacaactttaactaataatctgcaatcatatattttctcagcgatctaaagtggtaagtaaaaccatccttattttcattcgtcatttgatcagcctcaagtgatgtgcacttgaatatttagtatttagcagcataaattcagatatcattttagcccttggaaaagcatatatgtaaactgctgaaaccctgtctatgaacaaaactatttttactgtaatcataaatgaatacagtaattcactctccatggacaaattcagcatgatcataaatgaacatagtagcttagcttatttttatggaagaacatcaatcaattgttgcagaaaatagttgagcttcaactccttaaaatagtatagcatgtaggacacagcaacaaaatctagcatttaccgagagaagtgtaatcctaagttttcatgctgttggtggcatgttacggttagggaaatacacccaggatcatttgtgcaaacatcaattgatgctagcgacccaatccctccaaagatattgctgggatattttggtgtgcttgcttgtaatttatgaaattgatattcagaattaattgaaaattttatatacacttcaatgcatcatctattgtgagctgagaagttaatttgagcaacatatattggtcaattttaatttatctctagttaaagtctattagttacatccagcaaacagaaatttctaattaaattgaaagccattggctttaatcttatttggcttaaagggtaaccttccctggtttctgttcaagcaatttatcaagcacgaaacgtgcaaaaactatatatcaagatgggacaactaaccaaatgtttgcatactggctttggccatcttcacacaccgtactttaacactgactcgcaacgaattacctcagattctagcatgctattccagctggtacacaagctttactgggttctagcctccaatgctgcccatgtagcatcttgaagggcgatggccaaccacgcctcaagcccgtcgtcacacgcatgtcgccaagaaggagagcaagggcaacgcatgatgtggagggggaagccgatgcctttggcttggaggtgggggtcgacttcgatggctatctccgatctgccatcgtggatctgattttacagcaccaaactcgcctagaggcagcggcaatagctgggaggaggcatggctaaggcgctcgagctcactggtgaggtggtgcaggatccagtgcgcctattctgggacgcggtcgaaactggtgatccacttcatggtggcggtggggaggttggcgggctggcggcggcagtgtggccgtgtgcgatgaagagacaaggaggggaacattctctcctttttttttggttacctagggacgtggaaggatgtatttgaaaaagagctttctcgaaggatccagaagagattttgcaaatagagagatctgacggatgataatgtccggaggatatatcgaacggtccttgatttctcgatgatgtggcccaatcagattgcaagaaactttagttctttcaatactttagattggtgaagtgatactaccaagtatcaccggatattagtaaagtaatactactaataagtatcactatattagtaatcaactggtaccgatactactaagtatcatctgatactattgttccattttgatctaacctaaccgtttctctggagaggccaaagcagcaaagcagccatcaacggaagaacgaggtgttgctccacttcttgcttcgtcatcggcttcttcactcgttgcatgtttgcgccatcgattatcccgtgcggtccacagcccggcgctgggattgcctggtttcagatagagccacttatggcccgcctggaacctaaaggggcttgcgtctaggaaaatcacatgtgtagtagtgtcgttgccatcaactagtaggtcaacctcttacaggtcacggcggtggcagcaacggtggccgttggcaatggtaccatgcacttggactgtgaggagagcgagcagtgccaaaggttgatagtggtacaacacgtggtcagatcaggcttgcgttggttattagtcttatctgatggaaaataagaaaataacgttcctagatttaaaacgatctctatgatgtggacaagattggagattttgacgactagtatactttcattcacaaaaggacataacatgtgtgcatcatgaggaaaagtatgttggactctggtacacgaaatttgaattcttcttgagcagtccattcattggctgggctagcattgatcagggaccattagaaaaagtcttgtcaccagtaatctcgccgtcccaaaactcatcaactgttttatatggaccggttttgtggacgaagatgtcaagagttcccctccactctgggagggtgcttatcttgtgacgatcatcattggtgagctcccaatcaaagatgcctagattctctcttaacctgctcttgttgaagctcttgacgattacacaatctccttgctcatacacccacctcaagcatacctacacttccagtttgtactttcagttctaaatagtttcatatctagttaataaacatgatatgcacgataagattcactaaacaatgcaacataggtatatatagtattcaccagaacaattattaccataagtttcatgtatcatcttatcggccattaaacaaaccacttttgccttttgtttttcctgctacggtctctaaatataattgcatagctggaagcttaatttatcatagcacatataaaaaattgacatatattgcagtgttctgtttacctgggcaatagttttacccctctccatggcaatctgtttgagaagaggacaatccatgacagcattgttgctccatggtgtaccctttccacctaaaggagagtaggcacagagctgaattcctttctccttgcagaactccctcaatttattttgccgacagtaggggtgcacctcaacctgcaagtgttcatgtaatcccgtgaacaatattaataaattaatcaatgtacatgttgaaatgttttggacaaagagaatagagaaaaaaatgtatatgtacaactataatataaacagtaccaagtagtactaagaaaatgttgtctccatactcataactaaaataccatttttcctttttcctcgcaaaaaaaaaactaaaataccatttccctttttcttcttacaacccctcttaatcttttatgtccttgtctctctcatctgtgcatggccatgacgagtaactacttaaaaaaatactacctccatattttaatgtatgaagccgttgactttttatccaacgtttaactattcgttttattaaaaaaattatgtaattattatttattttattgtgacttgattcatcatcaaatgttctttaagcatgacataaatattttcatatttgcacaaaatttttgaataaaacgaatgatcaaacgttagtcaaaaagtcaacggcgtcatacattaaaatatggagggagtatttgttaagatgatccataagtgatttacgtgggcatttttccaacttgcctgcaaccaagctagggcctatagaaatcatggatttgtgtaggcaaattccaacccgtgcagaaatcaattttcacggtgtggctctctcaaggacccacccatgaaaataaaattccagtttaatttttatagacataaaaaacccacaaaaatgactaaacttcaaaatgttatagaaaaatcactttatgtccgattgaggtgaaccacggttctccatgatccttgtaatatttttcttcatatggttgggtccatatttacttaaaatatttattttaatatggttgctcactgccgtggtctttatatgagttgatatatatgttatgcatcttgacattaatgaatgatcagacacaaaaaagtattccatgaaagtattaatattgtcatattacagaaaacactaatagaatatcgtataactttggtttacctcaatcaggtttaaaataaatatctagaattgtttttaagtttggactttctaaccctcgtaaaaaggaaaaagttcatataaccccctaaacgttgaataaaaatccatataacaccctaaactttacagtcggacatcatccaccccgaactttgcaatacaattcatgttacccctaaattagtttcagacagtggttttgcatattttaaagtttaaacgagcgatttaaaaaaactcgtataacatacttacatacctcaatcatcggtcttaaattatagtatatagtaacatcatattagtattatattggtattcatttattcaagtggagatttaacatatatgtccaaggcatatgtcacatattcaaaatcatccatcgaatatgcaaattatgtagtaatcattttgtaaaaccaccatatgggttacatgaatagtattgtaaagtttaagggttggatatccggttttaaagttcaaggtgctagatggaatttcatctaaagtttagggggtatatggactttttccttgtaaaaatagatatcaaagcttgtaatgaatattaggcacctaaacgatctcatatataaaaactttcaactataaagttgtagatctcattgggatctacaatttcctggtagaacatttctccatccgaagtcatttgaaaactaaaacaaacaatttctaaaatatatctgagaatgaaaaatgaatatttgaacacacctcaacaatctgaaataaacgaactttcaactgcaaagttgttgatttcgtcaaggtctacaattctcatatagagtttgccatcatctaacttcatttgaaagagttacttttttttcatatttgaaattataaatgatctcaaataaaaagactatcaacacaaaagttgtacatctcattgagagatacaattttcatattaagtttgtcgtcatccgactttatatgtagttgcaatttttttttcatattttagtggtattcccatattttatgatggttttcttacttacaaccatccgctaaatatcgatttttaaagactgatttcacaggtatctgaatgtaaaaatagacttaccttcatagctagatggatttcttagatacccgtctgtaaaaagtaggttttcgtaggtgatttatgacctgagacagtgtcaattatttttgcaggtgtattttttcttggctgccggagaaaaaaaatgatatcttcctagaaacgtttcttagtactgagacatatatgcaacggaggtgagagggcgaggcttgattggacattatggctgagtttgacagttacgtgggctctagctgatcgtgaagcttgaccggaatcgccgatgtggacacttttttttttcattttttaatattgttatcccactaaataatgctaatgggtttttctctagttgatggtatatatatagatgcaattccaaaagagtcaagattattataatgtataggaatgtttggaacttttacttgatttgctgcaggagagatggttgcgaaggagagcaatgtctcgagcttcttgcaactgaagttgctaacaccaatagccttggtgagtcctagcctttggcactcctccatctccttccacactccctccatgtccatcatcacaaggtcatccttggaatatgtcattgactccggatcttcagccaacctcatgctcaccggaaagtgaatcaggtacagatcgagatactccatctgcatcttcctacaatattcgtacaaatcaaatcaaccacacaagccaaatgcttgatcatatatgcaccctctattttttttaatgttggttagttaaaaaagaaagacaacaatgatggtgatggttccgccatcctaccaccaccgccggttttgctaattggcgcagatgccgagatggtcaccggggcatgcacgcaagtgctgatttatcggtagctaattggcctaatccaattaggatggtgcgattagcgccagcctccaataatgataacggttagtatttcctttttccttttttgcgggactttccttttttaccggagatgtttactttggttagttgtagataataaccataattaattttttttatatttaatgatcttcttttactaatagattaaaaagaaaactatacgtaaagttaacttttgaaaactttttcaatccagatttaaaaacttaaaactttcaactctaatttaaattttttaagtcaaattttaaaaactttcaacttgtagtctcaaatttgaaaaattttcaactcaaatttgagacttttaacgcagatttgaaaactttcaacttaaaaattgaaactttcaacccagatttaaaaactttcaactcaagatttaaatttttttatattgaaaaatttttaagttaagatttgaaaacttttgaccaaaaaattttttggtaacacgtgtgctaccgattaaaaattcgaaaaaaaaacatgaaaaaaaagaaggaaaacacgtgaggggagaggaagcgaaaaaaagaaaaacgaaaaagatggaaaaaagaaaaacgaaaaaagatactagtgcccatgcaccagttagcatcctggccaccaccgccgctgtcatgtgaaaccactcacccatttccatgcctccctcccacaacctgctgctagtaggctagtttctagcctatttcatttttattttttactatttgtcttttcgtatttctaggcggctagctattagaatttcttgacgggtctcagattatactacatggatcaaatataatattctagctaggtatatagaaaatttatatcgactggttagagtagctacgcagctggacatgaagaatgacacgaataattaatgatcccggtgcaacgcatgagcatatatagctagtccaacaaaataagttgcagttatactcaccggagcgcacgcctaagagatggcaggacatggccggggtgcgcgtgggcaacccatagcttggacgtgatgtagagctcgtcccgcgacgcgacgaggccggcgcgcaccgcctccgccacggcgtcgccgaggatggcctccgtctggtacacggccgccgtgtcgaagtgccggtagccggcctcgatggcgcgcaggacgacatccttcaccgtcgacgggtcggtcgcgccgagcgggaacgaagccgtgcccatgccgacccgcggcatcggcttgccggagctcagagccgcctccggcatcatccccctcacatggtcatgggatcgaaccgatcgagagaaattgaagataaggctcgacagccaattaatctggccatatattggtacgcgaggcctcatatcagcgactcaccgtgtgacagctacagcccgaacgacccaagttcttcatatttttttttgggaaaaggaaaagagaatatttgggtgctttttgtcgacggcactcgctagttgcaacactatctccgttatttaatagataatacagttagtttatttttaaatttctaatatttattcatttaaagtaaaacgagtatcaaaagttctacacgaagcaaacataatatatttttctatttgcacaggacttttgagaaatgatgaatagtcaaacatattaataaaataactacatcatatctattatatactaaaagtccattaaacatcctataaacactattaagccgccacatagaactcccacaatcgctcgtacatcgccacgtggcatttaatcatctagccatcgattttcactaatatacggtgggcccattattttataccattagatttatttatctaaatagaaagggataaaaaaagtggccctcatatcctacccctcccgtccagtacatatgcttgtgtacgtgcgtatgtgcctcccccatatattttatttctcttctatcttcctcttttagttagatggaaaaaacattttatgatttatccaaatacaatgataaaaaaaaggggcccgtataccttccccgcctatccagtatgcacttgtcttttctctcctattttcctcttttagttatatggaaaaaaatatcacctcccccacatatttcttctctcctatttccttcttttagttacatggaaaaaatattttataataacaaattttaaacaattatattatctaaatcatataaataatttttatttgtgctcactattagattattttctgtaaaatttaaaattgaatatccaaattaactatattaattattaaagaaattcaatacttttagtcatatatattctacgaattatagctattgttcattgatccatacattttttaaaaaaatataatatattttaaacgttctgattaataatatgggtgggcaagtttgaccgcaagaaaactaaccagttgaactacgctcacttcataatgttggatataaagacaaccataatttttaagctacatttttaaaatactcctatgccttttaaaccggtagaagcattatttctaaccgttagatctatcttatatagaaaaagtgtttattcatggtacatgacatttcaaaaatattactgtgcaatgataatacttcgtcgttatcgtgttatttctaggttgcgtggagtctctcatctactctacataaaatgttcatagatagatcgcttcttaaaataacccatgtatttagtggagcttcatttcccacccaacatcctttaacatattatgataatatattatacatcaaaagaaagaaaaacaccttacgttttattttacacttactttactttcgttgacatgttttctaagaaaataaatctacattcttttgaaatgattaagaagattataaataattgcttataaatattacttatatatgatataatataaaactgataggttaaaatattattaaacaattaattaacgctaacaaaaataatttatggagaaatcgtggcggatgttctccggttaatatattgcttttataaatacgtcaaaccactactggtgaaagggttttcactcacggttcgtaaccccatatagtcccgattatacaactaggaccacgaatctatctctagtcttgggtaaaataaccagaactaaaaattatctttagtcccggttcctattcaaaccgggactaatgtggtttttgcaccacctagcaaagatcacttctccagtagttaacatagcgtatgacgtacgcccgcgcgaatgcacgggctacctttctagttttataacatttaaaaggaggtatagtccaacacatatttttcatttgctgatatatacatcacatgtactgctagtgtgagagtactccatccggttagaataacatcacacgctgctacttctaatattacgcaatttataactgtgagcaggcagatcaagcaacgcatatattagattacttaaacccgtgggatctttggaaggttagggacgccacgtcatcggttttttcaaaaacaccactcacctctgattaatcacgttttgggttaatcacgttttggaaagtaagtgtgccacgtcattgtatttttttgcaaaaaaacgcctgcacttcctgttaattgtgcgttggttcctgccgctatggtccgttcgatcacgcgcgagggactagcgtgtcccagcgtggctgctcttccaccatcgtgagatcgttggatcagaaacggacggcctagatttggcaagaaccctagccacctcgcgctcgcctctcttctcgctcgtgctgccccaccctcctccctcgtgcgggtcgccgcctcgttatattataaaccaataggtatatagttaatttaggctgtgttcttcccccaattttcccaactcatctctcttgtttaccgcgcgcatgcttttcaaactgttaaacggtgtgttttttgaaaaaaaattctatacgaaggttgctttaaaaaatcatattaatctattttttcttttaaaaaatagctgatacttaattaatcatgcaataacacagctagttttatttttaaacttgtaatatttattcatttaaaataaaacgagtatcaaaagttctacgggaagcaaacataataggtttgtctatttgcacagaactttcgagcaaggacgaatagtcaaacgtactaaaaaataactgcatcatattctaataacatttaaaaggcggtatagtacaacacatacttttcatttgctgatatatacatcagatgtacagctagtgtgagagttactccatccggttagaatgacatgacacgctgctacttctaatattatgcaattttataactgtgagcaggcaaccaacgagatcaagcaacacagattttatttgaaactagcaggtatagagttaatttacgctgtgttattccctagtttttccaactcatctctcccttttttcggcgcacgcttttcaaaccgctaatcggtgtgttttttgtaaaaaaaaattctatatgaaagttgttttaaaaaatcatattaatccttaatgaaacatgcaataatacatgcttcattttgcgtgccagggatgaagggttcccaacccctcctcctgaacgcatcctaaccttgcatcagaaataggtgtggaaaaaaaaaacctcgggctcgtgagctcagcttgggcttggctcgagctcggctcggctcgaatgaaaaacaagccaagcccaagcctcctttttagctatttgttgaaatgagtcaagcccgagttggctcgcgagccgcttgtttgggaatgatatatgtcaatgatttacccctgcttttcctaatgattactaattatatataaagagatgtttcaatgggaaggctcgcaagctagctcaatctggcttgagccaggaaacgagcagagtcgagctcatgttttagctcgtttccttatccaagctgagccaagcaagcctagtttgttgtgagccattacaatctgagacgagtcaggcttgactaggctcgtttccacccctaatcaaaatctatttatcttctattatataataaaaatccattaaatttccttaaaacgctctcaggttgacacatggcactctaaaaatgttctcaagctaccacgtggcgctagaaaatcctaaaattctagaaaaaaacaaaaatatccatccctgattttcacttaaatatatgggtccaatattatacaccgttagatttatcagaaaatactacgttactgtcctctccccgcaccgcaggcgctaaaattccattaaacttccttaaaacgctctcaggcggacacatggtactctaaaaacgtttccaagctgccacgtgacgccagaaaatcataaaattataagaaaaaaatatccatccctgattttcacttaattatatgggtccagtactatacaccgttagatttatcacgaaatacaacgttaccggccgtcctctccccgctggcgcgtgcgtacatgcgccatcctccctcctcttttttctcaacggtagttaattaagatcaaaagtattagtatcgtgttaactaattttaaatagtattggatttatatctccatagggcatagaccaccagggcacatagccgtatctcccagccgcaagtgtactaatagatgtacatgtatgtatatacgtgtatgtgtgatcatttacaagaaaagagcacgtggctctctcccattggctctatcatgtccgggcgtccggttaattcaaatgcaggtacatataataaaaacttactatctacaccttccatcccaaaaaccaaattcatagtgaggatttgacataaccaagctaaaaaagaatagtacaaatctaccaaacaaatcaactaaggatgcttatccaaaccaacatcaatttgggtcgggctgtttatacaagccagtctatacacaacaaacagggatcaaatacaccctaattaaatctacttcctccgtttcatattataagacttttaaaccgtttcatattataagactttcaaacattgacaacattcatatagatatatatttatagattcactaacatctatataaatatgggtaatgctagaaagtcttataatataaaacggatggagtacatagtatcactgttagtgatgtatgaatattggttcatgttacaaaccttcaacgatgtaccattgcctgttcttaacatgtaccagaggtgatcttctcaacacataattggttggaccagcataatattgatcaagaacaattaaggtttttagttgtcaccagtgatctcaccatccccttgactccggattcatggacgaaaaaatcaaggcatccccttgactccgggagggtgcttatcttgtggtggtcaacatcagtgagctcccaatcaaagatacctagattctctcgcaacctcctctcattgaagctcttcacgattatgcagtcaccttgctcatacactcatacacccatcttaggcatacctgcactacaattgcaaaatgtttcatatatatacatgttagaattcatttcaaaattacctacacacacatagtttcactttttcatacatataggaagtgataaactcctagcctctacatcgaccaaggttgtacaaagccaaaaaaagcatgacaaaaaaaggcatggtgttcactataatagatatattggcattatcattttgtcaaatacaaatataacaacaatttctatttgccatgggtctttttcttcttatgatatctaaatttaatcagttcatccaaagcttatcttgttgtagctgatccaaaactgagatgacatagtatagtattgtgtttacctgggcaactgttttgcccctttctaaagcaatctgtttaagtgggcagtccatgacattgctacaccatgaagtgccatttgcacctaatggagagtaggcgcacatttggattcctttccctttgcagaactccctcaacttattttgccggcaataaggatgcacctcaacctgtaaccgttcgctgatcacaataagtgattgtattaagtattaattaattatttcttctgagaaaaaagtcttgacaaggataacatgtaggtcagtatttataattttaactagttaacgatatatatatatatatatatatatatatatgtatgtatgtatgtatgtatatatatgcagtgtcacataaatggtgccattgaattggagatgtttaaaatattaaattctgtacaaggtaatgttatggagtgaatgaagttgattaaaaaatgaaattcaatcttggagaccatatcaaagagctaatatgccttacttttctcaatcaaaagattaatatgtacatatgtgtggaacaaaaattgatactgctggtgagcccacttttgttttaggaaaaataaaaatgaagaggggcagtgatgccgttttctatatttttttctctcctagttaactcgatatattattttaataggagaagtgtccattagcaaataaccaaagttttagagtatcttttagcatagccacatttttacggtatctcttggcaaataccataaattttggatgtttagtagcaaattttgccaagattatattgttttgtacaaattacctgatttgctgtaggagggatgattgcaaatgatagtaagggtatcaagcttcttgcaggtgaagttgggtaatttggaaccatgccattataattttacaaagtttgagatatgccatcggtatctcaatgacatgtaggacccacatgagtcaatgacatgtgggtcaggatggtatatctcaaattttacaaaattataatggcatggttccaattttccctagaataataaatgggctaggcccgatttattctattaaatctcaaaggcccataataaatgttaaggataataataccaccttgggaattaaatgaggagtatctcaacttaaatagggagttattggaggctccctattgactggttgaggtgaggatcggaaagccacacgcgcgcgcgcgagccgggcgggcgtgggggcgaggcgtgcggtgcgcctacgcctgtctctatcctttttgcaatggaccatcccgagattgcctccgtaatgagattgccttcgtaacgggcaggcgagtcaattccaattgatcgcgtcgttactgcggcaaagggcggatatcgctcctacgctacaaggaaagatctaatccgatcagatgcggctactcactttccatctgttgttcttcctcctcctcctcgtgcacgcctgagctgctactgttctgcttccccgcttctgatcgcttgtgcgcacgagaaatcggaacaagcagggcctccggaaccataccttcgcctgagatctgcaccgggtaggcaggtgatcaggtttttggggagtgcttctgcacgattgctcctcttcatcgtcgtcatctgctaccatgtctggtgccgccgtcgccgctgttgctgctgccacacctggagatggaggcgcgcctgtcgacgggggatacccatagaccggatatagagggtattggggtacgctggtacgaggatctacgtagtacgatatcaagcaaacaggaaacagggattatactggttcaggccccttggtagttaatagccctaatccaattgatatgggattatatgatggaaaccacagattacaaaaggaatagtaaagctcgatgataccgacaggatcgtagtcgagttgatccgactagatctcccggcgacctggctttgataagctccggcttcgtaggctgtggtagatgtgttggctctaagatttaatgccttaggtcctcccggggggtcccttttataccgtaggtcaactggtctccatgtaggactcagagacatcggacccgacatgatataatgacggccgatttctatccaagtaggactctttccatctatagactccatgatagacttccttaacttatgctgagaacgtccgtatatgcgcaaacataccatatcgatacgtgacgtatatcgaagggtagagggtataccttacccgtaaccctgacaatagtgtcgtaggctctccagaccttccattatatttgagagatgaagtgaataattcaagtcatcaaacaagcataatgaaacatccgatgcctcgagagaggaatattggagacattgctgggcccttagcctgccagtcaacttcagcctgagatgtgcccgtcaaaccactcgaaggcggcgaccagatgtgttacacattcaagagacttgacaaaaatggctaaagatctacaacctctcaaatattcctaactcatactcatgtgaatctagttcccaggatgtgcactagatccacactttcatcttaagcatgattatacatagcaaacacaactaagatgaaagaaacttaagacttacaacaacttaataattacataggccgaccggccaaatagacttattagagaacagtggaagcttgactacccaatcacaagcacaccgactaggggtttaccccattaagttctcatcctagaagaaacaatcggaactcgcatcactcaaggactaagactaaacctgcaaacaaaaggttatatcaacagcaagagtcaatacattaaacaagttaatgtactagcaaactgtagcgcccgttccgtcgtggcgcctagcgggaaaactatctcttaaaaactctatttgcgaaatctgttctttgcttgttgtctagtgtccgtgccatctcagatctgaaatccccgatctatcgtcgagttcaatcccgaatccaaatccttcccaaatcaattcctccgcaaaagtctattttgcctcccccgggttcgatgggccgaatctctctcggcccatctccccctccctacccggcgctgtctctctctctgtccctcccccctctggtctacccgcgcgccgcgcgtgcgtgcgcgagagccgcgccgagcgcccctccctcgctctgcccgcgcgtgcgcgagagccgcatggtcgccgcccgtgccgcgcctgcgccgtctgcgccgcccggccccgctgccctaccgcgcagccgctcggccccgcgaaccagcgcgcgtgcccgagctgcgccgctcaaaccgccgcgcctcccgttgtaacccgcgcgcgcgtgccgtggtggccgaccgcctggtcgccgccgccgtcagcctctgccgcgctagcccgtgcctgc

SEQ ID NO: 7576 - DNA, 46900 bp, Oryza sativa
  unsure (1)..(46900): unsure at all n locations
cgcgccgcggtgcgccaccgtcgccgccgccgtcgtcgctgccgccgtcgtcgccgctgctgccgccggtgagccgccctccttcccccctcgcgtccaccactgccgccgctcgggtgggagagagccgagagagagagggagaggaaaagagaggccggcagagagaaaaagagagaaagagagaaaagaaagaaaaagagaaagagagaaaagaaagaaaaagaaagaaaaagagaagagagaatggaggaaaagaaaaggaacaataaatagaaaattaggaagaaattaaggaggttaatagttcaagaaaatctaaaataattagaatttaattatagattaattatggtcatagaattgcaaaatttaatataaattataggttattcttggtaatttctaaaaaaatcaattcgcggtagtagtttagatgtaattaacgactaaacaattagatgaatttttttagactattacagattagttttggataatctctataagtaatcgattcactgtagaagttcggatttaatcactaggaattttagacgtatatttggatctttatttgaattttaaccgaattcaaatcgtttcttcgcacgtaattttagagcccgagggagttgcggatccaagcgaggaccaagaaccgcaagactttgagcaaggcaagtcatcactatcccttgaacacgttgatcccaattgcgaaattatttcgtttataaataaaattgcatgcaatgatgaacattctacttgtgtttataccatgccttgattattgtttaccccttattccttcgtaaccatatttacgtatgagtccctagtcaattatgacaattgcttagaaatgctattctagaatcatgcatactcatatttatcaaatgctaaatgcttgggcaatcacctttgggaaggtaattgagatgcggcatgtggagacatgagcaccacattgccatgaaattgatgacatgatttgggaaaggaaaataaaatgaaaacaaccgttttcgactggggcagacggaggatttgggtggtatctggaaaaggctagtaccgtccccggtcaattaaggaccgagccatgaagttaaacatgaaacgacccccgtacaaccgtacttctcgaatgggtatagacctagcggattagatagccgagcggaggcagtatccctgcatagatggttcacccctgagtgaggcaggcgcgctacggtggggcagccgttgaggtagggccgagaggcatgctctacatcggtgtcgccattggtaggactgccatgagtgtgtgagagagaacttaacttgaaccataatttaatatgtgtgtgagacttctcttttccgggagcgctagaactcctctcactgctagaaacatggacgcctagagtgcatgaggatttaagttcatggagcgggtactgccaatgcgaggttatcaaaaggctttgccatggcgcgtctcatgtgttgggacgaggctcatgtgttgggcagtcgcagagtgcgggtaaagtgtacatccactacagtgtgagtaaaccaaatctattcgaatagccgtgctcacggttattgagtaccgggacatgtattacacttggctagactataaattctttaacttgtgtgggatgggatattacatgatgatttttatgctgatggagccacttcctgagaggtgggaatgtggacgtcctcagaaaaccatgacgactcaatggcggaaagctatccttgggatcacaatggatggtggacagaaccgtcgttgtttaatgtgaacactggtattaaaacttgatcagtctatgctaggttttaggcttatgaaaagaattacaaaacttgctttgcgcaaaagaaccatagccatcctttgaattcttctgtcatgtgcattattgctgtggtggcttgctgagtacggttggtactcacccttgcaatattcaaacttaatcagaggccggagatgaagcttcggaggatccctatgcctattaccaggagggtgatgaggacgatggcgctcaataggtcttagttacggtcgttgcctgtggcaatagcgtgccgctgccttaactccgctgccttacctacttctgtttttgaaatgtattccggaccgctcggtccgatgatttaagactgtgcctgcgggcttatgatgtaataattcgtactagactctcatgtatgtgcacttgatatttcagctataagttcgtgtgtaccagactacttgatccagggaaatggtactgtttacacgattaattcctgttataaaaacgggggtctaaggaagctcaatttgagaagttttatatcccgggagatattcattaccgtattcatttcactctatattcgatccatatctttattgataatattttattacgtttttatacaagttttcaattctgattatgtttctgaaaaaaatgaaaataaacatggtagatcaaattttcatccgtttctgttccattttcataactagctaatactgaacagaataattgaatgcggcaggtaaaatcgttgcagcaatactcatacatcaacctgaaacgaccatcctaggctgtgaccaagatgatatctattgatgactttttaagaaatgctagataaaaaagtattcatgttcggtatcaatatctcgaaatttcaatattattttggaaaataccatatttatcgattacgaatagaagaaagataacaattgagcacatctggcgctccatttcacacaattattttgcgagaagacagaagattaaaattgaattacaaattattttgctagatccccagcaagcatgatccatccagattattggtgcatagggccagcctgcgacatgttaagcaccatcccacaaatcttcgacgcacttgtaaggcccattgtcacagacgaactgcattccagtcagacccctctgctgggggagtttgctgattttgtctctctcttcctcagtgagctcccagtcgaaaatatcaagattctccttcatcctattttcattgtatgtcttcactaacaaaacatcaccctgctcgtacatccacctcaaacaaatctgcaccgcaaattaaatattgaagtctcaattaacatggtatgcccatttaatctcttaccttaaattctgtgaacaactgttttctaaattatttatctgattgaagatctgattgcaccgttaatattaaatcctcttaacaaaatttcataatataatattctaataaaacatatatgtgtttgacgttttgaaatagtgtttcatacgtgagaagaaaaaagtgaatgtttcaagtggaaccaacctgagcaagcgtcttgcccttggtttgggcgatgtcgtgcaggacgccggagtccatcaccgcggcgctgccccacggcgtgcccttcgcccccagcggcgagtacccgcacagctgcaccccctctcgccggcacacctcccgcagcgtcctctgctgccacatcgggttcatctccacctggttcgccgccggccgaaccacggcgaacgacagcagctgctccagcttcttggcggagaagttactgacgccgatggcgcgcgcgaggcccagccggtggcactcctccatgccgcgccacacgccctccatgtcgaacgccggcgccatctcctccttggggaacgggaagtcgtagctgcccggcgccacggtcgccggccagtggacgaggagcaggtcgacgtagtccattccgaggttgcggagcgtctccctcgccgccggcacgacgcggccggcgtgcaggtcgctgcaccagagcttggaggtgacgaacacgtcggcgcgggaggcgacgaggccgcgccggacggcctccgcgacggcctcgctgacgcagccctccgtcgcgtacagcctcgccgtgtcgaagtggcggtagccgagctcgatggcgcggagcagcgccgccgtggtttcctcggaggaggtgaaggggaacgccgccgtgcccatgccgatgcgcggcatggtcgggagcagcgcgctcgcaggcacctccgggatggtcgccattgccattgccgtattgcagtgtagtgtagtggactagacaaggacgtgtgtggctatatataaagaaaaaatggattctgttcaacgcatgccgcaatgcagacaacacatgggacgataatgaaggagaaataatgaaagagaaattcgatcggcttgatttttcgtagctgagtagttgatcacgttgaattatcaacaataattcagtttttctgatttacattgtactattattattagtttactagtcatgcaaatcttgcaaaatgattaattacaaactgtacatgtaatgcccaaagctatgtcacgtgcaaagtgatttgtacacaaggctgtgaccaagacgagatctgttattgtcttatcaagaaatatatataaatcttttagtatcttatcaagaaatatataaataatgattcgatttccctctgacaacctagaaatttcgacaatcgcaccaaccgggatggcaacgatcaggatgctgttcgtccacgatatgcgatcctcgccatcggctagtgagatggggtctggggactccactcatacctaagatgtggatggttctaacagtcatggctatttgttttttcgaacgcgcaagctccctgtatacgaatcaattgttattctgctccaacagttgtaccgaaataatgaataccttgagtaggtagaaatagaaaaaaacaagaattttcctaaatgagaaatgttttctttctaaaggaaattaaataatattaattttgattaatatcagaatatcgaatgagtttatgcttcactaattgaatgataaataactgcaagtaaaggagataggtggtttaaaaataaacccaaaattttaaacatgtatctaaaatcacaacaaaaatagtgaaatgaaattagctcgtcgggaatgcatccaaaatcattatagacccagggaattaattaatagttcccaaccacgggtggagtgaaatccaacaaaaatagatcaagagtcgtatacatttaaactaaatctaccatcttaaatttagcatcctaaataaatttctaggtagctaattaaatttgcaatgcatcatctatggacctatatatgtataccaggggagtaaccatttttcgtgaacgtgtcgacgtgttttaaataagtggataggtatacagcaattaatatacatgtatggtccatacattaattgatcgcagaacgtgtacgggaatggtgccgtgcccatgcctgccgcacataattaagatagatccacatcatgatccatcatgattatttagatatatactccactgtatctaagtagcttgctagacgtcaccatcccacaaatcttcaactgatttgtaaggcccatggtcagagatgaattccaatccaggcaggcccctcagttggggcagctgactgatcctctccctctcttcatctgtgagctcccagttgaaaatgtccagattttccttcattctcttctcattatatgtcttcaccaataaaacatcaccttgctcgtacaaccacctcaaacaaatctgcacgacagagtaattatatagtgaaactttatttgacctgattttttgtttggtttaattaaatattttatattcatttaatttctaaactttcgtgttttgatcacttttgatatacatcctttgattccataatttttgacgttttaaacatggttgggtcaaacttttataattttaactatcgataatttttaaatatttattttaaaagcactacaacaacatatttagatttgtcttacaaaatcctataataaaaataaaaaattatttatttattttatcatagtgattttttatgtaatttgtatataagttggttgagtttgatcacgagatataaacattagacatatatattgaaatattcacttaaagttttctttttaccggttactagctttcacttacaaacaagtaaaaacataataatagtatggtatcacagtataaggataaattgatggcttacaactgatgatatgtaaatatgttatattagttatttagagttgttcttttaaacatccaaaatatgcaaaaccactctccaaaactatcttagggagtaatatagatggtattgcaaagtttagggggttagatgttcggttttaaagtttagggtgctaggtggatttgcatccaaagtttagaggggtatttggacttttttccttgttaaaaattttaagaataatggaattggagggagtagtatatatggtatgaatttttctcctacaaaatttagaaaataagtatatcaaccaacctgagcaagcgtcttgcccttggctccggcgatctcctgcaggacgccggagtccatcacggcggcgctgccccacggcgtgcccttcgcccccagcggcgagtacccgcacagctgcaccccctcccgccggcacacctcccgcagcgtcctctgctgccacatcgggttcacctccacctggttcaccgccggccgcacggcggcgagcgacagcagctgctccagcttcttggcggagaagttgctgacgccgatggcgcgcgcgaggcccaggcggtggcactcctccatgccgcgccacacgccctccatgtcgaacgacggcaggatcacctccttggggaacgggaagtcgtagttgcccggcgtgaggctcaccggccagtggacaaggagcaggtcgacgtagtccatcccgaggttgcggagcgtctccctcgccgccggcacgacgcggccggcgtgcaggtcgctgcaccagatcttggaggtgacgaacacgtcggcgcgggaggcgatgaggccacgccggacggcctccgcgactgcctcgccgacgcagccctcggtggcgtaaatcctggccgtgtcgaagtggcggtagccgagctcgatggcgcggagcatggcggcggtggtgtcctccgaggaggtgaaggggaacgccgccgtgcccatgccgacgcgcggcatggtctggataagctcgctcgccggcacctccgggatggtggccattgcaacctgcagaagtgcacagtgtagtgtagtggagaggaggacaatgaggtttttctctgtgggtagctatatataggaaaagaatggatctcctccttgaggtttcgtgctgcaagacttaaacaacacaagtgacgatgaaggtaacatttttctaggtgaagcatgggcagggatagagctagagcgaaacagaatgtggtgttactctcttaatttactttactttagattaaagtttaacctaatacaaatgtctaagtttgtattaagggggtacatatacggtgaaaatagataaggtatagtttaaaaaattttctttatcgggttcctgagcaccccctaatatatactagctccgcccctgcatgggtaagttagtaagagatcaatatgcggtacaaagttcatttgcaatataaacctgaaatatcatgggataaacaaatgagcatctgagatttgttcttgttatcatgagtaattttttttgccacaagattaaccataagtaacttttttttttggaataaactatttagtggcatggataaatcttaaacaattatttatatatgctacggtagcttacaggtttgcaaatgctgtgttagttagtaccaacacaagactaattcatttttaccttttctattttactagtccatgaaaacttgcaaaatgtatgattagttgcacctacctgtacatgtccatgacccaaagccgcctaggctgatgtgccccgttgaaagcgatcgagatagaagtctgacgaagactatgacgatctattagttaccttattcagaaatgataaaaacgcatcgaggtttaggccctgtttaggctgtgtttgcttggggaggttgggaacaaatcttcttcgcacggaaaacggagcggtccattaacgcgtgattaattagaaattagctttttttttcaaaaatgaatcaatatgattttttaaagcaatttttgtatagaaactttttacaaaaaacacaccgtttagcagtttgaaaagcgtgcacgcggaaaacgatggagaggtgttgggaacccttgggtccgaacacacccttagtcacaaaacaaaattgttcacgctgtcacatcgaatgtttggacatatatatgaagtattaaatgtaggaaaaaaacaagagttaattgcactctggtccaccttttattgccaaagtttcactttaggctatcctctagctcatatttttactttagactaggtaagattatctttggtgcactttggaccgcccaagtcattttctttagctgcatctactctataatattgtaaacaattgcctgtgtaagttggaaaatattaccgggttacgggctgctgatgtgtttaaagttggaaaagtcatttatgtattcctaaaaagtttatggggtggtccaaagtaaaataaaggtaaagtaacctagcccaaagtgaaaaaatgtgttaaatggtggtataaagtgaagctttggtaataaacggtggccctaaacgcaatttactaaaaaaaacaattacacagattgtgtgtaaattgcaagacaaatcttttaagcctaattagccatgatttaacaatgtgatgctacagtaaatatttgctaatgatggattaattagacttaataaattcacctcgcagtttcctgacggaatctgtaatttgttttgttattagactatgtttaatacttcaaatgtgtgttcatatatccaatataaaaaccaaacccaaaaaatttttccaactaaataaggccataatctgaaaacgtgtaaaatgttgtgatattaactagagaacgaaatagagtgaaatctataaccgtagttctagagtgagtactacatgttattaacaatgtaaatatattaaacgacagagtattgtaaaagtaaaatttataaatagctgaaatttgaattgtggaacgaagaatagatgtaaacacagtatgagattaattgaaattagaaatggaagataaagtaaaattagcaattgaaattcaatacgagttaccaaacttgagtccctacaatactaaattaaactttggattaaaatgaaataataaaataattccgagtcaatataaaacaatacacaatattattttaaaattcaaaacaaaaattaaaacaaaactactcctccaaaacatggaaaatggttaattcaaccagtacaatgtacggaattggacttggtgattcttcactctctagtatgtcttgttatcattgtccatgtaatctctataatgattgattatagccttttaaagaaaagatgggaataaattctatgattaaaaaatatgtctctccctaattgttttctttatccgaccctgcatccatgtatgctcttgcttttgtcaggatgtatgtcagctatatactccataactcttggtcaagtatgctatagctagagctagcttatggcggccactttggttgaccagaaacagaaaggcaagtggctgatggctgatgacattgttccgcttgaagatatatgcttttttaaaataattataaagtacaacacagacactcacaacatacgtacactcacccctataaacgcacgcacgtaaaccctactcctacgagcatctttgaagactgagctgataaatcctaaagactgacgaagttactacagacgtctcgttgtggacgggtgcatcacatgccactaaaagcacaaaaccgttaaaatctaaaaaattctctcccataaaaatcaaacccaggatttaaggtgctactaaagtttaatgaggcgcgaagatatgtgctgatgcagtaatattgttgcttctttccatgcaaattctttgcccgtcgtgtgtcaaaaagatggggccactagccaccaatttttggaattatcggagaaaacagccttcccctcacacacagcctaactgttggctgcttacctggttcgttgcatcccatggcgactagcgtaaaacacaactacgaaaagcatttttccgtgggttcaaaaagtgttttttctacagagatcttacccgtctgcatcaggtgtctgggaaaataaatatttttccatgcgggcgatcaaccacatgaaaaaatacatctttccgtgtggtcaggttaagtggaccgcacggaaaaatctgatttccacgtgcgggtgcttatatcacctgcacgtaaaataaaaatcccaaaaaaaataaaatcaaaaaatccgaacccaaaccctagaagccgttgtcgccgtcaccatcgccatcgccgaatctgccgccacccacatcccctaccaccaaatccgcggccgccgcacgtggggagggcggcgccactccctaccgcctccttgttgtcatcggtggcggcggaggcggcggatccagccatcgtggcggcggcggttgcggaggaccgtcgtggtaccgcaccgctaaaatgcgggtcccgcgtgcaccgtgctgcctagcgatttttgagactgtgcaggcactgttttcacactgtttgacacggcttcatactgtttggcactgtttgagcgacgatcccgcgttgtggttacgcagaaccgtcgtatgaacagtacaaaacagtgtacaaacagtgattgaacagtgccgacgcggtaaaaaattcgatgtcatcgtggttccgcagtttcaagctgtgggactatcgcggtcccacgctttcgtcccgcgggaccatcggttttgtgttttggatctgcgggactgtcgcgattccgcgttttcgttccgtgggacggatatatttttatatgtatgtatataaatgtaaattattaagaataagtatatttgcaatttttttcccaatccctctcacctttcaagtgccagccacgccgtgctgaacgcgatgagcagcagctggggcaatcgcggtccgacgtgtcattgagggtgggaggcgaagcgaactaccccatgccgatgaggacaaattgtgggcttaaagaagacttttaaggctctgaaatgatagtcactttttatttttaataaacctggtttcaagagaatttttaggggaaactagttttacattccttattcagttagcatgcgttttgagaatttgtagtgtattggcaaatatttgggcggcatgttttgcacagctcgctgagctgcttccaaacgatatttttacagaggagtgattgttgggctctaggctgattcggtgaagtgattttcggagctagtaaaaagaagtggcttctgctgattaacctagtgaatcactttcagtcgcagaaacgctcctttcagaaaatcagaagcaggaggaggagctttacgtaccaaactcaaactgacccaaagtgtgtactggcagcagtggcggaggcagctgcccgggctccatgccatcgcaacacacattgctccacagcataaacatcatttactcattaattgcttacataattaccttgcttcctggttccaaggaaggttaattagatgactagcgagttgtaccacatcctaatcttgctttcctgatgtatagtagccccgtactctaactccttgacaataaacaaccaacatttcattgataaattgtaacttggcaacaatcaactttaagtctagataaacggtacaattttccatatatatatatagggcatgttcactttgatgcaaaaaaaaaccttaccaaattttggcattggcacagtgtcggatcccaaaactaaatattcggaaaccgacatgtttaactgtatcaagccctggatcagtagattgatacagcttcaacaatctggattttcattgcgtacatttgaacaaggctccaaaggagatgttattacataaattaataggggaatttacaagattgtggctaactattacagcagaagctatagagtgtctcaactctaatattttgctatagacttaaaccatctaactaatctagatttgaaaactaggttgaaataatgctaacttatatgattgaactcctggcttcggcaagaacttcaatttaactctggaaaaaggggtttgaagcaagggtgagtacaacgtactcaccaagctattatattcaataatgaatgtataaaaaggtaatatttgagtaggattacgattacttgcagaaggcagagaatatagaaatagaaagcctgatgttttaaatgtagcagcatttagtaaaatcttgaattaggtttctaaccaaagtaccatatgagtcccgatactcaattccgtgagcacggctattcgaatagattcaggtttactttactgcagtaaatgtacgctttacccgcaatccatgacatgccaatattcattagcttagtcatggcaaagcttttcggttactaacatcagtggcacctgttccatgaactctcatcctcatgcgctctgaacgtaacgttatcagcagcgagaggagttctggcgttcccgaggtttttagagagagaactggttgagagacccccgtcatctcaaccaggttttcacaatacacacacacttgagctcaacaaatcatttacctgcgcctcggtaaatgttatatttgcccttcgcggcataggtttgcctcctgcgcgaggacttaaataagaaccactgtacagaggtaccacctttgctagataacctactttgcaaggtctgtccccattctagaattgcggtcgtactcgttcgtttgacataagtagttggtaataactatatcgactgagacagtactagccacccggaaatcaaccaattcgtacgtactgtcccaatctaagttcattatatttttatgcaaactaactaggcagggctaagcaaagctagcccatatactggatcttgcatatgtatcaggcttactgtatctcaaacatcatgctattgactcaatgccatagcaatagtaagcagtatatagcaatactaggagcattttatgcctacaaaggggcaggcaattaattaacttgcccttgactccaacgtcgaataatatccaaggtaggcaacctgattatctgatccttgaaataccacaagttgccatccaaaataaaataaactctactgaagaagaggaagagccaaattcaataaaatccataaaataacaagaaaacgataaacgactaaaagggctagggtttagggtataacctatctcctttataaggtataaggattactgggctaatatgtgtaggttctaaaagattggagactaaagtggataggagattaagcaacatttgtcgcttatatttcatctgtgggttttagttgcttggagagtaagggatataactggttaagtgagtatgtggctagtaatggtcgaagttgggctttggtagaagaatggctaggatttacttgttctcgagtcgatgctgaaataggatagcatatcggctcgtatttcatgtataggttatgagtagttggagggtaaatggttgggatgatattgtagctggcgtggagtctagatagcaagctgattgaggtaggataaatatcagttagggtttaggtgtttgctagtcgttgctagagttgggcagcatggcgactagacttagcatcttctctagccgatgtcaacagacagtataacggctagagggataggaggtttgtgtgggtttagtggggcggaagtgttactccgacaaccgtgagtggcggcggagcggctaggatcacacagagcccaagagctaactgtgcggcgtgctgtggaggtcgagggaatagtgaagctccgaccgctgtacgcatcaaggcgtggggtgccaggagcagcatttcgatcttgggtttgggttttgccaggctttacaaccaacggtccaacgtcggggtcgatagaccgcacgaacgtccccatgaaaggcgtaaagttccaaccggcggctttttagtggctaaaaggtattttgaaaataaacggaaatattcgaaaagcaaatataagtttaaattgtaaattcaattataagatcaaatatttatccaaatggtatttgaataaattaaggaaatttaaataaaatattaaaatagcaaatttggtaccaaaatgtagattttgaatttagatgaatttaggtccaagtttcactggaatcggatctacggtttaggagatatgggcttctaaagattgggttttgaattaaatctagaaaagacaaaaatacactgttcatgggcccacctgtcagcctttctttttctttttcttttccttcttcttcctcccgtcatctccttctctcttctcttctggccgagtaacagggaggaggggtgctggggctccggtggccggggatcgacgaagtcggcggccacgcgtgttcccgcgcaacgcgcatccgaggatggtggtggccagtagagggagttagggaggaggccggaacggcgacaacaagagctctcttcggccggcaaaggaagtggttgtggtggttgctatggggtgggggagaaggggaaaatgggaaaaatgggttcgccggaggtagggggagtcagtggtgcaaggatttggctaggggaactatagaggaggagatcgaccgatggcggcgtcggccggacttgacaggagagagagaggaagagcttcaattcaagctctgataatgtgaggaggggaggacgatctcgccggctatttaaaggcggtggatgtcggttgcttatggcggtttcagaggagaaggcgagaggagacacggctgcggcggcacagaaacaggagcacggcgtcgactctatccgctgattggccatcgaaggcggttcggctcggcggttgatgtcagcggcgtgaggtggcggctgacgtcggcggcagttgcttagcggcgaaggaaagacggcggagttggagggtaaggcacggcgacggtggcggcgcgacttggcggcgacggcaaggaagcggcgacggcgtgtgcgtgtgcgcgtctgcagaaggaggaagggcggctcggctgtggtggctgggccggcttgggctggaggagggaaagggtttcggcccagtctagaaagaaagaaagtctaattttcctagagattcaaataattgatttagaggaatttggatggctagattttaaaaaggatttgaattcggagagggattttaaaataaggatgttctaatttatttgagtgcaatcttttgagagatagaatataacggaatttatttgatgcactcgattgagagggaagggaaataaataggatgttagcctcaaattatttggcaagaatttggagaagtatttgaggctaatgggaaacttggatatttggcgataaataagaataggtctgaaatcaaaggatgggtcgacaattaattccaatgaaattggaattgctttggtttaggttcaaaggtattgttggaggatttcttggaccacaattcataaaagtaaaaaggatttttagactaaatttgaataaaggaaattttggtcaaaagaaggtttaagatgcaaaatcaaatcaaagagaatacctcgatttaacaagatcaatttttagaataaaaaccacgaaaaattttaaatactagacagggattttatgcatgttagttttaggaggtccctctaattataatttcttaagtttaggaagttattaagaatagaagaatcggcatgatacatatttagaaaatagcaaatttttagtatgttacacatagttgccaaaaatttggcaacttactaaaattttgacaggatttcttaaatagttaccaaaatttggcagcaaactaaatgtagccacttttttgaaactttaccaaaatttggtaaggttgaaaatgacaacaaagtgaacaggcccatagtttttatctcttgctaggcttgcccagcctcaagaaaatcgattttgctaaacatcacacgggtgattttttcgttgatatttgacagatttttgcccctacaattatgcgtcgagatcagtacacgattctgcgtcgatgttgtcgtgaggtggagaggagacctcgtgggttacacgtttgccgctgatcacgattcacaagaaatttacatcctagctacgtgtaaatatcctatataactaaaataaaatataaaattacagtcctatttaactaaaattacatatgtaaattcagttgatattaattacaatcctatttaactaaatctacatttgtaaattcagttgatttgacatgtaagtgcactgtaattttgataaaaataatgtgtaagtaaatatgtacttattattttctttaaaatataaaattacaatcctatataactaaaattacatttgtaaatttagttgatttgacatgtaagtgcactttaattttgataaaaataatgtgtaagtaaatatgtacttattattttctttaaaatataaaattacagtcttatataactaaaattacatatgtaaatttagttgatatgacatgtaagtgcactgtaattttgataaaaatattattaaaaatattgtgtaagtaaatttgcattagttattttatttcaaatataaaattacagtcctatataactaaaattacatatgaaaatttagttgatatgacatataagtgcactgtaattttgataaaaatgttgtgtaagtaaatttttattagttattttattttgtaatccgttggatgcaaatccaagggaagaaaaaatctgggtgattttttctcaaaaatcacccgagcgatgcataggcggtcccaaaaaaatttatggctccgccaataactggcagcaaagcggcatgaatttctcacaacgggccacaatattgttgcgggccggaccacaacccatcgtaacaaatgccttcctaactaacaagcttggcccaacctttctcgcttttcctttgtcgtcggtactaggaataagttcaccggagatccctcaacttaagagcgagattattttagtgccttaaccacaaaaccagaaatatatacccctaaacttacacaaaccgtacactcaaggtcctataacagcatacgtgggtggttttgctgacgtggcatcctagtcagaaaaaaaataaaaaaagtacgtggagcccacatgtaagattcacatatattttcttctcttttctcctcctcctcttcccttttcttcttatcctcttcacttttctcttcaccagcggagcggcggtgggcagagcatcgatgggcaagcacgacagcggagcggcgggtgtgcacggagccacggcccataggtcacgagaggttcggctgtcggcggtgccggccccgacacaagagaaggggagggcgtcggcgtcggtaggagagctaggcgcggggggagggggagagggggtgggttggggagtcagcaagccgcgggcggcggaggcggaggcgccattgccacggaggtagcatcgtcagcgactggcgtctgatgatgagttgatggcgtacatgaagtattaaatataggctaaaaaataactaattgcacagattgtgactaatttgtgagacgaatcttttaaacctaattgctcaatgatttgacaatatggcgctatattaaatatttggtaatgacggattaattagacttaataaatttgtttcgttgtttactaacggaatctgtaattagttgttttattagtgttcgaagaccccatacaataccttatataatatgctatgtaaaacgctgaaactttacccggctgtatgtaatcaccccctgaacgagaactcatgttctaatatcgagacgcggtcttgaccgtgtctccgtctacagtgtggtgcaggtgaacagttgaacagtgcctgtagtgtgtatgcacaatgatttgtcgttagcagcgcattcaattcattaaatttattactcctaccaatccgtcctacactccacagcggcggctcttttctctcgccatctaagaaacttcctcatccagagttgactgagtccacggtaagacaaggcttcattcggtacagcttattattgcccagtgtttctcgaagcacgcaaaagaacgtatatatattactacctccgtcccaaaataagtgcagctatagatattcgagtccagcgttttgatcgtctatcatatttaaaaattttatgaaaaaaattaaaaatattagtcacacataaaatactattcatctattatcatctaataacaataaaattactaatcataattatttttcaaataagacgaacggacaaacgttgagcatgaacagtgttaaaactacacttattttgagattgagggagtagcatattactccatccttccaaaaatctgagacctatttattttttatcaaaatcaagaagcaataaactcactcactatgtgacaaaaccaataagcatgcaaccaataagtattagaatgatttcttgtttttcgatcaacaatttaatttagcacatggtgactatcaataagactcagatttttggagaaacaaggaatgaaataggtctcaaatttttggaaggagagagtattaattaagtattactctctccattccaaattgatctacatatttcatagatacacaaagaccaagaaaagctaataactctctcatattatatttactctagcaacaaactcaatgcatgcaccatccccactatttcctagccaatagcaaatcaagatattgcatgtgggttataaatacatgtgtacatggatacatgcatcaatgtccatttactccaatatacaaataacgaatagatataataaatgaacacaaatatggagatcatttaggaacaacctcaaaaaaactatatgtagatcaatttggaatggatggagtaactaatactccctccacctacttttgataggcatatttccaaatctgaaaaaattatttttgataggcatatttcaatctaataacctatcatcttaatgaccttctcgcatttaatgtgtgactctccattcttccatacaagattggctacataggtatcgagaaatgcaaatattaatgaatcgcttgtttacgaggaatgactagtagcatgtttaaataactgataagtagaattacttatccttagtctatgtgtcaagatgaaatatgactattaaaagtagatggagagagtattataaattttaaaatagatttattttagctttataaagaaactcctataaaaaaagtgcttttaataaaaaaaggagatagtaggagtaccatttaacaggtagataaggttgtgttcgctggagcatgttcccaactgaaacagtgcacacggtaaacggaacggcctattagcacgtgattaattaagtattagctattattttttgaaaaatgaatcaatatgatttttaagcaacttttgtgtagaaactttttgcaaaaaaacatcgtttagcagtttgaaaagcatgtgcgcggaaaacgagaaagataagttgggaaacttgggataagaacgcagcctaaggtggtgtttagatccagggactaaattttagtccctgtcacatcgaatgtttggacattaattagaactattaaacatagactaataataaaactaattggataaatgagagctaattcgcaaaacaaatcttttaagcatgattaatctataattagcacatgtttattgtagcatcacataggctaatcatggattaattaggctcaatatattcgtctcacgaattagtccagggctatagaatgggttttgtcattagtcaacgtttaatacttctaattagtgtcaaacatccgatgtgatagggactaaaatttagtcgctggatccaaacaggcctaaggctgtgttcgcgggaggatgttcccaaccagccattagcacacggaaaacggaacggtccattagcgcgtgattaattaagtattagctatttttttcaaaaatagattaatatgatttttttaagcaactttcgtatagaaactttttaaaaaaacacaccgtttagcagtttgaaaagcgtgcgcacggaaaacgagggagatgagttgggaaacttcgggcaagagcacaccctaagagcaggtacaacagcaggctataggccagctataaacatattttaaagagataaaggaagagagagaagagcagcgggttacagatttgtagccagctgcagcacagactccaagacgtaatgtatgtatgataggtgggaccatgtattaataatatagtaagcaactattatatgaattgactattacattggctatagatgatttggagctagtagtgggttatactattaaacttgctctaaggttgtgttctttccttcaagttcccaacccttctcctcgtttttcgcgcgcacgtttctcaaactgcttaacggtgatttttttgcaaaaagtttctatacgaaagttgcttaaaaaaatcaaattaatccattttttttaaaaaaaatagctaatatttaattaatcatgcaataatgcgtgctccgttttacatgccggaggaggggttcagcttaagtatagttacggaaaacgagtatcgaccactagctgctttcgtttacattctgaaagagagtgaagactggttacgccccacgtggatgattccattccagtcgcgctcgcgccagacggtcgatgcgcgcaaagtcagggtcagctcttcaatttgagtaccaactatagataattaaatactccttatatctgaagtattattgtatcctcaaatctgaaggttcctttgctacactacagatatcgatcgaagaaaactagtccataggtagataaatattgtatcgttgaatctctcaaggtcgtttcctttgctttgctagctagctgcagaagaaaggaaaagctatagctattagagagagaggagggatcagaagaagctgctagctgctagctcgctgccggccggccggccggagaagtacctctaatatatataagtccgtcgatcgtgtcagccatcgccggcgccggcgttgatcaggaccatcaccatgcatccaccatactgaaatctctgtggaataatcctatatatcgcccaaggtatgttactactcccttaattcccttcgtgttcttttgtttcgaactaagtagcatcatatatttagaggaggagtggtatgctttagctatatggacttcaaaattaaccatagctgatgtacttgttcttctgcacaaaattaattaacctaacctcgtgaaattgcctagtaagcacaaaccaagatgatttagcaatctccattccatatgagcacacgcatgacatgagagagcaaattaagtcagcgcaaacgccgtagtgcgctgctatgctgaatagcaattaaggttccagcttgcactggttctggatcaaggccaattcttcattaggctactaactaaggggatttaatttctgggtccgaatttagcaagatttgttatattggattatccgagcagcaattgatcgagcttctttctgcgagtttgttaatactagattaatctgatgttttctttgattaccttcggggaattaatttgtgagtctatatcatggtaattaatttatttaactttttttttgaaacttaaacaactttattaacaaagacagagttaaggggatacaccctagtacatccacagatggatacaaaggtagcagaaacaccatctttaacgagatagagactaaccaatctaaggaaacaaacttccagatgcgactaaacagcagaagaggaccagatcgacggagctttgcggcactgccgcgacgactgaatccttgggcctccattggtgtgcacaccgtttgacagaccgaaaggctcctacgcctgccaccgcggtaacggcacaaatcggaggtttgatactgagccgtagattttggtgtatgcatcaccggactcagcaaagtggttccacggagtccactgttaaatctgaggagcaaaaattgctcaacccgaacggtagacccagcatggatactgctattttcgaacaaaaggaaatttgattctaaagaacagctagccaatatcacaaagttaaacagatggttgtgatggagcttctgtctttctaggtggccaaagattgctgagatagagagccactgagtcagatccgacaaaagcaaaagtaatgaacctttaatgttcaccgccggcgtcggcaacaaggcatccgccatctggaggtgttcaaggccatcggctgagagtagcaaggagggcaacagcttcgttcttgacttaattaggtcatttttttgcaaacacgcaaaagacttatgcattgatataatattagaaggaagcaaatagttacacgcgcaaaaggctttgcttcaactggtacaggtgttttcatcaaccttatctcttttttcttcatgacgtgtatgcttaacgactttaatatgtatagctctgatgctgcatttacatagaatcggttacatcaattagctcacacttctgcaacacaatattagccctccattgctaccaagtactgtgcttgcatgcttgaaatggagagtgctaaaaatatgaggttttctcatatgttttgtgcacaggaatacaaacatgtgtgcttttatatcacaaatttgctctatatacctgtgaaatttgctatattgtttctattaaaacaagtttagaagaattgatcctacaactgacaatctactccttttggtcctgcagcttctgtgttcaacatattttaattaagattggtattcttatgcttaccatgttatctttttttttaattattttggcagagacagggtggtcaacattgagggatctgtaatgttggtatacgacacagcttgcagaaaataagattatgattggaaatatcacacgatgctatgataagttgaagttcaaagtagacatcaatcagaatattaaggttttcacagaagatgagattaaacggattactagcaacttcagcattccgatcggacaaggcggctttggagaagtgtataaagggactcttgatgatgactatgatcttgttgcggtgaagagatatattagcaaagatttaaggaaagagtttatggaagaagtaagcatccatagtcaaatgagtcacagaaatgtggtggagctcataggctattgcattggagaaagtactctaatgattgttactaagtatatctccaaaggaaaccttgatgacatactccacaacagtgacatttccatccctttggatgtaaggctgggtattgctataggatgtgcggacgcattgagctacatgcattcgatgcatttatcgaatggcagtcttatttgtcatggtgatattaagcctgccaacatacttctagatagcaatctgacatcgaaattgtcagactttggagtgtcaaggcttctttcaggtggtgtcactcagtacactgtacatataaaaggaagcgtatcttacatggatcctatatactttcatgagggttgtcttactccgaggagtgatgtttatagtttcggaatggttctcttggaactaatagctcgaaaaagggtaagaaaaggtgacattaacctcattggaggtggagaaatatttgatgctgagatagcaaaccggagcaatatgaagattctaaaagaaatgaggaaattggcaattgaatgcctaacactggacattcataaacgtcctcaaatgaatgttgtggcaaaacgccttcgtacacttaaaaaagaattaaaagacatgcatggaagatactcagaacacattttggcatcacaccgctcatggcgaaaaaatgacaaccaggggccgagctataattctaggatgcaactgaagaagagtttgagcattttcaagagaaatcttagcaattcttctaagatcctattgggactcggcaatatgagaattttcacacaggaggagctaaatgaaatcacacagaattactcgtgtctactcagtggaggtacttcgggtaaggtttacaaaggaacgcttgaggacaatacggtggtagcggtgaggatattttccgaggcacttgagggtttcgaagaggcgtttatcaacggagggatgatcctatctcaaattgtccacaagaacatcatcagactcttgggttactgcttgaatgctgattgtcccgcatttgtgtacgagtatgctgctagaggaaccctctctgacattctagatggccgtgaagatttcccactgcatttacgcgtgaagatcgcagttgagacagcagaagcattagagtacctccattcctcagcagctggtatgatcagacatggctatgttgcaccatccaagacacttgttgatgacagtttcacgccaaagctgacgggattctcatgggcgcagaggctcaacaatgatgacagcgcaattcatgatcatgataagtactgtgtgtcactaaaactgaaaaccgatgtgtatcagtttggtgttcttgtcttgacgctcattagtaggaagaactttgcgttttatgcggatcacgaacaccttgtctcgcaattccttgcagcttacaaggcagataacagtggaagggcatttttcgacgatgatatcacaactcgtagcgaagatgttgctctcctcgaagagatagggaagctattgctcaagtgtatttgtttggaaatagatcaaagaccaacaatgaaacaagtggcacaacaccttcggatcattcggagatgttggaagaataattgcacagccgatggagcttcactggtaactaattaaatctcatatatatcactagagctgatcaaggaactgaacttgacagtacacttggttcactctaagtgatcgtgtacaagcattgtgtgtgaattgtaatatattatttgttaccagaacatcttgcagtatatgctgccattcggatgatgttatctgaacttgcatgcaatctgcttcttatgcggtcgatcccatgatgtttatctgaacttggttctactagtggatatagaaaattcatgttcaatgttggtagtggtgtttcccttaatacatgtttataaataatttgcgatcatgaagctatatatgtaaaccatgtactccattgttattcagttcgtgcagcttagtgaatgaacagattgtgctgcacctgtggaccatgtaaggtatcggaggtcctcctcttattctacggaggggctatatcttatagcccgcatccttcatcttccccaggttgagtggaaggaaggccacagtgcttttaggaggctccacaccgatagagtttagccagtcggttagggggaggtccccctatcttccccccaacagtagcacctcaagggctcaagttctggtggactgcaaggcatatcagagggtgacaatatttttgccaaaacaatgacacagttcataattgtttttgtatggattgaattatttatggttcagttcgaatagctagctagttactcccattggccagtggcatatccaggatttcaggctaggtggcccagctcaacaatttttaagaacactatagatttaatgtgccaacgtttttttatttgatcagattgcgtttcgtaaattctacacttgtacgttggcatattacatctatagtataataaaatgaaccaaatatctttaaatttaccattctaataggaaatccagtatcaaaatgaaattgaacctcgagggtgggaggagatgagaacatgttgcctacaggcagcggtcataatatgtctattgatgtcatagcatactaattatatatacttagaatatagtgttatatggataagcagtttaattataagttttgctgaaagtcatcggcatcgcctgacaccaatgttagcattgtagattcgtccttgctgccggtgtttgattctgcttcaaatcgccaccgccggttgccgccgtcgtttcacaaaagacgtgcgtgggaaggcagaattcaagtagacgctgtcatgcggcgaaacaacgaagcatcgatgtttttttagtagtgtatgcaggtaatgggccttggtccattctatggtggtacatgcatcacaaggatcatactgtagctctgcatccggcatcgactataagtattgttttgtcaacatggtcagaatttgttttttcatcaaattccttttacttttagcagaacatgatcaaattctactgatacttactgcaaattaacaaaacaaaatccaattccgatccaattggcctgaactactgtgattttataactattttatatgggccgtgaagttcaaccgttgttcctcaaatggaataagttcatctaagataccttaacttgtcaacgaatccgattttcatcattcaaccgaaaaaccagataaataattctctcaactattaaaaccggtacaatataggtcccatagcggttttagattacgtggccaatttgactcgatcttcatctgacgtggcattaacatggcacatgaaacaaaatttaataatttaaaaaataaaacaaaatatataggcccacatgtcagtcaaataataaaatttaaaaatagtggggccactacctcccccacatcccctctcttctctctcctccccttctccagttctccttatcccctcctcccatcgtggagtacacagcagcatgccccgcgatgtcgggggaggacggcggtgtggatgcagctgccgtgtgccgtccttgctggcagaggacgcgatgaggatgacgcagctgccaagcgtggatccgaaatccgccttccatttgagcatcacgccttcttccacgctgatctcaccggcgaggagctcgatctgcaggcggagggtacgaatgccacgaggacggaagcggtcgaagtggtcattgcgaccaccggcggcggaggaggagagccatccgtgatcttcgccggcgtcacaccgctagcgggaccccaccggattttcgaccatcaccggcgaggcggaccggatctggagaaaaggcgtggctccgtggagatgcagggacaccgccggcgaggacgggtttcctgtcctccctagcgccggtagcccctccggcctccccgtctcgtctgcgcttgccggtgtggagagatgagagagcgtcggtagagagagagaagatagaggttaggagaaagaggtggaggaagtgggacccactgacatgtggatcccactatttttttttgactgacatgagcctcaaatattgtttttaattttttggttttcaattttttattttttattttcttgggatcaaactgccacgtaagtgccacgttaatgccacgtaggacaaatgccgagtcaaacgatccacgtaagtgccacgtcagtcaaaaccggggtcaaatactgccgtggacctcgtttgtactggttttgtaagttggaggatgcgttgtatccggttctccggattgaggatgaaattcaggctgggcgataaattgagggacctaaagttaacttagtccctcctcaatttggtgtaatgggcttgaatgatccaggccttttcccaaagagataataaataacagtcatcttaaagtattttacaactattttctatgaggcaaaaaaatatatattaccaaaaaaaaacaagcactacaacccttaatgaatcgatcttagttgacactagaaaatcaaaatctcatatacttgttaggctgtcatgcactggcgatgcacccgtaatggcagtgccactccccactaactaaaccttgtagcacacacgtatgtagcaaattgattagcaaaaaagaaaaggattcaggtcctaacataatgagattatcaaacatgaaagtagctggacaagtggccaaacttgtcatatatcaagcagaaattaaaccccaattccactaattaatcggacaccactcagcagctaaatcaaaccaaacaaaagctagaaagaaaatggtgccaatttgccgaaccagaagctaacacgcgttaacgtacggtttggtatgaccacactaaagtacagtgctgaggagagccaacacccactcatcacttaatctcgcatcttctagtagaatttgctagaaaaatttggcttttttaggttaaatatcaatttgatttcctgtttttgaaaagaaaaacatatacctttatcgaatttattccgatacccttttcgcatacttgatatatgcggttgtaaaatcctttatgcgtgggaccaatgtaggggcagatccagcatgtgacatagagggtacaattataccctaaattattttgtaaacaccctttattaatttgtataatatatgtttgaggagtaaatgatttcgaattaacagacattgtattgataacctacagctagtatatacttaagagaaaatctcggtcaactgatagaaaacaagacatatttgcattactcatagtcactataaatcgataggtattatccatgtaggtgcgggtcatatatttaaataaatacaattctatatttaaattttgtctcaaaataaggacaatccaactatactacttattattgtgacattaatcacatttaattcaaatttctgttcgtcttacagtcagctaccatctcactccgtaccatttgtcatttaatagggggtattttggataattttccttctattttattttctcatctcacttctaaacttacatttacaatgagatggagcgagtaaatgttaaatctcatccaaccaatcgtttatattatgtaaggcacattgatcttatacacgaaggtacatgaaggtaagatcctgttttggatgtagggactaatttttaacccctgtcggattattgaaactaattagaagtattaaacgtagactaatgataaaactcattctataactctgtactaatgcacgatacgaatctattgagcctaattaatctatgattagtttatgtgatactacagtaaacatgtgctaattatagattaattagacttaaaaaaattatctagcaaattaactctcatttatgcaattagttttattattagtttacgtttaatacttctaattagtataaacattctatatgaaatttagtccctagatacatacaccaccaaaagtatggcagatgtttggcatgttgggcagcaaatcaccaccgacggaaaacggaacaaattttgcttgaaaagaaaaatcagtcgtttgcaggtgcagctcagcctatactccacttgagtgcggttgctattaataaacgcgtctcgtccgcctctctctctctctctccgctgctctgcctgactgcctccatcccccaccgcgattgagatggcagcaatggcggcgccgaagctcctcctcggcctggtgatgttggtcgggtgcgccgcggcggacagccaccgctacaggccgggcgacgccgtgccgctctacgccaacaaggtcggccctttccacaaccccaggtccgtccgtccctccgcctctcaatcttccttaattcggagtttctcaatctttcctgttccaatccccacaacgaatctatacgagtaccaatttaatttgtaggagcaagattagattccttctgaaatagtactgtacaagcgatattctgaaatactgcatcctattaacaaacctgcagaattgttgaaaacaagaaataatttggaataattcaggataaaagaatttaattatgcaagggatcatttgctttctttcagtagggtaataaactatgatatccattgctcccaggacagatactaccgaaatttaagacgcccacaatggctccctattttgtcttcttttttctttcctggatataataagtaatacctttaagtgcataccttgctgaataaccaaaaaattctcaacactgttcatgtgcagatgatataatggatctcattatctgacagctgctactagagactgcaaatatttctctagtagcgatgccgtcagttgcgctagatttgtcaaatgcttcaagtggatttatacataatttcttttctactagttgttgatgtatattgtagagtgaatcacagatgtacaaggttcagctttattttattctcacacattgattttgccccttgcagtgagacgtaccggtactttgacttgcccttttgtgccccaggttagattctccctaattaattaaggtgttgctagctgtaatctgccttatgtttacttagtgaactgtgtcatctcccaagtggaggccattgacttctttactataaacaagaaagattctttgcaattaagctgaattttgattcctaacaccttctagtacagaactagacttgtttttctgatgcttattcaattttacagaaagatgaagttctgacttaacctccattctcttttaatcaagttatctgtgttgtcatcaactacagagaaagtaaaggacaagattgaagcccttggtgaagtccttaatggggatcgtctggttgatgcgccctacaagcttgatttccgtgtagattttgatgccaagtctgtttgcagtagacggctctccaaggatgatgtggtcaagttccgacacgctgtttccaaggactactacttccagatgtactatgatgaccttcccttttggggatttattgggactaagccagaaaaggcagatgcaggggataagtattatctttacaggcacatcatctttgacatcctctacaataaggaccgtgtaattgagatcaatgtgcacactgaccagaacgcggtagtggacttgacagaagacaaggaacttgatgtcgaattcctttatacagccaagtggaaggagacacagataccgtttgagaagaggatggagaagtactcgagctcatctgtcatgccacatcacttggaagttcactggttctcaattgtaaactcttgtgtcacagttctcctcttgacaggattcctggcaacgatcctcatgcgtgtactgaagaatgattttgtcaagtaagttatcatttcctatcctttgtggtgattgattcgaagattgaaattttttctagtgacaatatagataggtttttatatattgggattctctagcttcattcataactaagaacaaaatatcctggacacttgtttatatagcttcattcgtagctttgatttctcaaggtttctattaatattattccctttgaaggtattcacatgatgaggaggaacctgatgaccaggaagaaacaggatggaaatatatccatggggatgtctttcggttccccactaacaaatcgttattttctgctgctcttggtacaggcactcagctatttgctctgtaagtccctattagttttacacactgaatttcctatagtgttagttttttaacggacttatctaacaattcatatgctggcctatgcagcacaacatttatattcctacttgcactggtcggagtattctatccttacaaccggggtgcgctttttactgcactcgttgtcatttatgcactcacttcaggaattgctgggtacagtgcaacctctttctactgtcagttcgaaggaaaaaactgggtatgttctattatctatattacagattagcattgcataaatgccttggaatcaggggtcgtattatcttgttattcctattttctgccaattaacatcttagtttcttctgtttgtaggtgaggaacttgctattgactggatgcctgttttgtggacctctctttctgacattctgtttcttgaacactgttgctattgcttacaattcaacggcagcattgccctttggtactatctgtgtcattgtgctcatatggacgctggtcacatttcctttgcttgttttgggaggcattgctgggaaaaacagcaaaaatgagttccaggctccttgccgcaccaccaaattcctgagagaggttccaccacttgcctggtaccggagaaccattccgcagatggcgatggccggttttcttcctttcagtgccatttacattgagctgtactacatctttgcaagcatctggggacacaggatctacacaatttacagcattctgtttatagtctttatcatcctccttattgtcacagccttcattactgttgctctgacctactttcagcttactgctgaagaccacgagtggtggtggaggtatgcattctttcaccttctactgttgtacttgctggattgcatatgatttccattctagcatcaaaacagagttgtcttcatttaaaaaaaaaacagagttgtcttcctcattagatatcacagtaattgtgtgttttctgccaattggttgtctctcaggagttcaagaagccattccctgctatgccttgcaagttctaatgcatcttatcctttcttttttttttcctctgatgcaggtcattcctttgtggtggatcaactggatttttcgtcttcgcttactgcttatactactaccgtgaacggtctgacatgtctgggttcatgcagacatcattcttctttggttacatggcctgcatctgctacgccttcttcctcatgctgggcatggttggtttccgtgccgccttgctgttcgttcgccatatatacaaatccatcaaatgtgagtagactatgcatagttggtgaaggccagagatgaaagaaaccagaggtagctgatgcaattgattagccattattcatagcaaaaggtagtgagcagtaaatctgttccattttgtacgactgatgtggtgaattttgcggctctttttttatgtgttatgtccttgtaatttgcatcattgttgaaggaatcgtgcttagcaattttacaccattccattcccttgatgttgagagacagtgctgatgaattttgtaagaattcagaggagcaacctcttgaatattatagcctgaaagcttgatccgaaacaaaccaatagaaactatgacatctgtaattgttttgttacccttgagtgaccactatagtctctgtaaacactagcaacatgtggtactccatattttaactttcggtttgatagaccagtcgttcaaaatagtttttaaagttaaaattagttatctgaaaacacttgttgcaaacaatggtatttgataaactaatcattcaaaataattttaaagttccaattctgttatgtatatcatgacctatgaactgaaagaacacacgaattaaagcaatggcaatttatggtacttgattaaagcaatgacaagcacacgaataacaggaacagctcctttcaggaatgttacatcgtccagaaacatcagcaggatgctcatagaattttccttcagactaaaacatatattagcaatgcccagaaacaactccacagctggagttgtcagagaagctacagcaatttgcgattcaatgactgaatcgacaggaaagttgcaagatgacgaacagtatagtagtaacatttagaatgcagaggaactaacagctaatataaaaactgatcataatctcccgaccttacatcattaggaacatactttactcttttcactttcaggtcagctaaaacaaaagcagcagcaaatagaagaaaatcaagaagcgacgggcttcaaagctgcagatggcagcctagaagaagtgtgcaggaacacagatggaactatccccaaattatccacagaagaattttcggagtaaaagacaacctggtttctacctcaaacgaatcggaatagctatacaacatttgacagttttttggatgaaaaactttcatatgaatttatacctcaatgccatatgaattagcacacgagcttaaaaacatgtgcaaattcaattaaatttctgtcacggcctaataccatatgattttaaaaaggacaaagttataattgaaagaaaattttatacacagtaaaatttaggagtgtgtgtactccctccgtttcacaatataagtcattctagcattttccacatttatattgatgttaacgaatctagacatatatatttatctagattcatcaacatcaatatgaatataggaaatgattgaatgacttacgttgtgaaacagaggaagtattagttagcaaccctgtagctgtatctcgtagaagagtaaacgaacgccagcaggtttacacagctgaggccgaacatgagccagaagaagcaatccagccgtcctcgattgagatcgtcgggaatccacccgccgccgccgcccttctccggcgccgtcgcccacgcgaccaccgcgacgatggccgagttgaggtagcttccggccgccacggcgacgaggctcaccgcggtgcacaggctctttatggtgtcgggcgcctggtcgtagaagaactcgagcaggccgacgctggtgaacacctccgccgcgcccagcgccatgtacgacggcgcctgccacacgatgctcgtcgccgcgcgccgccggcggctcgcctcgagcagcgccgagtacgccatggccagcgccgacagcgccagcccgacgccgagccgctgcagctgcgacaggccgcggcggtcgccggtgacgcggcgggcgagcggcatcagcgcggcgtcgtaggccgggacgcagaggaggatgctgaccacctcgaaggtggacagcgtcgccggcggcacgtcgagcgggccgacgcgggtgtccatcgccttcccctgctccacgaacgtcgacgacatctgcgccgtggcggcgaagaagaacaccaccgtcggccacacggtggacagccgcagcagcatcttgacctcctccacctgcgtcaccgtgcacagcatccacgggctcgccatcgccaccgccggcggcgacgccactacggccgccttgtccaggaacgcgaactgattggtgtgctcgatgatccggtagtcgccgtcggggagctgatgcaggagcgagctgtcgccgggaagctccacgccgcgattcctgacggcggcgacgaccacctggcagagccgcgtgagggggctccccggcggcgtgtggaacgcccggaggccgcacagggtggagcagaagaggaaggcggcgagcgcggcggtcatgaccgccgccgggatggcgaagccgagccaccagccggcgcgctcctgcacccacacaagcacggtggccgccagcagcgagccgacgttgatgcagaagtagtaccagttgaagaaggacgccctcgccgccggcgccgcgtcgtcgtcgtcgaactggtcggcgcccagcggcgaggcgcacggcttgatgccaccgacgccgagggcgacgaggtagagccccaggaacacggtggcgcggaggacgccatcggaggatgcatcaaggtgtggggttgcgaacgacgccgagactgtgagcgtgatcatcccctgtcacagattgaaattttataacgaaatttcagaaatttttcgttctttattgttttttcagtccactggtgaagaccatcaaaataatttgtgaaacaaaaattaaatcttaaattttgattgacctttaagaaattcttgattgccataagaagatgttcttttctaaagaacttgtgaaaaaaaaacataatatcttcttaatttttgcttgacatttcgcagaaattcttgattgccataagaaatttattgttctctctctttttcagtccctgtaaagcatgaagaccataaaaaaatttgcccaaaaaaaatcttcttaagctttgcttgacctttaattccgaaattctctattgtcatatttgatatgcttttgtttgttatctaaatcttgttgtaaaaacatttcattcacaaaaatgtctgaataatgaaaattgaataaaggagtatgatatattttcacattaaaaactaagaaaaatctcttcaaacattcagtttttcgcattaacaaaaaacttgtttgagcatacttttcttaataaataaaaaagtataccatggagtagatggagaggaagaggaggatggtggtgcggcgacccaagaaggagtcggcgatgaatgcgccgacgagcggcgtgaggaagcaggtgcccgtccacgccgacacgtccctggcggcggcgacattgctctcccctaccacgccggtgaggtagctcaccaggttcctcgcgatgccggcgaacgccaggcagtcgctcagctccgtccccagtatcagcacgcacgccctccacccaccgccgccgcccttgtcctcctcctccttgccgccgccgccgttcggacgaagcagcagaggcctcttctcctcgtcttctgctgctgctgccgccgccgccgccgccatggagattttgcttccactgtgtctgtgtgtcttgctaggagctactagctcatggacttatgtcatatcgtatttccgagtgaatatttaagaaattttgatgagaatttagtgggggaaatttagattggagagaggagttaggtgtatgcacaagctgcaattgccaaaattgatttttgggatttgactcaaggtagtgtacatgccaacttattaaaaaaaaggatttttgttacgattagcctgttgtgttggttaatctagcgttgctgaaatgatggagtattttaagaataaaaaaaaaattctaaccttatatagattatttttttctttcatctaattttattattggtctatgattacatgagaggagaaatggggttctatactatagagttgcactcatagaattgatagttgacgttttcttttctttcttttttttttgaaatgtgtatgtagtactaatatctattgagttatttgttagaatctggtttccttaacggagattgaactagccattattttagctaatgtatttttcctttcagcaaagaaagctactctacaaaccttattaatttcagcaatgatagaggcaacgcatttcaattatctttagaaaaaatgcgcaagctgcattcgtagaatttgattggttcatgtggaaggtggggtttggatccagggacttaactttagtccctgtctttagacactaatttagagtattaaatatagactacttataaaactaattacataaatgaaagctaattcacttgacaaattttttaagcctaattaatccataattaaagaatatttactgtagcattacataggctaatcatggattagttaggctcaatagattcgtctcgcgaattagttcaagattatggatgggttttattaatagtctatgtttaatatttataattagtatccaaacattcgatgtgatagggacttaaaagttttagtcttatctaatcagggcctgaaatctgagccacgcaaaccaccaaccgcacgacaaggttaattagggcctgttcactttgatgccatttccaaccttaccaaattttgataaagttatcaaaaaagtggctatatttagtttgctgccaaattttgataactatataagaaatcctaccaaaattttggcaactatgccaaaattttggcatagttgccaaaatttggcattgccaaaatttggtaaggttttttttggcgtcaaagtgaacaggcccttaatttccatgtctccatcacactcacagtgccagcggttatactgggcagactagtcattcctctgttcctctttccacgttcatctgtaggatttaagggcctgtttagttcacgaatttttttttaactgtcacgtggcatgtttgaccggatatttgaaggggttttcggacacgaatgaaaaaaataatttcataactcgcctggaaaccgcgagacgaatctttcgagcctaagtaagccgtcattagcacatatgggttattatagcacttatggctagtcatggactaattagactcaaaagattcgtctcgcaatttccatgcaaactgtgcaatatgttcttagacagaaaaagtaggtagtagcacacattaattctagatgaagaaaaaaaaaactatgatatctctcattaaataatatgtggtgaataaaaatattgttgggagtaagaccggacagaagttctaatgattgtagctaacatataaatttataaaaaatgttggtcaaagctaaaaagtttaataagtataactaaaacgacgatgaatttaaaaggagaaagtacacaattaatataactacacatacagatggataagtcaccccaaattaacgtggtctttgaataaacgactgtcgcctattctttttcacgaattagctcaaaccattccctggatcaacttaattattggacatgctattaatcaaccactatctatgactcggctaattggtgcatttcggcattcatggtacatctaatttaaaaatgcatgttttttatgggagaaatttttactgcactttaggaaatttgtagtacaccgaattttacatttaaaaaaatatctccactacctaaagtattaaattttatcataaaaaaatatggtacctttgaatatattctcaagatagtaaaattactctttttacttactgccgacgtggataccccaagacaggatgaatagggttttagggtacgttggtacgatgatctatacgatacaacatcaagcaaacaagaagacaaggattatactggtttagatccctcgtaaggtaatagccctagtccagtttgtatgagattgacatggaaaaccatagattccaatagaagaccgacgattccaagattaccggcgagatccttgtcgagatggtttcgacgagatctcccagcgagtaggcttcacatcctccgatttgtaggctatggtggtggtgttggcgtatgattcgataccttaggacccctagggatgtgtatttataccgtgagttaccttgatctccaagtagaactcggagataccgaactcaccacgatacagtacaatcctgaatcccgatccttttccgagtaggactatgttatacacttgcctatgaggattatttccataatcttttgtcgatttccttatcgggaaacatatcgtacatacgaaggtatgcagtatccgtatattccataagtcgtaggttagaaggttgtatcttacccgtaaccatgacacttacctcttgggaacccttcccatctacacgcaaaacagagtaatagattaacacatgattaattaagtattaactataaaatacttaaatggattaatatgatgtttaaagcaactttcttgtagacactttttacaaaacacgtatcctttagtagtttgaaaagcatgcgcgcaaaaacacagcctaagtaccttttgatcaagagcatccgaaaacatttgtttttaacttccatttgtttcttcgacaacaagtttccacactttccagtcagttgccaataatttgactatagcatatgcatccctgaaaaatcaaggggtggcccataagctcacttctatcacctctttacttattatagatgaaatattaaaatacgtctagtcaaactttcaaatcttaaatcaccaacagataaaattaatttatgaagatttgttatgtgaaaataattaatttgaagtatatgcttcaatggaaaaatacattcatatgattataattcccatatgaataatgtaaggctatgtacaacgttgtgtaataacaacctctcttcattaccatgtaagtaaaattgatgacgtggaaaagagatagaggaaaaagaaacatgggtgctacgcatcacagcggatcagagtcgacttttaatgtttattaaagagaattttgttgcagggtggagaaaaggaaagaagggtagtaaaaaaatattttggtaccttccttttccaacctccctcccttgatttccacgcgtacgcttttcaaactgctaaacggtgcgttttttttgcaaaaaatttctacacgaaagttgttaaaaaaacatattaatctatttttttaaaaaaatagcaaataattaattaatcatacaataataggtgctttgttttgcgtgccggggaggaggagggactnnnttttttttgaacacagcctaagagttcttattgtctcaactattgtagaagtatagttttctaagtgctagagtatgtatttacctttgtacatgtcttaagtgtgtcgttgtccagaacgacgataagaaaaaaggtaaaagtgtcaggaagcctagagatcgtgaggatcccagacgagcaccttacgcgcgtactgtagccgatccggcaacacaagaaagaaaggaagcagaagaattttggcgtagcgcaacagctagctgcttttctggtttacttccttatataacaaaatgggattacaatgaaatcaaaaccactaggaccgcttctcacgctggcaattcgctgcgtccatccccacagctgctcaacgtgcgtcacgctctcggtgcacgatgcgggctctatgagctaatctcgcgaccctcaactggagcacgactgccacaagtttcggcaagctcatgcaaagctgaatcaaacaaatgcagaaataactgaataactaactaactaactaaggcacacacgttgtatttgcaacaatgagtaatttggaaataatcactgccaacaaaaagcttttggttgggggcggctagttgacgcaaattgagcttgtcctatgtctggcgaattgaatcagagtcacacacgagtcgcgagtagtgaggggacaatgcgctaacacacttttttttcttccccttgatgaaattgtataataattataaataaattactaagttaaaaaaattcaaaatttgagttgaaaggttaaaagtttgtgttgaaagttcaaaatttggatagtgttttaaaaattttctgtgaatatttgaaattttgagttggattgggtaggtttaaaatattttggtaaaagttttaattttgagttgagagttccgaatttgggaggaagttttaaaatttatagttgaaagtgttaaattttgagttttgaagtgttaattgaagtcaaagatttcaaattttgagtatagtttttcaactggaccttgtgcaactaaaaaatttctatccaaatgttaaatcttttcaaaatcacttcaaaaatcaaattacttaaagaagtactcattgaatgctcattcgcacattgggagtcctctgtgcgagtcgtgtgatatgttaagagtcacctgaattaaaagaagtggtgctttagaatcagaagtagcgagcgtgcactaaataatatttccatcacctatgatgcctacactcaactacaaatacactcatcgttaattaaccaaagaacaaacggattaaggaaattcgtccattttactccttcaaactattattcagctcattttactcctaaactattaaaaatgtttcactttattcttagcatttctctttatggtttatattttatatgggttgtattttgaactgaaaattattaagccatttatgacacataaatgacatacgtatcaaagttccaaagtacttcacttttctttcatgattatttcattgaaatttaaaatttgtttgaatcagtcttaggtgttttcgacttatgcaaaaagtggccaaatttaaaaaaatattactaagaggtaagttgtaatatgcatctatcgatcgttttgaatttcaatgcaaaaatatgatttatgtgtgtcgacgtttgatgtttcgactacggtatttggacagtatggggatcgtcggtgctaggatatacgcgagactgaggtaaaagaaacggagacgaggatttttatacaggttcgggcccctgagctgtcaggtaataaccttacatcatgttggccggagccggagttgcttttattcaccataatcacaccagtacaatatgtgggcagcctatctaactgttgtcgacatgttggtctgaaggtctgactcgtagtcgacaacagggtagtcttcctcctcgaatccgtgcccggcgagatcagagatagcgctttcgtatctcctgacggtatccggagacaccgtaggggaatagccatgcctatccctgaagtcgatatccggcggtgtgtcttggcgtatgtaggcttgtatgttgtggcttctggtgggcgtgtgttgattgtcatgggtgtcttccgtggtggttctcccctctcctcctagggggtcttgtatttatacccataggtgtccccttgtccaagtagaacgagggaaaccaatatggatacaatctgagtagtcattatcgtttccatgtagaactctagttgtctttccttatccggaactccctccatatccgcaggttgtttccgtataggacatggtatgtggtgggtcctgccaagatttagtcaactactattaggtatgtggtatccataaccatgacagtagcccccgacttcgatgcaaatgaacgaattcatattctcaactgcgcacagacattggagtaactgttatcgagcttatgtgaccgttctcggtgagattagagataacgttggacttcctttgtcagcctcatgcgggcaccgaaagggtttgtctaagtcattctctgatgtcaaccaatgaagtacatagcgtacgactaagtctcccgtcttgccgtaatcgagaatttggattgaagtcaagaaattctttcttggtgggtacaccatctcttcatttcgtattccttgtcgagatccagcaaccgttctcgagcgaccgagaaggcgtagagtctgcgacggagccttgccaacattggtcgtactcgccttagtcgatcttggtgtagaaccatagagacatggagtctttgtcaatgtcgaatagaattttcctaaaatcaatactcagaaaagaatattagatagaaataacccccgagcgaatgctcaaagggtgacatgttataatatgtatggtaaactgaaaatgaatcaaatttaccgaccaatgttttgtgtaagagtgtgttctcagttaacgactttggtcagtcgtttgagttgtacactctccctagcccccagccttgtcgtcggagaatcattttcggaggagaaggctcttggacccttgacctaccttggttgaataagcactgatcctagcccccagccgtgaagttggaaaagtcaacttccgattacacggcttggttaatacgcacggcgagaactcttacacgaccagatcttacatggtctttcgtctctgaaggatccgacaaggccttatcggctctgggcatccccaacggaagatcccttaggttcctcggaggccttgtcaagacggcgtaaagggacagtaggataggtttcaacgctaggtcgtcgtggtaagggatctctgggtaaaacacttggcgatattgtgtacctgctatcaactttgttgaaatagaggtagtaggagagtcgctacactgctagtcgaggactaggcagtagtcgtaactcgaccacgtaaagtggaaatagtgggagagacgttacatcgctggtcgaggaccaggcagtagtcgtaactcgaccacttaaagtggaagtagtgggagagacgctacatcgctggtcgagaaccaagcagtagtcgtaactcgaccacttaaaatggaaagtgggagaaatgctacatcgctggtcgaggaccaggcagtagtcgtaactccaccacttaaagtggaaagtgggagaaatggtcgtggaccaggcagtagtcgtaactcgaccacttaaagtggaaagtgggagaaacgctacatcgctggtcgaggaccaggcagtagtcgtaactcgaccactagaagcaaatgtacgagagatcactacgattaactggttgagaaccggtgagtaggtgtctctcgatcattttgagtcgtggtacgaggaccactacgttattgctgtagtcgtacctcgaccatctgaagttgcggtgcgagagattgctgcgtactggtgcgagaaccagtgagtgagcagaattatctctcgaacaacgatgggagttgcggtgcgagagattggtgcgtactggtgcgagaaccagtgagcgagcagaattatctctcgaacaccgatggaaggtgcggtgcgagagattgatgcgtactggtgcgggaaccagtgagcaagcggaattatctctcgaacaccgatggaaggtgcggtgcgagagattgctgcgtactggtgcgagaaccagtgagcgagcggaattatctctcgaacaccgatggaaggtgctagagttggtttattgcaagtgtatctcatgtggccagcatgactcacgtgcctaacttacagcatatccggatgtccgttcgcaatcatgtcgggtgatcaagccgacgatgttcgcgaggaattatccattaacaaccttttctcgagtagtccagccatggccggtgctatgagataggtcgtcggtctttgttggtaggttgggtgcgataactccgcatttgtcgagaatgttctcgataatggagtgtactcgaccataacctagtcgagtgctcagttgttcctgaaaaatattttctagaagacaagatatatagcagataatatcgagtatgtattcgaaaaactgcatggatcttctagtattatcaggatataacgagcagattaaatattaggcattatgtaaaccgtaaacaagcatgatttatacagaggaaaacagagcgtgctccagcgttagaccgcagttggcctaacatcggggacgctcgcgcgatatatactgtataaagaacatgctctaggtaaacataataaattatagatctgacaatgccgtataatctgaaaataggtacggtaaattatatataaaatattgcgtacctttgtagatatatgccggatatatctacgaaattagtagattaattaggaaattaatcttactaattaccttagaatttgtactgcggctttttggctgtttagttgatctatttgcttttggcttacgtcaccagaatgagcagctcgattgccaactaggaattgaattctagtgcaatcacaggaactcctcaactccgattagactacaagccaatgaacagatcaatgcctcacgccagccgagtttggctactcgggcagccaatgccttacgccagtcgatgtcccacgcgtcgagggattggtgttggatcagtcttagatgccgctgacaccatggccctctgccgtggtgacgtgtcgaagcttggtcgatctcaccggatcgaatagatggtgacgatgattccaatctcgttgggagacgtactctggccgggttgaatcttcctggtcggaagtcgtcaagtagcttgttgttggagaatccatctcttaaacccatctcgtcgaaatcctgaagtaccaaaatccccctacctggcgcgccactgtcgacgtttgatgtttcgactacggtatttggacagtatggggatcgtcggtgctaggatatacgcgagactgaggtaaaagagacggagacggggatttttatacaggttcaggcccctgagctgtcaggtaataactctacatcctgttggccggagccggagttgcttttattcaccataatcacaccagtacaatatgtgggcagcatatctaactgttgtccacatgttgatctgaaggtctgactcgtagtcgacaacagggtagtcttcctcctcgaatccgtgcccggcgagatcagagatagcgctttcgtatctcctgacggtatccggagacaccgtaggggaatagccatgcctatccctgaagtcgatatccggcggtgtgtcttggcgtatgtaggcttgtatgttgtggcttctggtgggcgtgtgttgattgtcatgggtgtcttccgtggtggttctcccctctcctcctagggggtcttgtatttatcccataggtgtccccttgtgcaagtagaacgagggaaaccaatatggatactatctgagtagtcattatcgtttccatgtagaactctagttagcgatgcttatccggaactccctccatatccggaggttgactgcgtataggacatggtatgtggtgggtcctgccaaaatatagccaactactattaggtatgtggtatccataaccatgacagtagcccccgacttcgatgcaaatgaacgaattcatattctcaactgcgcacagacattggag

SEQ ID NO: 7577 - DNA, 19762 bp, Oryza sativa
ccgatctgcatccacccgccgagcagagaccagcgccgccgccgtcgccgtccgttcctcctgtatcgcgtcctggtgagcatccgcccctcgttacgcacatttttttattcgaatttttttttcaagaatgaatttctgtgcgttaaccctagatagtacgtagcttccgttgtagatctggatctggaaagcttttctcttgatttgttcgtaatgtgatactaatagcagtttctttgcttgtttgtttgtttccctaaagaaatttcttttttctgggatgtccgacgttggagacgcccctgtgcagcgccgctcttgttcgaatccggccggtggtctgtaggattgggcggctgcggcggcggcgagatggacgacgacgccagcatgagcataagatgggggggattcttcgagtcgccggcgaggaacctcggcctgcagctcatgtcgtcggtgcctgctgagcgtgacaccaagcagctgctctctggtagccccttcctgcatcatcagcatcagcagcatgtcccgcaccaccaccatcagccccatcacccgcgtgactgcggcgccaatggcaatgccaatggtggtgctatgcctcctcctcctgccacggaggctcccccttcaatgccgatgaacttcgcgcgcagtgacatgtggatgcacccgcaacagcagcagcaacatcatcatccccgcgagcacaaggctcttcacaatctcactgttggccatggttcttcgcacattgcgcatcatgacccagtgggctatgggatgatccccggtacgcataccctgcagatgatgcagcagcaaacagagcctcaactgcaacccccaccaccgcctcagcagccaaaagaggaatgcatttcctcgccattgatcgaggaaaatgtacctgttattgatgagccaccacctcccaagaagcggcagcagggccgccaacccaaggtaccaagggctaagaagcccaagaagtctgctgctcctcgtgaggatggcgcaccacccaatgcaccagcaccacggagaaggggtcccaggaagaatatagggatggtaattaatggtattgatttggacctctcaaggataccaacgcccatttgttcttgcacgggcgcaccacagcagtgctatcggtggggtgcaggtggttggcaatctgcgtgctgcacaaccaccatctcaacgtacccactgccaatgagtacgaagcgccgtggtgcacgaatcgcaggcaggaagatgagccatggtgcgttcaagaaagtacttgagaagcttgctggtgaaggttataatcttaataatccgattgacctgaagaccttctgggcgaagcatggaacaaacaagtttgttaccataaggtaaaagacaatgaaattctaaaatttgttggctttgtaggttgctctgcagctgtttggtctgagtaattgtctgtatgtactctagattacaaactgcagaatccttttaggtgtaggttttaggcatgtcctgtccctttgcagtagtttacatgcctcatctgtgacctgggtgctgacctgtatggtggctatctgcatgtatctttgtcattatctttacaagtagcagtgtaatgcgacaatctctaatttaggtggcatgaaagttaatctgttcaacgtttctcattatgcttaagtcttctgttatacaatgctccattgcaatgcctggatgttttacagaatacaatatagttgctatctcatgaagtagaaacgttatctttttcatgctgtgttctgtatgcatgcaaagtttatatagcctatatatacatgtcttttcttttattgaactgatgtttgcatgcatgatgaatgtgggcaaaggttctgtacctaatctggattacttaaccagttctaataatatctttactgtgagcaaggttcttgccaatttcatttgatgtgctcaaatctctgtcagactctattccgaagtcccttggtatcaagaatttttagagtaaatgctgaggaatgtcttttgccacttgtctaatgtaacatgcctttagttctgccttatacgtagatggaactctgggaccattgatgtcatctttgctatttagtgattaccctttaagtccatgtgttattatttgcacttctttaggaggcaattattggctagtaatctaagtcctatgtttcaaactcagcactttgtttaatcaactttgtgcaaacagtaaacagcagtcaaaatattgcaattacattctattattttttgatttgatgatcttttttgggataaagaaaattacctgtatagtttgaacatattctgctctattatgctgcaagatatcaagctatctgcataaatcttgtcatcctgaaccttcaaaaaatacagtaatatttcacatgttatgcattcaaaatgttgatcctgtctactagggcaatttaactctgtcaaggctaattgcattataaggtatgcatgttctctattttttctatttgtagattacagagaaagtggtgccatttgtaataaatgatgttatgattcagcaattttcttttttataataaagtactataataattagaatgctgatatgagaatgaacgatgatgattaatgagcatcagaattatatgaaatgttagataattaattatcacaaaagctattttctttccaacttcatatatgctgaaatgtgggttgctgctagtttcgtgttgcctaaactgcagtgttacatgagaatattgaatgtttgcacatatgttttagaggccttgagtgccacaaacgatggacagcacctttttgtaaaatgtaaatacccagtaaaattattgtgcaaaatatttggtagtctatgaagccattaggaaaataatgtaattctgagcaaatagaagctaatactgccaatactagagctattgtgatagatatagttcactgatatgatatgtgtgaaacgttataacttgagctattgcgaattgcgatagcagagtgtgctatttatcagcatcatcatcgtacatctgggaatgttgtgttaggtgatctgtacatgtactctagttccatacatgctagctactgctgtttttcttgatctgttctgttggtgtgcatgcgccagaccgatgtatgtagatctattatctgcatttgttgatcgttgtacatgtttttttattttttgaaagaaaagtatgctatgtttagcttgctgagatgcaaatgcaatgcatcatcaggctgagatgtagctgcaaatagttcactgtgatgtttctcattgcttccacagttaccatggaagcagcagtattcccatcataattgccatggaattttgtgtatatgatgtgatatggttttcactactgttcatacttgatgtgttctaaacaatgagagtgtgacactacgtatcttgaagctacaaaatgaataattacccttttattccatctatatatgattgttcttccatttggtcatttcattgtctcgtgtggtcttcacatggcttcattgttacttatgctgagatatatcgaatcctggtcatcattcatccattctgatgcattttgcactagttagcctgcctccctgagcagtttacatcgaatgcgtattgttttgttgtacaaaagattattatttattagtattgtatagaagaaataaacaaaagcagctctaatcaggtgaactatagctgcggctaaaactgggcaagtttttgcattttaacttatggaaaatcttgtttgtgcaactctccaaggaccaaagggatctgtattggccatgtttcagcacacggcaatgaggttcagacttcagaagtccaaactgatttgtgtcttcccttcccaccatgtactatactgattgctatcttgcaacttgaaactcatcattgaccaacagtttcatcgatcagagcctattaacatgcagagatataatatctaatagcatttgtgttcaagttggctcacatcttaagctatacttatatttctagagcataaacagtaataaattcataagatgaagaatggattgtatttaatacgtatcaaatatcgcattgaagtaactcgttaggctctggtcctacacatctaaagccatactactccattaaaaaaaaggaaaaaaaagataaaacattacttttagggatgaatttgaacgaatttggacttctggggacttgtcaaatttaatttatccctcgaagttgattttttttttcttttggacagagggtgtactgtagaatctaggcagcattatgcagttgcacatctggagttgcaattgtaacttttcaagatccaaattatagtactttcagtaaaacggaatgaaaaacatgcgcatataatgattttttaggctcaaatcatgactatacttaccttaatatgcatcacatcattcaaccttattagtaataatgtggtgtcatgtggatctccattctccaacttctaaaaagaagctggaactggtaacaacttccagagatggccaaactaattagcatgttggttctttattaggcactttttttttggcagaggtaatagtaagtaggatatgattatcttgcaagttaataatattaaactcttagtaagatacacagtgatatagagctcagaagacagtgaaatgagctttctctttcgttgttaattgaactgaattatcccaagttactttcatcaatttaacgaattgacaggtgattactgatcatgacatccactgatagcctgctactcatgagaacaatttactactggattttaagtttttgcttataacgtttgaccactcgtcttattcaaaattttttgaaattattaattattttatttgtgacttactttattatctacaatactttaagcacaacttttcgttttttatatttgcaaaaaaaaattgaataagacgagtggtcaaacgttacaagcaaaaactgaaaatcccttatactgtgggacggaggaagtatatatgttaggtcaaagaatgctgcttcgaggtgctgtaataaaggttaattttgttccttttgagatgccaattaagctagccaaaaagaggcgattgcaaactggtaggaacaaactatatgagaaaggttactttctaaaggaaattatgataatgttgtttgaccaaagctagcaaaggtaaagcaaatgcttccttttcgctttcggtaatagcagtaacatgtcgatcaatcaagagaccaaatattgtaattaattaacaaatggtaaacaaaagtgctcctcacaaatggcattttaccgaaactgattggattatgtattttaccgaaactgattggattaacaacttggatccatacaagtcaattgcctcacctgcagagctcaaatattcctaggtaatttgagtgatcatcttttacaattcagcttaatttttttcaggcatgcctcaaaatgagattcatgtggaaatcatgcacaaaattatggaagtttcattaaaattcatgtaaaatttctctcttccaaacttgaatgttccagagttcctagcagatgagaatatgtagtctcctacgcctatcagtctataaatcgagaaagcatggagactgagtagtagtaaaaggcaatgcgtgcacatggcaggatgaaatcaaaggtgctttgcaatcgcaaaggttataatagcagcagtaaactagtcatcaaagtaattaaagggaggcatcttagcttgtggatgtgatgcatcaagcatgcgggcagagacgccatcatgaatgtaattccctttgatctaatatttactattttttcctaaaaaattctcaacattttggtttcagtttcagattcaactctgaagatttttgttctgtgagaaacaacagattccatatatgaaggtataagatatatactggtattgcaaacaaataattaaccatattctctgcaggtaaaagattttaatttgtgtcaagaaatataaggtagtatttacccgcataatttggagatatatgcaacttcaatagcaacgcacaagttgtacatctaggattttggtacatatctccataacaattccactccagttaggaaattgtttttgcctcaacaaaaagaagaggaaattgttgcacactcctaaattatttttagttagtttctctcttttttatttctcattaaagtttttgagacttgccatcagttatgaacaacacctatcttctttttagttttttaattgaatatcacacatgcctgcatggatctcatcagaaacatagccacgtttgtagtgtactgtttagatgctccatactgatatgatgattagatatgtttcttccacaacatcaatcccgacatccaaatcgtcagaagttagcaatgttgcatttgttaattggatttgccaacactaatgcttgtgggggtaattatgattacacgtgcggcgccaaagcataaaagtgactttgagcactcaaaggggacatgaccacccttgttaatttacttgtattttaccaccattagtgggatgtatgacatgcataatatgacgtacacatgcaagttaatgttaattatttgagcaaattaagtatactatgtacataaacatcacattcaccatgtctaggtctagtatctattgatgcatcgtcggtacccaatgtgctcaatgatacatgtcacataggaccatgagatgtttaatgatgttgacctgccaagtttttgtacaattttttcccctaaatgctttccatatttctgtactgagaattctaaaattgatatatataggacgccagacctttttctctgaatagtgtgtgataatctggaaatttattttttttacggggaatctggaaatttatttaatatgcacgcgtaatggtgtgcgtgcattttctacaaaaataatagcaccttaattattagaattctagttattgagttcacaaccatgaaatcaaataattactttattgaagattaatagataaattatgcttaacaatcttaaataatagaattttgttaattggaatgccattggactacatgaatctaacctaattgacccaaagaaaaaaaaaagaagggaacacattgaagttaagaacatcattagtaaacgagattgggatgaggccgtgtgaaatgatctccataattaaaaccacttaaggatatatctttagcacggattattcatgatatccaacgtgcgaattatgtacttcatccaaccttgatctacaccctaccaattaagaattaataagaacaagaacaccaacttgatgcgggtagaatattggtgccatatgctgttatgcgcagcatcagtacactcctagagaagttaatttccagagtaaaaagaagaattaatttgataaaataccactcatttatagatgaatatatatataaggccttgcctaccatacatttcctttatatatagtttgctaattagttcatagaggattacataactctttacatatgaaactgaatatatactcgcataaatattatcatattcaattttgtttctccatcactaaaaaaacataacagacaaaaaaacatgatcttatcacatataaagtgcaataataatgaagatagaaattattaaatcacaagggccctaataggaagcagagtaaagaggggagcattatcatctctaatgccaataggaatttttttaaagaagttgatgtgatgtccctcccctggtagccctcctgtctgtgatggaccactgaattttctccccttaactttctgagtgcatgcagcacaattctgcctttcccatgcacacacatgatttcccattgatccctaagcaaagcaaccttgatatgcacacaaaaatatatatttgcaggaactttaaaaatccctttttctaacatcacatctggtgacaagtaatataatgcagatctccccactcaaccagagacacaatcactgatgttactcgttaaacattattctgcacaaatagatatgtgtctgaactctgttaaaggttttccatatcgtatcaacataaaaatgcttatgtgtcggttaaattttttttagagtatattaaatcaaatataatttttggctctgaaattgggactgtacattgatcgatgtaccgctcgcggtctgcttttggttctccaaggacgctttcaccctggttagggtgtggccgtgtgtttagttgtttgggcataaagttttcgaagtatacagacgcatatttgaagtattgaacgtagactaataataaaacaaattacatattccgtctgtaaactgcgagacgaatttattaagcctaattaatccgtcattagcaaatatttaatgtcgcatcacattgtcaaattatggtgtaattagcctcaaaagattcgtctcgcaatttatatgtaaattgtgcaattggttttttcccacatttaatgtcccatgtatatgtccaaacatttgatgtgacgtttttgaccaaatttttttatctaaacaatgccttaataaattgacattaagttcctccttactgtcccacacatgtttttttattttgtacatgagattttctcagctatttactcgatgatatgaatccagaggtttctcaaagaaaaagaaaatccgagtcagattttatgcatcctctgtgcacttgtctctgcttataggaaaaagtacgaattacccccctcccgaactatcacgatcgtccgaattatatttaataaaacaatgaatgatctctaccaaccaaacaatatctcctaggctagtatgtgtttttcgcgttaccagtggcgcacacgtggtaatctagtcagcattttatttaataaaacaaatgtggggcccacctatcatactcttcttcctctctctttctattctctctcgctcttttctctctcacgcagcgcgcacggcaaggacgggcggtgggagtgggcggttggcgaggatggcacggggataggcggtcggcaaggatggcgtagacggtagcgcggacggtgcggacgtcggcgtggaggcggagacgacggaggagcgtggcggcaaagctagctaggtggaggactccgactccagtgactcgttgatgctattggtgaggtaaggacggcggcgagtagggggcggagccagttgtgggtggcggagggggcccgaggacgatggcggctggcgacggaggcggaggctgaccgggcacgcggggacgcgcggtgggcgatgggctcgtcctcctcgtcgtgggcgcgtggggacgcgcggtgggcggcggcctcctcctcagctgtggcgcacggggacacgcggtgggacaccgccgctactgcgggctcctcctcctcgtcgtgggcatgtggttgccgatggcgcgcagggactgcggtgggcggcgggctcctcctcctcgtcgtggacatgcggtgggacaccactgccaccgcggctcctctttcgagccatcgagccgcgtctcgtcctacctccccgcgcctcgctccccgtccgtctcacgcctctcctcgtccgccggcgatgcgccggcgccggcgcagagaaccgggcccaagggcgggaggaagagcgtgccgccacgctcgcctcacctcgctctgccgccatgctcctcccccgccgccgctgccccgtgatagagagagagaggaagaatgagacacagatagagaggaaaagtgagagagaggaagagtggaagagtatgacacgtgggtcccacatttttttaataaatagaatgttgactggactagcacgtgtacgccacgtagaccaaaatcaccgcggattgagtaggggggtaattcgtccggtttgcatagttggggtgaagaatgtccggttttatggtttagggggtaattcggatgaccgcgatagttcgggccgggggagggggtaattcgtacttttcccctgcttatatgatcattgtatgaaggcaaggaaacccctgatggctactttggcgcttaggaatttcactgaaaacaattcattttccacataaactgaataaaaaaactttttttcgaggaggcgagcaggagttctgccgtttcatattaggagaaaagacttaaaaaaaaacttttgtacaggagtagcaaatacagtaaagaagaaaaaaaggcaacttcaggctaaaattttggcaaactacatttgggccagctcttcttcctttgatttgaaaagtaatccaaaggaatgtttcctggaccaaaatcccctataaaacccacctacactgatagttgtccaaggcagtatcaatccaactcacaaacacaaaagtgtaccaaagcacccttaactggtgatgttttataaacaccacttcaaaaaaaaaaagaagagaaaaagccatctttatctctcaaaagcagaggattacacaccataagccataatctttctttgtaaaccactgatcatcatcaagagtgaccaacacaacacttgctctcactcaccctctgtcactcttttcttctccatccatccatcctcattgtcccaacattgcatccacatgccaaatggacattctcatcccacttctcctctcctcgatctacgtgtcgtcgtcggcggcggcggcggaaaccgatgcggcggcgctcctccgcttcaaggcgttcgtccacaaggatcctagaggagtcctctcgtcgtgggtggatcctggtccatgtcgctggcgtggcgtgacgtgcaacggcgacggcagggtgacggagctcgacctcgccgccggcggcctcgccgggcgcgccgagcttgccgccctctctggtctcgacacgttgtgcaggttgaacctctccggcaatggcgagctgcacgttgatgccggtgacctggttaagctcccgcgcgcgctgctgcagctcgacctctccgatggcggcctcgccggccggcttcccgacggctttctggcgtgttaccccaacctcaccgatgtcagcctcgcgaggaacaacctcaccggcgagcttcccgggatgctcctggcgagcaatatccggtcgttcgacgtgtccggcaacaacatgtccggcgacatctccggcgtgtcgctccccgcgacgctggccgtcctcgacctgtccggcaaccgcttcaccggcgccatcccgccgtcgctgtccggctgcgcgggcctcacgacgctcaacctgtcgtacaacggcctcgccggcgcgataccggagggaatcggcgccatcgccgggctcgaagtgctcgacgtgtcgtggaaccacctcaccggcgccatcccgcccggcctcgggaggaacgcgtgcgcgtcgctgcgtgtcctccgcgtctcgagtaacaacatctccggctccatcccggagtcgctgtcgtcgtgccacgcgctccggctgctcgacgtcgccaacaacaacgtctccggcgggatccctgccgccgtgctcggcaacctcacggcggtcgagagcctcctcctcagcaacaacttcatctccggctctctcccggataccatcgcccactgcaagaacctccgcgtcgccgacctgagcagcaacaagatctccggcgcgctcccggccgagctctgctcgcccggcgcggcgctggaggagctccggctgccggacaacctcgtcgccggcacgatcccgccgggcttgtccaactgctcgcggctgcgggtgatcgacttcagcatcaactacctgcgcggcccgatcccgccggagctcggccggctccgcgccctggagaagctggtgatgtggttcaatggcctcgacggccggattccggcggatctcgggcaatgccggaatctccggacgctgatcctgaacaacaacttcatcggcggcgacatccccgtcgagctcttcaactgcaccggcctcgagtgggtgtcgctgacgagcaaccagatcaccggcaccatccggccggagttcgggcggctgtcccgcctcgccgtgctgcagctggcgaacaacagcctcgccggcgagatccccagggagctcggcaactgcagcagcctcatgtggttggacctcaacagcaaccgcctcaccggcgagatccctcgccgcctcggccgccagctcggctccacgccgctcagcggcatcctgtccgggaacacgctggcgttcgtccgcaacgtcggcaactcgtgcaagggagttgggggattgctggagttcgccggaatccggccggagcggctgctgcaggtgcccaccctcaagagctgcgacttcacgcggctctactccggcgccgccgtgagcgggtggacgcggtaccagacgctggagtacctcgacctctcgtacaacagcctcgacggcgagatccccgaggagttgggcgacatggtcgtgctccaggtgctcgacctggcgcggaacaacctcaccggcgagatcccggcgtcgctcggccgcctccgcaacctcggcgtgttcgacgtgtcgcgcaaccggctgcagggcggcatcccggactccttctccaacctctccttcctcgtccagatcgacatctccgacaacaacctctccggcgagatcccgcagcggggccagctcagcacgctgccggcgagccagtacgccggcaacccggggctgtgcggcatgccgctggagccctgcggcgaccgcctcccgacggcgaccatgtccgggctcgccgccgcggcgtcgacggatccgcccccacggcgcgccgtggcgacgtgggccaacggcgtgatcctcgccgtgctggtgtcggccgggctggcgtgcgcggcggcgatatgggcggtggcggcgcgggcgcggcggcgtgaggtgcgctcggcgatgatgctgagcagcctccaggacgggacgcggacggcgacgacatggaagctcgggaaggcggagaaggaggcgctgagcatcaacgtggcgacgttccagcggcagctccggaagctgaccttcacgcagctgatcgaggccaccaatggcttctccaccgccagcctgatcggctccggcgggttcggcgaggtgttcaaggcgacgctcaaggacgggtcgtgcgtggcgatcaagaagctgatccacctgagctaccagggcgaccgcgagttcatggcggagatggagacgctgggcaagatcaagcacaagaacctcgtccccctcctcggctactgcaagatcggcgaggagcggctgctggtgtacgagttcatgagccacggcagcctggaggacacgctgcacggcgacggcggcagatcggcatcaccggcgatgtcgtgggagcagcggaagaaggtggcgcgcggcgcggcgaggggcctgtgcttcctccactacaactgcatcccccacatcatccaccgcgacatgaagtccagcaacgtgctcctcgacggcgacatggaggcgcgcgtcgccgacttcggcatggcccgcctcatcagcgcgctggacacgcacctgagcgtcagcacgctcgccgggacgccgggctacgtgccgccggagtactaccagagcttccggtgcacggtgaagggggacgtctactccttcggcgtcgtcctcctcgagctgctcaccggccgccgccccaccgacaaggacgacttcggggacaccaacctcgtgggctgggtcaagatgaaggtcggggacggcgccgggaaggaggtgctcgacccggagctcgtcgtcgagggcgccgacgccgacgagatggccaggttcatggacatggcgctgcagtgcgtcgacgacttcccctcaaagcgcccaaacatgctgcaggtggtcgccatgctcagggagctcgacgcgccgccgccggcaactgccatataaattcatttctgcagagagcttgtgattaatcgaccatctctgatgatcacaaacgaacacataaaaagacgcaaatgttgcatccagacatgcatgttccttgttgttggctgtttaatcttgatgcgatttattcatttgtgagctctagaatttccaagttatgactaaattttgaataaatttaggctggaaaaattcaaactggatttgaatacgtttaggaacaaaaaactggtagatttgcatttgaaaaaaatgagagtacattctagtctttcagctgttacacaatatatataagcaagacaactcagtggtatattggaccaataacacaattcattgctcttgagcagcccattaacaggtttttagttgtggcccagtaatctcgccatcccaaaactcatcagtggttttgtatgggccagattcgtggacatagaaatcacggtttcccctgaattccgggagggcgcttatctcctggcgatcagcatcggtgagctcccaatcaaaaatttcgaggttctctctcattcttctctcattgaagctcttgacgattatgcaatcgccttgctcatgcagccacctcaggcatacctgcaatttcggtgaaacttatatacatattggaattattcctaaaaactttgccatagatagcatggtgttcaataccacagatattgatgaattttttgtcgactataaattatctttacatcactgaaaatttagtttatcataactgatccaaaattaagacgtattgtagcattatatatgtacctgggcaaccgttttgcccttctgtacggcgatatgtttgagaacagggcagtccaagacggcattgctgccccatatagtgccacttgctcctaaaggagagtaggcacagagctggatttctttctccttacaaaactcccttagtttgttctgccggcaataggggtttatctcaacctgcatatatattgtagtcatgcatgcaatcccaacgacaattaataatacaatatatgttccaaaatatgtatgatgggacaaaatataggatgataatgtattgtacagtaatacctgatttgctgcaggagggatggttgcaaatgagagcagggtgttaagcttcttgcaggtgaaattgctgacaccaatggctttggtgagacctagcctctggcactcctccatgtccttccaaactccctccatgtccatcatcacaaagtcattgtcgtacaccggcgaaggcgtttcttgttccactctcagtcttattggccagtgaatcaggtataggtcgatgtaaaccatctgcaggttcctgcagtagtacatgaagactcacgcaaaacaaacaaaataatggtaattttatcatcttcaagaaagtaccaaaaatgctatattttctattttaaaaacatgacacaattatgtactagttaccttagatgtatcaatcattttagtgtaaaattgattaattttttgagaggaacctggacgagtctacgggtcgggctcccgatcggtttggagaaaaatcggggctgaagcgtccgatttacgtgcaaaactattttaaactaatttttctcttaaattacttatccaaattatgatccgattgcactattaaattcgttgcaattaaattttcaaaacaagaccacacatggatatattccgatgaaaaaagttagcttattattgaattatttttaaatgttgcacgatgttccatcaagtatatcggaattgtttcactaagtagatcgaaaatgtttcattcatttaaatcgggtgttgtttcaccttatataaaaacaatgtttcagcaaatagcgaaagaatgttttagttcggtgcaacatttgatccatacatagtgaaacattataagtacactaggtgaaacatttttcggtggaacaaaaaaataaaacgaattacgttaatagggggtttccaaaatatgtgggttttttcattgcaatggaatatttcacttcactgcaatattaaatctatagatagtgaaacatttttagtggaacaaaaaaataaaccaaattcttttaatagagggtttccaaaatatgtgggtgatttgttgcaggtggaggcagggattgtggtgggggcccaggtggcatgcatgcgcgcggggcagggggcgggggagcgcctgatttttttctccccccaccggtcgactgatctctatcattatcggagcaacgtagctaaaatttctcactaaattaataaacatacaagtgattgtttagaggttggtttgtgaatgatgctgacgtaccggagcgtcctcctgagcgccggcaagacacggccggggtgggtgtcggagatccagagcttagaggtgatgtagaggtcgtcccgggacgcgaccatgccggcgcgcacggcctccaacacggcctcccccaggggtgcctcggtgccgtacgccgccgccgtgtcgaagtggcggtagccggcgtcgatcgctcgcaggacggcgtccctgacggtggccggcagctggggcgcgtccaacgggaacgacgcggtgcccatgccgacgagcggcatcggcttgccggacctcagcgccgcctctggtatcgtcgccgccgccgccgccgatgctcccacaccaccaccagccatgaacgatagatggctagcttagctgtcgtacctgatcgagtgaggtaaaaagatcttagagaaagagagggagtggtgcatgtgtcagtttcatcttcgtcagttcagcgaatttagtagtagcatacatgcatcgcgacaggtatatgattgggagctggccggagacaagataacacaatgtgattgcggttgcgactgcgacacaaaactgtcactacttgtattttcacacacagaaacagacgtaatgtatgcatcacggaaatttatagcatcttggacaaattttccttcttcagcagtgaaatattaggttgtaagttgcgcgctgccggccggtaatctcgatcgccatcccaaaacttgtcagcggtaaaatgttctatagttaaacatgatatacatatgcatattgatatgttgttcactactacgctctctccggttttcaatgtttggcgccatggaattttaggcagacttttgattatttgtattattcaagttttgtttttaaatatgtaaaagtataaaccctacttttcatcaaagatatattcgagaagcttgaacgaagatagctgaactattgtttcaggggcgcgcgggacacgaccagaaggctgggttgagtggcgaacgtgtcccactgccagctgtgggcaagcgttcactaccataaatgaaacatgtttatgggggaaaaccccaaccagcctgaggtcaaaaagacgctaacgctgagtcattaggagcaacaggcgtctggatatgtgtcgcgcctgcccagtgacacccgacttatccaactgagaagaaaaatagccgtggcactatcttggataggttgaggatcgccaggcccaccatatgccgcgtggtgggcaggatggaaacccacctgggccagatcaatgcccagggagcccggggcaacttaatcatatacttttggttggtttctcgggaagattagaagggaaccaactgacagcgacaagacagctgagtgacaacacgaaggaagagcagaaaaatggcactgtgagcccctcggggacgtgctatataaaaagggatgcttgttccttagtttgaaaaaggtctagtttataatttccagatccagatagtgacaaaaaaaacaggagtaggggtattacacctttaggtggcctgaacctgtataactgcttgtgttcatttgtcttgtggggagctggaccctatcttggagatcttttccacgtcgtgcacaactaaccccctggacgagttttcactcaaggaaagatctgcacttcctcgctgctggagaatcgctcctccaacacttcccctttctagcgattagaaatttgttacctacttgagttcttgctaagtattactccctccatattttaatgtatgacgccgttgacttttcgaacaacgtttgaccattcgttttattcaaattttttgtgcaaatataaaaatatttatatcatacttaaaaaacatttgatgacaaatcaagtcacaataaaataaatgataattacataattttttgaataagacgaatggtcaaacgttagacaaaaagtcaacggcgtcatacattaaaatacggaggtagtattacttataaggtggtttaattgagtgttctaacatgtagcccttatagatataccatattatcaaattatacatgtttcaagtcgacgcgacttaaataatgttagataggtacttgagttgagagaaggtttagtcataaaaaaaagggtttgttggaaccatgccaccctaattttgcgaaatttgagatatgccacccgtatctcaatgacatgtaggaaccacatgagtcaatgacatatgggtcagggtggcatatcacaaattttgcaaaatttgtgtggcatggttcaaattttccctaaaaattatatgtgctgggattcccttattgccttctattgatggtatctctaatcaacaaaatacaaatatcggctatgggctcttttagtgaagcattggatgttgggcaacctcatgcaactcagcgctagtcatacttactacaaccctatgaaccatgcaacaggtcacacaaccacacctgacatctcaaatgattttctattagacaacgcttggatggatgtttttttattaaactaggtgaaaccccgcgcgttgctgcgggagtttatcatgagaacaataagtaaaaaaacgtgtaaaatagcttaaacaacataagcttatataaacataagttttcataaattgatgagatttaaattgaaatagtatgtagaataatgatttagatgtaaaagtaagatgatgtggctttatgaggcggttggacagaggcggcctgcacccctcggcggcgggagacgacgggaggtaggcggcaggagacgacgggaggtaggcagcccgcatccctcagttgcggcaggcagcgtgcggtggtgggaggtggtgcgacggaggcggcccgcgccggatcaggaggtgtggcgcggcgaagacagcaggcatggaggtggggccgccagcaggaggtgcgacggcgtcgaacaacggccggcgatccatctttgcaaacgaacaaataacccccccccccagctcaatccgctgtggttttgatcctacatggtagtccagtcaacaattcattgttaaaaaaataggtgggccccacctatcagtttctctatctgtcttgtgtctctttcccaatctcttactctcttctccattggagctgcatcaagaagggcgacggcagaggcagtgacgaggcgtggggagcacggcggcggaggaggcgaggcgaggcgtcggcgtcagcgagacgagcgtggcggcggcgaggcagggcggtgtgggggcgggcgcgagcggcgacggcaggcgcggctgggtggcgattggcagcgcgaggccaggcggctacgc

SEQ ID NO: 7578 - DNA, 28441 bp, Oryza sativa
  unsure (1)..(28441): unsure at all n locations
cagagctcctcctacctctgccgcgtcgcccccgctccctcctcctttcccaaagaggcaagggacaagccctcttttctctccctcttttcccctttttcctcccgccggcgtcatcctcctcccccctccctgtcgccgctttggccacgactgccgagcgctagccctctcctttgaccgccctaagtcggttcccaaaccgacattgctgctcctataaacccaagcttccccctttcctttcctctcccattcgcctccacgccattgccgccgcctcccgtgctctgttcgccgtcgctgttcgtcgttgcacgtgtcggaggagccggcacgagcaaggacgcggaaggggactccgggcgcgccctctccttcctcttccctgccccgaggccggagagattactcccgcgccgtcggcctctcgtcactgcgcccgcccgcacggtagtgcctccctccattcttcctcctcgctccatctcctccccttagactcgggtagtagctcgagtagcctccccgtagctagccggcgccgccccgaccgttgccgccgctcgccgtgtgctcgccgctgtcgccgcccaagctcggaagcgccgctcgtcgccggcctcgctcggcgcagctccgcccaatccaacgctagcatcggattcccgtagccgcgtagatgccctcgccgtcgggaattggcccctcgtgacctcatcgccgtttcccccttccctcgccgccggttgccgccgccgcaatccgccgccgacgcactccctccggcgaatccgagccattggctggtctcccccggtcctgtgcgaccacccggtgtgctcgctttcgcctgtatcgccgtggttcgctccgccgctcgccgctgtcgtccgccgtccgttccggctggcgtcgtcgtctacctcccgccggcccgcgtggcagccacgtaggcgccacgtcggcgccaactcggccaagaccgggtcgagccgaccacggtcagcccctccctgtgcgcgcgttccaccgcgagccgtgaggctgcgcgtgggcccgctgcatccgtgtccacctcgaaccgcgcgcgtgcaccgcgtccctcccccgcccgcgcgcgtgcgccgcgtgctcgctccgcacggtgaaccgtgtcaccgacaagcgggtcccacccgggaccacgcgaggtgagcccggtccaccggctctctctctcctccctcccgcgcgcgcgttgggccgccttgggccggccggcccattaagctcggccgaaccgccctttctctcgggccgcgccctagccgcccgagggaagtctaatttccctccctcttttattttattttcttttctttttcaaaaaggatttaattaaatccttttcctttagaccaaaaatccaataatcgtagaaattcaatatctccccaaccgtaaatccgtttgactccgttcaacttccaaaattcctcaaatctcgagatctatctaatggcacacttagaggtcattaatagggctttatttttgccgtttgttgagttgtcccgttctgcgtgtactttcggagcccgaagacccgcagtgcgaggagttcgaggatcaagctccagatctcgagcaaggcaagccacctttgaacatcttgagcctatatttgaatttaattatgttgcttgaaaaatattatgcattgataggatcgcacttaatctgtttgtcccgtctgcaaggcagattggcgaacctacctagtttgttgcatttgatccttcctttgttaattgttatcccatgttcccttgtaaccacccagttgcgcctcggaaatcgtgcactctgcacgagtatcgacggccgccttcaaacttaaaatctgaaaaacatcttgggtaaaacttgggtcttacaaaaaacttggaaaacccgacacctgggtcggtgcttgcgaactaaatgaatttccaaaaccgcggaccggggaacataccgggtgtacggtttcccgctcttgcacttaaggaccgttttccttggaatttcatccgaacataagacaagtacgaccacatgggtggaatgggacacccctggctgagtaactagcttatcaggggagccttgatgccgagagacatgtggattcgccggggtggtgtcggggaggacccctgggcttcctggcacagtatggtctgggacctaacctgttgttggtctgggacccctctcgtcggcatatggtaaacctgtgtcggccttggaaatgtcttgtcatgaaagcttggaggtctcccgatgtggctgatccccacgggctgggtgatccgggttagtaatgtcgtgcgggtaaagtgtaccccctctacagaggttaacaaactgttcgaacagccgtgcccacggtcatgggcggatgtgaggtgattcctagcgtagttttgtttgactactgccttgtgaaattgctgttgtgaaaaggggatcgttgtttggaaaatctgcagctgatgggatcagctaggcccgggtggccgtttgaaagatgttggcccgggtggccgtttgaaaattgttggccgggtgccaatcttgatcaattttaaagactgatacattgcacatactccgaccggacgagacgcactgtctcatctgtgtcgtttgagaagcactcacttagttgtttccagaaaagagttcaaataaaaatcaattgcaaaaacaacagccctttctttgaagcctgcattaaacacttatttcccatggcttgctgagtactcccgtactcacccttgctctatataaataatcccccccccagttgctgaagaagatgaagcggatcctgcagatgaggagttcttccaggagcaagccggctacgatgagttttagggtttcggcctagttcccaagtcgcgcctgtgttgtttgatccaagtcctagcttccgcttcccttttgtaatgcagttgtgagctcgggatctgtccgcagcccaacatgactgtacctctactctataataaagagacctctattgctgtgataatttgtcttcctgtgataccagtactgtttcctgggactggtatcgattaacaggttaatttggagcgtcacgggctagatccggtcggtactagttcagggcgtgacacaagcacaagtcaattctaccatactatatgtaaggcatatattcaaaggaaggcaatatgtagttcattttcagcataaagcaagttttgtttcgcaattcttttgtaaaggagttgatgcttcaattaacaaatcaaattttaagtttcaatattaaattcatcataattccatcataatcaatctcttgttgtcatcctttgacaacaagtcataatatatcacctcacacacacaactcaacacatctatcaatttcaaaccaatgtcacatgatcacatttttaaaacatagtctatactcatgacacatcaccaaagcgctcatgaccgtgagcacggctaatcgattagtttaaagaactctgcagagtttgtacagctttatccacatgatatgaactctctagtttgttttgagtttgcaagactccaccacactcttcattttgaattacactacttagagcctagccttgcaccagcacgatacgtgttcctccatcctaggcatacttgaaatatacctagaaccgttaagtggtgggcccacgccttaaacttaatgccgtggtggcggacacgacgggaacccaccgcacaataccgttgtattggaaacgcttagtcacctaaactaccacgtcagggtaaataggaagctcctctgaattatacgaactcatacacaccgacctaccagaatgcaaggctagtcctaaatagattactcagcttaggccatctcatactagcacatgtggatgtacgaataactttaaatgggtgacacaagttcggtccttatggacttgggcaaacactccccctatcggtatgcaactaacaccatatgcacaccacttgccgcccaagtataaaatcacattttacacattttagttcgcaaatacccatcatatttattttattccagcaaaggttcatgtatcaaaatcatattttaattatagatggaatgagcatttgcatagttgtaagcatggctaagcaagtagttgcaaatagagcatatataaacccatttgagcacaaagagtgtactctaaccatttctaggggttcaaacagcaagaggatcaattattcaaggtggggtatgcagcaaataggtcataactaccttaacccaatttcaaataccgatatagtctaagttcacatgcaactttgcaaacaaatattttcattcctcaaatcatgggattcaatgtgttcaaaggatgggaggagaaaacttgccttgatcagagaaatgttagcacctaatccactccttcaccgattatgcaattatctagataaaggacacgttatgcaattaaacaccgaaatagctaaaaaatctaaaatgctctaaaatgcatgatttatgcacagtgattaggtactgatctaaaatgaattttaggtgaaataatttttattttatcttattccattagggagttatgaattttagaagttttatcgatttatagtagtatagtcttaggtagtgttatgaaatacttttgtaaagtgatttttactagattagacttcacaggggtgtagagatgtgttttataagactaactcatttggtttcacaatttttggagttacaatgattttcttatagattttacaagttacaacgtgttttaggcatatagtgttttatatgtgcatgactctcaagttgtaggttcagaacatgctacttcctgtttaagttgaataaaaggaataatttggttaactaaaacatttttagttcacatgtttatggtctttactactatggttcatattttataaactagagatgctataaactaaactagcaatatattatattaacctagaaattgttatatgagctaagttcttctaagttttagtggatggggatggaactatggcctctctggtctaacaagttttattttggtttattcatagctagaatgcatttttttaactaccttacacatatattttgcttaaccattactaggtgattaactcctaggttatctatttaaagattagagctataatatgttcaaaaggtgcaatattttattttactatgttgaagctcactatttgctggttctatggaaatttggttcatttcatttggactaaagatgaattttctacaaattttacaaagtaaaggttgctctatcttggttattacttacataaatatttaaaggcttttattacatagtaggtgtataattttatttcatggaagtatacgttttgttgattctacagaacttgggtttactcaaaaaggatctaagatgaattatgaattttatgtgaatttctaaagttcagcttacctaaaactagtcattttaaagataatagtttcagaggcatttgatctaaagtatgtatacaatttcattttactttataggaaaacataagttggtggatctatagaaactgagtttgctataaaatgagttgagatgaattttatatgcattttataaatttgtgtatggtttatgtatgatttatcttagaccaattttagagacaaagtttgtacagtgaatgtctagttttatgcaataactctaaagttcttgatttggtgagttcacagaaatttgatttactctaaaatgagttgttttcaattttttatggattttataagtttacatgttttcctgttgaaaatataaagcttttagtattatctttttacattttcagattttaaactcatggggtccacctgtcagtatcaggccaatatgcaaaaaggcccctaggattttcaggaaatcaacccgcagtcctaggtccatatgtcattgattgggaacattacgtaatgaaccttatagttatttaaattctcaaactgaagtccctgactcctttttcacacgcacagaggcagagcagccatggctgagctcgatcccgggttcaccggcggcgattggtggctcggttggagttggggttaaaagataaaatgaagagcatgttcttgcgattccattcctctagttttcttggtcagaggacatcggagtagcgccgatggcgagtgtgagcggcggtggttcttggggtgaaagctcatgtgtgcatggaaatcgattccgaacgatgcatgcatgtggtcttctagccttcaggatgctcaccgtgggtcgagctagggttttcgaggtcttggcggcagcggtgacttgtggaacggctcggcgacggtgctcctcctcgggtgaacgacgacggctcgaacgggacgatgagctgctacaagcaagcatgcacgaggtttgtgaggtcaaggagatggtgtatgcgcgaggaatcgaacaatggctcaccgaggcagcggtaatcgacgatgacggcggaggcgattctagatcggcgccggtgaagaaaagatgcgttctccgagtccttcaaatctccggctggggttcttgaggcgtattgaagaggagattgaggcgatgacgatggcacaacggcttgctccgaggtggtcaagaatggccggacgacgacgatggttgaagcggcggcgctccggtgcgtgctccagggcgtcgtcggcgtggtcgcgttccggtggctgtgatgcacaaaatgggacgtggtcaaaagagaaatggttcggcattgtgtggagagaagggaacgcgaaaaacctggagatgaactttacccaatcagcgatggcgatggtcgtcgtttccacggccggcggcaaggtttggggcgatggagaggcagagaacctcctccctcggtttcttcggctctgagtggtgaatggagaatggcaacgcgtctgggaggagtagagagtgagaaaagggaaaccgagatcgacgacacgttgcggccacgcgtcggctcgctcaatctctccctctctcggctggagcagtggaggaagtgatggacagagtcaaggcaagcttaagaggctgtcaggtgggtccaggtcgtggcaaactaggctagggtgagagggttgggtaagattctgggtaaacttgatttttagatcatttttcggaattattttctcctctaactttgtagcttcataacttaatgtgtggaccaaattatctagtgttgaatttactggaggtaaatgattacacctagattccattttctttggttgcactcaaaaataatgggtagattaatcacagaaattaaacaaagatgggctgttagaaagctagattgaatttttaggaggcctaaacagaggaggaaaattctagaaaaattatatttaggcatgataaataatctagtatttgaataaattattttccatcttcacttatgagcagttaaatgtacttttggatgaagtatgactttagccgattaaaatttaatttgattccttttagttttctgctttgactgattaatttgtggtattaaacttagttattaacttgtaccaatattatagtgaattgcttgtgctaaacattatctatctaatttttttccatgattttaacttgcacataatattttagagaattaggattactttactttgtatatgtgttcccacttcataattgcacctaatattgttacagggattacattaaacttcttttgggctgagaagatgatatttgagtttaatattaagtccacatgttatcacccaagattaacttttgtttagtaattttaacccttttagtttatgctcatgagacatattatgaaaagcaagaccaaaatccaaatgcacaagagactcgagcctaggcatgcattatgcacatgtatgctcatatacttggtgacatttctagtctaatgttgggaatgaaaaggttttattttgttctcaaattttaatcatgcaatgatttaagttggtcatcacctaaattaaaacggaaatttttgactctaaaaattggagaagttaacctctaactattttgacaagaaattttaagtcctgaaattttgggtatgttacaagtagcccccgacttctctctcctttccttggaattcgcaccggcggaggtgcgtctatttaagggagttttggggatcccatttgaggtctgcctgttgaaaaaactctccagcttccaagcgtccctcgtcttcttcgctcccgcaaaaaaccctagccaactcgtctcggtcctttctccggcgatcttcggtggccatggatctcgacaagtctacctccaccagtgcgtcactgaagaaactgcaagaggatggcgcccttcccggtcgcgggaccgcggagagggaagtaggaggtactgaaccccagcctgtcctgggtcgcatggttgcggttgaggactttattctctgtggttttcttcctccgccttctgaatttctccttttggtcttgaatttctatggtctttccttgctccatttgaaccccaattccatcgccttcctgagtatttttacgcatctttgtgaggcctacattggggtggagccgtttcttgacctcttccgcttttactatgagttacgctggatggaatccaaaaaggtgtccgggtgtgttggtttccgacttcaggatggcctgaagtcgcgatacatcccctttcagtgcctcacatctcgcagcaaatagcgggggaggtggttctatcttcagatagaggattcggatcctgtcttcgttgtacctaaggaacagccagacaagatttcatcttggaccaccaaacccgccttgaccccgtccctccaatctttcatcgatatcattgacgacctccgagaacgggggttgtcggggtatgaagttgctgccgacttcattggtaggcggatccagccgcttcaggctcgagcccatcctgcctttgattattctgggccagaggacgcgacccgggtttctcctcagggtatttcctttttagttaaattgactcccttatgttcatgtttttcccgtcttatcggattctgttctcaatctacaggcttgaatagcgcaaccgtggagcgccgcgtccgccaactgataatcagcggcccgacaacggcgagcaacgtccccgtcctcctttgcgagaaaggggtagccgagcgcgacgctgccatcaatataagtgtacttagctgtccttttgcatctttcttccgggatcacattatgacttcatgaaacgttggctctccctctgactgatatcatcgggtcgctcgtggaccatcaggtggcggcgtcgctgaaagagaaggtcgccaaggaggggtctgacgctgctgttgccactaccacgacgagtggcggcgacgttccgaaaaaggggaggaaattctcctctatagtcggacatcgtcggaagatacccactccctcagtaagttcacccgttatttgatcacgtagtcggaaaacttccacctcacatcatatcgattgtactccaggcctcggacgcgtctcccccgcctccgcgacgacagcggcttgtgacgctcagcgagaagtaagtgaataaatttgaggtttcgtgatttcgtcaaactctgtctcaatcgcagcctttcgcagggcggcgcgggcgaaggcggcgtaagatgggtctggagggacctccagcgcatctcctgccgtggcctcgacggatgtcgtggtcgtgcccaggagccatgaggcgacacctagcggcccagccagcgatctcgtggctggtcgtggttcgccggatgccgtcctcacctgggaggagctctaggttgagatggggcgcctcctcgaggctggtggtcacggtgttagccacgagatcgcggaggcgagggcggcggctgcgtcgtcggcgaatgagcgcgccaatcggctggcgcgtgatctagcggaggttcgcgaggacctccagaagatgagggaactggtggccggcaatgagcgacaacagcaggggctcgagcaccgcatttcggagcttgagaacaacttgtcggaaatccgtggctcgttgtgggtcacatatactggtctgcaccagctcgccggggagtgcggtatcaagtctaccatcccggcgaatcccgatgagttctcgctgatgtcttctcttgcggagctggtgacggcgatggaggagatcccctccaagtatccagccaggatcggagaggagacgtctaacgggatctacaccggggcgtgccacgtccttgcgtgtgtgaggctggcgcaccctgaactcgatctgcggaagatcttggatcagggggcagttagcgacgcgcgtaaggatgtgatggaggaggtcggcgatctggggagtccgtcctcccgctttttgaagagtagggtcttagctctcttgtactctttagtcatgccttgtaaaacttttattggttccaaccgccctagtgtgtgcggtcattgccttagctttgtttggcattttgatctcgagtactttgttgtcctttgtagagatgttgatgtcgaggatgtcctgcggcgcgggcaacctgagttgctagtggtcgttccgttacttgcgtccgaaccatatgtgccggaaggcgatgtagatcgaagttcgcctgtggaaacgagcatggcggcgactcccttaggttggttgtctttgttaccatttcctttgcccttccgtctggatcgacttgatttgttgtgttctcgggagagaagagcagcttgacttagtcgtttccatgctgagcagatctcgagagtgcgcttgttgaccaggaccgtcccatccagtattggaggacgaagtttgaggttgcggaactcgagaggactatgctggaggtgagaaaggatcaggccgtagagacacttcggggtcgtgagctgtggttcaactcgtatctaaagagttgctgcacatccatgtcgagagtctgtagagagcatcgagtaccccgtggggatcccgaggaatcggcggccggatacatctcgtggctaaatggggcctgcgcccagctcgaaggcatcggtcaacgtatcgacgaggccttgaagcaggagtgtcgtcgctcaagccgatatgccggggggcacgtgctggcctgtatacgagatcatcgtccgcagctgcacctcgagttcctccgcgaagggttttctcgttctcggagaactcctacggagatagatggcctggcgaagtcgatggcgccgctggcggagaaggttttccagtcgatggactggcgttggccttcctggtagtctccatgtcctgtgacaaatgtctttggaagaagtgtaatatagttttggattttgatggaattgtaagaaatacttgtggaatagaaaagaaatctatctaactaagctttcttactctggacgttgtgtgtatgagtgtcttctcacttcgcaactttgatcagtcgtttgagttatacactctccctagcccccagccttgtcatcggagaattcttctcggaagataaggttcttggacctttgacctgcctcggttgaacaagcactgatcgtagcctccagccatgaagttggaaagtttatttccgattacacggcttggttaatacgcacggcgagaactcttacacgactagatcttacatggtctttcgtctctacaggatataacaaggccttatcggctctggtcgtccccagccgaagttcccttaggttcctcggaggccttgtcaagacgacgtaaagggacatgaggataggtttcaacgctaggtgtcatctaggtaagggattatcgggaaggaacactttgattgtcgtctgtacctgaaaaataggctttattgaggctgtaagatgtcttacaagtatggatactattgacttatacatagaatttacgtaattgatcaatgttccaggaatttgccaactcgcggccatcgccgtctgcgattttgaatgcgcctggccacagaacttgtgtgatcgtgtacggtccttcccatttgcgtgagagcttgttgcgccctgcttggctttgaacccgtcggaggacgtagtcgctgatcgaaagcgtgcgtgctcggatgcgcttctcgtggtaacagcgaagggcttgttggtagctggctgctcgaacgacaactcgtttgcgatgtttctcgagtagattcacatcgtcgtatcactgctcctcctgatcctcattggagtacttctgtattcatgtactttgatgtcgtagctcggtggggagcatgccctctgagccgtacacgaggaagaagggtgtctccttgttggacgttgtcggtgtggtacgcacggcccatagtactgatggaagttcctcgacccacttcttgtcatgtgacatgagcctgtcgtagacgcgggtcttgattccttgtagtactatgccgtttgccctctcgacttgtccattgctctgagggtgagaaaccgaggcgaagcagatctttactcccaacctgatgcagcaatcctggaaatcgacactgatgaactgggagccgttgtctgttatgatacgatggggcaatccgaatctgcagaatatccctttgatgaatttgatggtgttgtcggccttgatttctcctgtgggtgtcgcttcaattcacttggtgaatttgtcgatcgctacgaataggaacctgtagccgccttgtcctcgtgggaatggcccgagtatatctatcccccagcacgagaacagccaagtgagagggatagtctggagtgcttgcgctggcagctttgtgtgtttactgtggaattgacaagcttcacaccactgaaccatgtcgcaggcatctttgagggcggttggctagaaaaacccttgtcggaaagcttttccgactaatgtccgaccggcggcatgtgacccacagatcccttcacgtatgtcgaggaggaggtgtctgccgtcgtcggacgagacgcattttaggagtaccccatttggtgccttcttgtatagatcgttgccgatcatacagtagacttttgctttacgggatattttctcggcttctgcgtcgtcctcgggcaactcttcgctgcttatgaatttaatgagtggggtgcgccagtcgtccgtggtctcgatatcggcaacggcgcgctctgcctctgtagcccccgaggtggtgtcgggggcgaccgggctatcttcgccgcttgcctctttcactgatggcctcgtcaggacgtccagaaaggtgccaggttcaagtggttctcgtctggacgcacatcatgctagatcatccggttcgatgttgtctttacggtacacatgtcggacctcgatcccatcgaaccttttttctagcttcatgacttctgtgagatacttggataactcggggttagagcacttgtaatctttatgcacctggttcgtgactagtttggaatcccctttcacgattagtcgcttgactctgagtgcagctgcagctcttatcccggcgagtagtccttcgtattcggctgtgttattggttgccctgaagttgaggtgaattgcatgcttgaattgatctcccgaaggtgatgtcaagatgaatcctgtccctgctccctggctgttgagtgcgccgtcgtacgccattgtccatgtttcattgtcgatttggttgtctgacctattatcaggcatggtccaatcgactacgaaatcggcgagtacctgtgacttgatgattgttcgtggcatgaagtagatatcaaattggcttagctcgactacccatttcgcaacgcggccgacaacgtctttgtttctcacaacttcaccgagagggaaggaggagacaactgtaaccctgtgggcttgaaagtagtggcgtagctttcttgatgtcatgattactgcgtagagcagttttggatctgtggatatcttgtctttgcgtcgtggagagcttcgctgacatagtagactagtcgttgcaccttctctctctcgacaacaatgacagtactaacagaatatggcgtggcggcaatatagagaaataattcttcattaggttggggggcaacaagtacaggtggattggataggtagcgcttgaatgcaatgaatgcctcttcggcctcctgtgtccatacaaatttgtcttgctttttcagcagagcgaagaaaggttgtcctcgctctcccatcctagcgacgaacctgcttagtgctgccatgcatccggttagcttctgtacttccttgagtcttgtaggcgacttcatgttctcgattgccttgatcttctcgggatttgcttctattcctctgccagagacgaggaagccaagtagcttgcccgatggtactccgaacgtgcacttctctggattgagcatgaggcgatatcgtcggaggttgtcgaacgtttcccgcagatcgtcaatcaaggagtcgcttgccttggtcttgacaacaatgtcatcgacgtaggcctcgacattgtttctgagctagtcactaagtgcaccttagaccgtgcgctggaaagtgtttcctgcggttattagtccgaacggcatcttaacatagcagaataccccgaacggcgtgatgaatgctgtcttctcctcatcctcttttgccatgcttatttggtggtaaccggagtaagcgtcgaggaaactcaacaactcgcaaccggctattgagtccaccagttggtctattcgaggaagaggaaagtgatccttgggacacgccttgttgaggtcggtgaaatcgacacacattctccacttcccgttggccttccgtaccatgactgggttggctagccactctggatggagtacctctctgatgaaaccggctttgagaagcttgtcgagctcttctcgtatggcttgttttcgatctggtgaaaatctccgcagtttttatattactggcttggcatcgggtcgcaccatgagtttgtgctcaatcacctccctgggtaccccaggcatgtcggacggctgccaagcgaacacgtcagcattgtcgcgggagaaggtgatgagcgcgagttcctatttctcgcctagtgaagccccgatcttgatggtcttgtcggggttggcactggatagtggaacgatcttgattgcgccgtctggtttcggcgtcttgtttgtcttgctcactttcttgggtggctctgctgtggcaggcgggctgggcgtgtgctcgaccatgtcgaggctccgcttgtcgcattgtactgccagcttagcgttcccttgaatagtgattgttcccttcggtcctggcatcttgagcacttgatacgcatagtgagatgcggccatgagcttcacgagtgcagttctcccaatgatggcattgtatgctgtatcgaatgcagcgacatcaaaggtgatctgttccgttcggaagttgtttgcttggctgaaagtcacaggcaacgtaattttgcccaatggtttggacgatgactgaggagtgattccatggaagggttgatcggtgggtgtcaactcgcttcgtgggatccccatcgcgtccaaggtgctggcgaagagaaggttgattgagctgccgccgtcgatcagtactcgggcgaccttgatattacgaatagtgggttcgaccatgatcggatattgccctgggatgatagcagtcttggggtggtcctcttctgagaattctatctactgctcggaccacttcatcttgggcgcggccccctgccacgtcgaacagacttcacgttccactttcttgtattctcgctttgaggagtatgccgtggaacctccgaagatgtgtgagacatggagatcgtaatctgggtatgctaagtctgattcctgagtaggcgccttagcgtccttctcaaccacgcgtactcgcttgcctttttccgatgccatgtgtttggcgagcgactttttgaagacgaggcaatcttctagagaatgtctgtccgtcttgtgtatagggcaccatgctttcttcgtgtcgctgccttgtgggtctgggcgcttggcagggtccgcgtattctgttgcgagaacttctgattgagctttccttttcccactcttgcgatttttctttttgcttgactcaggtgcgtccttggctggtttcttctctccttcggtctttggtttgtcgttcttgcatctcagtgcgtcatccgcatgagcgcatcggtcgacaatttcgaataatctccgagtagtcatgatgcgcctcgttaccaactcctgagtagtatagcgatctctgacaccggatttgaaagcgcgaattacagaagcatcggtgatctcggggattgtgtttctgcactcgttaaagcgccgaacataatccctcaaggattcgcccgggttctgtgtcaacgcatgtgggtcatcttcgatcgcgtggcgcttgtaagttccttggaagttggctacgaactgctgccacaagtctgcccacgaagagatcgagttggggggaagatgcatcagccatgaacgtgcaaagcctttaaatgcggttggcaagtaattcactaacgcgttgtcgtccgctccggcagcgcagagtaccgtggagtaaacctaaaggaactcttctgggtcggtgctcccatcgtatttctctattgctccaggtcagaatctttcgggccatcggacatcccgaagtgaacaaccgaaagctctacacccaacgctgggggcggtgggttgttggcgatcatgcgtccttcgtggatgtctatccgatgatgaagatgacgaggatgatgacgatgacgatgggtcgtctagttccggcgtacgattacggggacgtcggccgggttctcgagaatcctgtcgtcgtctcccgctgttatctcggtgccgatctccatcatcaccgtcattattgcgacgtcctcgaccagtatcgcccagtacccgccgttcgcgatcgttgtgatcgtggcggttgtggcggttatcatggtctcggtcttcgcttgaatgacctcctcgatcttcgttatcgtgacgccgtgaagagatatgacgccgggaacggttctcgttgtctcgtgtgcgtcgtgcctctcggcggccattcaggtgatcgcggagatcgccggtgccgcgaggtggaggggttgctcgatgaggtgattccgccgttcagggtcttcaccatttgcatcgcaagttggtggctgtttcgggtgcgctgcagcagcggcctcttcgaacgcgttgctgaggttggtcactaattgcgttgacggctctgatgtgttgggccggagtagtcacttgattctccgcttccgcattggtgcgtgctgacgtgccgacatcgtcgatagccaatacctcacgaggcgtactcgttgtcgatgatccatagtcttcgagtaggtgcaagactgatggttcatggggatcgatgtcgattaccccaacaaatcgatctgaaatcggcgtcgctccttgttccttgtcctcatccctgatggggatgcgtgactgctggaccttaggaggtggcgtcttcatggcgctgagaaagaccttgcagctcgagaggtcgtgattctttgtcttgtgaataggacaatagacatcacgagttggagaggtacactgaattccacgctcttcgcaggcacgaatttcagcatggacgttgagaaagacccagcaggcttgcagggtgtgtttcctggttttgtggataggacaccaggaccttgtcacctcggaagtaatcctcgtcggctcgtgattcctgtcggaaagacaaggcttggccgcactaggatccttctcgggtttggatgtcgttaacgttccgatctccgcttcggtgggaggatccttcgacatggagttgaaaacatgaaaagaaaaaaaaataaaaaaacatggatcttcgttaactttttatgattcttttttttcattaaaacatgttttaatccttcgacatggctgagatcggcattgtggtgtaaaccggaaagacgtttcgccgacttgagtccacaccagtgttgttgaagttggaactccttggttgaggttggtgttgacgctgttgtcgacgaatctggatgtcaaagtagtagaaccttgagcaccaagtccccctacctggcgcgccactatcgacgggggatacccgtagaccggatatagagggtattggggtacgctggtacgaggatgtacgtagtacgacatcaagcaaacaggaaacagggattatactggttcaggccccttggtaggtaatagccctaatccagttgatatgggattatatgatggaaaccacatattacaaagggaatagtaaagctcgacgataccgacaggatcgtagtcgagttgatccgactagatctcccggcgacttggcttcgataagctctggcttcgtaggctgtggtagatgtgttggctctaagatttaatgccttaggtcctcccagggggtcccttttataccgtaggtcaactggtctccatgtcggactcagagacatcggacccgacacgatataatgacggccgatttctatccgagtaggactctttccatctgtagactccatgatggacttccttaacctatgctgagaacgtccgtatacgcgcaaacatactatatcgatacgtgacgtatatcgaagggtagagggtataccttacccgtaaccctgatagcgccgggagccggagccgctgtgaacgacaatatcaacggaggcagtttgcctcacaatccagcggagagacattcacagggtataaccttcgcatactgttaattcaatttttgatacttctgttagtcgtaattctattgcgttcgttgtatggtcatgatgcttattatatcttaagcatgcttctggttatgttagattttatcactagatcaccccactttgttcatgccatgattattgtcttaatattttagattaaaatatgtcaatatatgactatatttccaacaactgacaccgatggctttggtaagacctagcatctggcactcctccatctccctccatactcgctccatgtccatcaccgcaaggtcctccttagcgaacacagccgatggtgggccttctggaactccaaggctcaccggaaagtgaaccaggtacaagtcgatgtactccacttgcaaattcctacatacatgaaccattgctcaaaccaactacgaaaatgcctgcctttatcaattgtcaaacatatatatgaacatactccctccttccctaaatgtttaacgctgttgacttttttaaacatgtttgaccgttcgtcttattcaaaaacttttgtgaaatgtgtaaaactatatgtatatataaaagtatatttaacaataaatcaaatgataggaaaataattgtgacatccccgcccagagcttaataggattaatagaatactacaacttctttttcggaagccgatctcagaagaactctaaggttaagcgtgcttggcctggagcaatttcgggatgagtgaccgaccgggaaattcttagcgggtgcacgagtgaggacaaagtgtgcagaaaagatttgtgttggtctgcgagggctttctatgacctataaaagctgccagatataagcgggacgttacaataattaataattacttgaattatttgaataagacgaacgatctaatattttttaaaaaaagttaagggcgctaaatatttggggatggagggagtatatagcgagctctaactattggtgcatgctaaccggagtgtcctacggagtgccggcaccacacgaccggggtgtgcatcgctgatccataatttggatgtgatgtagagttcatctcgcgatgaaaccaaagccaacgcgcaccgcttctgtcgtggcctcaccaagggcagcctctgtgccgtaattggccgccgtgtcgaagtgacggtagccgactttaatggtgcataggacggcctcggtcacggcgaccggatcggctatatgcctagcgggaacgttgccgtgcccatgcctacccacggcatcggcttgccggagcttagcgccacctccggcatccgttttccctctgcaccgtccgcagccatggggggatcgaaggggcaattgtgggagatacaggattgatgaagtatatattgtgtgtccatactactaactatatatatatatatatatatatatatatatatatatatatatatatatatatatatgtatgtctaaatacgtgttgtcgccgcagcctctaattaatgcatggagagctataatgctatatatattatagtatgaatgtttgcccatacgtgtcgggagtggctgcaagttggaagagccaaacgtgtctatgtcagcaatcaagcgtatgacagcatccacacacactgttattgtatttttggaaaataagaaaatttgttttcttaattacactagtttatctacaacaactgtacagttaacacaatgtgggtgtgacaccctgcatagttttcttactgtttggtgtttgcgctaatggagaacatgtcaacagtcaactgtgccacctatcggcatcggttaagaaaaactcacactaataatagagggagggtttcctgtccacccacctgacccgcactgacagtaaccctaaacccactctctaccacaccgtctgctcaactcctctccctctcatctacctttttcacttctttggtgagcagcacccacctctcctgcccttatgtggtgcatcagccaatggaaccagtcacctcgaaccagcccaatgcggtggagcaagcggtgtgagggttatttccacggtgacggcggcagatccacggtgagcggcagtggtaaaactacggtagatccacctgagcttgacagttacaagctaagtcattctatcctgctcctctctttagggttcaattttttaatttagttagttgcatcgggggtatcgatatggtcacaatttccaaaatttcggttattttaatccgaaataatttgaagttttaaacaaaatttgatcaaattcaaatatttttgtggaattcacgaatattgcaaaaatccaaaaattccaggtgaaataattttgtatgggatccaatagacccaaaattttgtaaatttcagtccaaacttttgttccctgcctctctctcagctttcaccacactctttctttttctctccctctctctcccatgcagagcggatctgaaacgcagctagcagctgttattcttttggggtgactacgaatcgggcacccgacgttatttctcaagatgtattcaaaaaatgtttcaatattgaaaatggtaaaacacaatcaatcaaatcatacaatgaaaaattttggtacaatatataaaacaacacatccaagtgcatcgaaaaaaatgaaacaccatggaaaaccccacaacaacatttcaatttaactaatgaaacatccaagtacatgaactgaaacatcaaatattcaaataaaaaaaaaaaactagatcaacccctccctctgctccggtggtttgccaccacatcgatgtcggggtgccgccatgggtgaggaggtggcaccggcgtgcacctatggagatgacgctgtggccgaagaaatgctcaagaatctctaccacctgctcctgtggccactctgcaacaccatcgcccgatgccacgccgagcagggccacatccgtgtggctgccgctgtgctaagcttggccacgtccttgccaccaccactaccatggctttgctcttttgccaacccatgagcgataagctcttcgtgaatgctagcccgttgcctcacaaatagagaagagaaaaggcgtggagagaagaagggagagagagagagaaagggatgatggaatggataagaaactatgcctcacatccgacagtgatgaaggggtatgtatatttctatgtgtcagttgtaagaaccggagctaatgcctgcttataaacggcactgaagacgtttcctgtggtagtgacgtagtgtttcactatttcggctggtaacattggcaatttatttttgaccggaaaatagtggggaaatcccccacggtaattttcattaaataaaggaactgtaaaaaaagattacaaattgtcaatccatgattgaaaagagggtctcaaaactactcgaagtctaggtaaatgtagggttggtttggtttgagtcctatattggccttaccaatatttggcaatttcaatagtgtttattgtctatttggtttggagccaaattttggcatgcctaagaaaataggccatttcaacagttaatttaggctattttggcttcaatccaaacacaatttttcctttgccaaaattagccatgccaaaagttgccaaaatttgacattgacaaaaattggtaaggccaatttagaccacaaaccaaaccagccctagctcctctttcaggcttgctttccatctactgagagagggagatactttgttgaatataagatcatttctctgcctccacaagagccaagcagccactaagaagatttccatgaagcaaaaaggagacaaaaccaaacctctgcacttgaatcatttgatgaaaatcaagagaagtatcccatgagaacccaatcatattccaacaggctgcagcaaaggggcattcaaaaaacaaatgatctcttgtctctcttgatcctaaggtacacatgacacaaaaggagggtacatttgggggcttgcaatgctttctctctaagagatcccgagatcccttgtatttgttctgtccaaaaacataagccaagcaaaaacttttgtcttcatatatgctttacacctccaaatacaaggcaaagtaactagggttgtagagaccaaaagcaaagcttgtagaacttctgagaggagtaaatttcatttccccatatatataactccatctaccaggctgtgaattgactgaaatctgtgaaagatcatccagataaattttgtactcatcataagcttgcactgacaagggcaaatggaagtgattatgaactggccggtcttgcaaatgctgggccacattatgatgcaaagtttttttatttatttgatctggcaatactatagtgggggcatatagcgttctactttcattaaattattttactataaaaaataaaccagtaatacaatagcaaattatcttttccttatacaaattggaggttcctctacgagggaacctcatactaaaggcttatattataaaaaattatagagtttttgtcgatgtgtttgtccatcatacgacttctttgatcctgtggtgtattttttcgcccattggtcctctatgtgtgggtacttaaataaggaatccttccgcacggccttatcactaggtgtatgcatttgtgtcacctagctagatgtaatttttccaccttaatactttgtttttatataatggaacatagcattccagcctttgctcaacaagctacaaccaattattacagcctaacactcataatgagtgcagttcaaatagaattatagaaataaaagacaccaaccatgaagaagaaacaaaccaaatactaccaacccaagataaagagtacacaattattaaattatgtttataaacctccatccgaaattggcaaacagatgcataatcgttttctcaagattacgacatgcaatctttaaaagctcgccatcttcatcacacctttgtagttgtatccaagacctaagccaatgtattgctttgaaaattacccaaatatatgaaacatatggtgttttgtcaaaaatcttatcattcctattgtaccatagagcctaacatatagcagatgctcctataagtataatttttctatttttcttgtccactccctaaagccaatcatcaaaaaaatatgagatatgctattaggagggtatagaccaaaagataactgaactgctctccaaataaattttgcataatgacattccaaaaacagatgatgaatgggctcattttttatacagaaacaacatctcaaacttccattccaattcctccttaccaaattattcttagttaacacaacccgtttaagcaagtaccacataaagatcttaatcttaagatgcatctcatatttaacactttgttaaacttatttaacaaataactattcacaaaacttattctgcaatgttgatgccaaactctgtagtctgtactgttaaatatatgtcgaaggaaatgtgcctaattaaggacagctcctgtagcatgaaggcctctctttgtttgggacggctaccaacaacccaaaattagtctagcgcgaggtagcaaatactaggggaaaaatcagttcggatagtttccgatacccgcacgtattttagaaacggatagtctcgaatagattttttttttatagtaccggatttgaaaatgagtacagatagttttttttaaatggaaacaaatttggaaagacgagatatggtaattaagaccagtatccggtagaaatttgaaacggtcagaaactatccggattcttttccatatctccacaggtagcaatcaattttattaaaaaacatctcttttccatatatcagcaggtatcaatcaattttaaaaactaagtatatatgcataactttatcatataaatttagatgaagataaactttatattaaaattgtagagctagacaagatctacaactttgttgcaggcaactttatcatctgagattattttggggtttaaatattcgttaggaaataccatatgtatttttacaactcacacatacgattcaaatgatctctgatggagatgtcctctataacaaagtacagagctcaatgaaatctagtactattttatagtttttgattttttctttatttaagaatatttgaagcgcaaaacaaacattataggtttcgaaggggtaaaataagatgaatagtatcttcaatctagaaaaaaaaacttgctaagtgagatgataagttgtgcattgaggaaggtggtcttgggttcaatcaacggactaggaagttaaaaattacttttacactagcaaaatacccatgcgttacactatgtgaagccaaaaaggagtaggttgnnnnnnnnnnnnnnnnnnnnnnnnnttgatattgatagacaatttttttcatattgtaaagattagtcatagtagaagaaatgtttttggctagctatcagatcaagctcacttcactccaatcccgcaatcactttcactctaaatatcaaaaggaaatcatacaataaatggaaagaaaaaacttgatgtggttaggatatgtaaacccgattcaattaaaaaaacatgtaactgtttctattttacttataactatataaaattgtgcaaaatctaaatcaagagcgctctcgatttagccctaaccagcgaccttatcagctattgtccaaatacgatcagccatttgtccagatatgtgtctttaagaatcttactttaatatagtactaattgatcaagcaagtaaaaaaaatatttctaccatctatgcttcaaataaaattttctcttaaattactcatccgatttacaatccgattacaccattgtgttcgtaacaattaaatctttacaacaagactcacatgattatattttaataaaaaatcacaaattactttatatgttaattactttaaaactttattaaatttacttttatatgtttaagaagtaacttagtgaaatctaaaagtaagttagatatattataaaagtaatttatattttttcatcaaaatataatcatgtgagttcttgttataaagatataattattacgaatacaacagtgtaatcggatcgtagatcggataagtagtttaagagaaaattgtattactattttcatagataatagatggagtgatagctctgtgtagtcacgtctataaaactgcattactatttctccaattcctatttaagctggtgctgctccagcgggaaaagcaaggtggtattattcgtgctacaatactgcgatgctgctgtgatcggttggtacaatatcgtgctgtactgtgtcgggctgctgcgatgtgggctggctactgggctgcggctgctatttgctgctgcttcgtgctgtacaatatcgtggagtagctttctatttttctctttttctcttttattactagtaaaagtgcccgtgcgttgtaccaggtggtgattacagagtgtgtatactgtttggtttagacaattaatctgctaaaaaaattatttgtttttggataaataatctgctatatatttgcgtaatatatatggtgtttagtttggatgatgtgtagcatgagagaaaatggatagacgaacaatgcgactgtctttacccaaaaggcgacggatgaaaatttgtatgatgaacggaacggagtgtgtacagtgaccaaaagatgtattagataattaggatcaatgtgacgatcggaaaaatacaaatatttatattaattatagattgatagatagagaagagatagatattataaaactttcaatcaactatttatttatttatttaaaaaagttattaagaatttaatttgcgttaaataaaaaaaagttattaagaagttgattagcgttaattacgtgacccagttagtgggccgagccttctcgtgtgtgggtagactccatatccgccgctggaaacgaagcgacgcttcctcgcccttatcacaaacgaaacgaagcggttagagagaagagggggggggggggggggctcggacaatgagaagatttttttcgctcttttttaagacggactcatttttttttcatttttttttatcattcacaaaattgaaatcggattggaatttgaggaacagacgaaaatacgaacgaatagagggggcgacgaccggaaaaatctaaatatttatattatagttattatagatttgcggcgcttcacagtccatgtcgcgtgtccggattttgtaccgcgcgaatcagcaatgaattaggaatcgaaggcagataccgatggacgaaaaaaaaattacacaaacattatgtattttttattaggtataggtaggtataggtttagatatgggtctcttaaaaggatggatataaaaatagattttcgcaaatggttgatggaccgcgtacaaaaactgaatatataaaatttagaaatattgacctattgttgtaggaaaataataaagcgatatgtcttcactaactaagtgtaacaccctgaaaattcgaccaacgaaatcaaaacaccaaaaatacggattttcaaaaactttttaagtaataaattgcatcatgccgattttattcgtctatttcattggattttgatctcggaatttattaatcgcgaataatgaataactaactaggaataaaccctaaaaatcaagttggctaaaaaaataattaaaatataaattaaaataaagattaggtgggattggaaataaaaaaaatattatcacgaccatattagcaataattaaattttagtacgatggaatgagaattaaccctaattaaaaattcaaataaattatataaacaaaataggagtgatattaaattagggtgaatttttagttaggataacacaaatatggagtaaactttgtttatgcaaaaattagaatttatagggctatatttaaatagaaaatgggctaaaatcgggataaataggaaaagttactgttcattgcggcataggtgttcgatcgtggtccccctagccccgccccctcccttgccgcgtgcgccgcgtcgcccgcccgtagcgcgcgccgccgccgttgccgcgccgtcactgtcgcgtcgccgtcggcctcgcgccttgagccgatgtgcgcccgttccctcgcgcctacgccccggcgagtggcccgacccctcgacgacgccctgcgccgctggcgggccgcccgttccatagtgccgagccccgtgccaccgcgcgcgtcgtgttaccccgcctgtaacgccgaacgcttgcaaccgccgtgtctgcgtcccattgcggatttagccctacgccacc

SEQ ID NO: 7579 - DNA, 39199 bp, Oryza sativa
tacctagaaacttttttaaatgctaaaggggggttaggcaaggagatccactctcaccattgctttttgttcttggtgctgagttgctgcagagaatagttaacaaagcttgctccttaggtctgttgaccaagtcaattaatgaacttgatgagaggggtttcccaataatacagtatgctgatgacacttcaattcttctcaaagcattgcagagagaggtgttctgttttaaggcattgttgaattcttttgcacattctactggcctcaaagtgaattaccataagtcctgtctctacccaatcaatttatctcatgagaatgcagtgctttttgctggtctgcttgggtgcaccataggcacaatgccttttacttatttgggtttgcccatggggacaactaggccaagggtagtggacttttgttgacagaaaacacgaggcctgggagatctgcttaactccagtgcaggtccaaaactcgccttcggatgtgtgagcgtgccagttgatttgatcctgcaatcaacaataaataaagacaaagaaaccgcgattaatcttataaatgatagccgatcggctaggtgccgatgacatatcatttattttaggccgatgtcatgtgtagatcgatcggcagtcatgaataattaagaaagaactaattctactcgatcggctgtagacattaacaatatataactgttatgtcgatatatacttaaatcaagtgattgggataaatcggtcgccatgccgagacagtataaatcacttagatcgaaatataaattaacgacagaactatatacgttcatagcatagccgatcagatagatctagcatgtatcggctaatactccgataccacttcatattaagatattgaagcaagtagaatatatcaaatagaagcataatatacttaaatgcatcaagatcttaacacaaagggcggatttaacatatcaattaggcatgtaaggtaaaagaagttaaataaggtaagatcggctgaaaccccgatgctacgctaatcggcaaccaggaagcacgctagagattgatattctaagcacgacttaatagatcaaactcaactgatgcagcattaagtatgaaaagaagaacaatatctagacaatcaagccactggatgtttcatagagtggtagatactttatacaatccaagctaatatcgctatttaacctaatcgaccgccttctaccaacagatgttagccgattgtaggttagatgacgatattaccaaagattatacaagatatatgataacttggcgagttacataaacaagattagagtgtcataaagatggaagcactaatcccgagaatacaagccgccataacaagttttacctcttgttgaagatcgaaaccgatgcagctcaacccggaagcaagaacccgtcgaaacaaaacaaaagtaaaagggtggcgatgcgccgaaattgtattgaacgtgtgttatttattacatagggctcggggtctatttatacctgagaattacaagatatgtctataccggacatgactattatctctaacaaactccaagataccataagtctttgcggcagacttttgcccaaacatatctctaaggaaattacataaaatatcctaattaatagatacaattgccttctcaggactctatccatgcgtggcaatcatcttgaagcatatcaactcaaaccgatgatgtacaccaaatcgtatttttggaatcggctgtatcggctagccctgtctaactcgaactctgccgatcctgaccgtagccgattcggattgcagtcgattcttgctctgtttccacaacgatcttcgtcttcgattccacttcgacctaatcttcttttccgatgctgatattaccaaatctggttgttaacaactttgcacccttggtagacagggtagagagaagattaacagcaagctcacaatttctgccacatggtgggagattcacattgataaactctgtgctttcctcaatccttgataaactctgtgctttcctcaatcccaacatactacatgtgttctttgcagctgcttgtctcagtggttaaagctattgttctctgccaagaaaaattgcctttggaggggaaacaacccaacttcaactcgaagatctcttgcttcttgggatctagtgtgcagaccaaaggataaaggtggactaggagtcatcaatctaagagttcagaatatagcacttctgcttaagcatctagtcaaattttacaaaggacatgatctgccgtgggttcaactgatatggaactcttattataacttcaaagtgccacatttagtttggaataaaggacctttttggtggagggatatagtggctctatctgatgtcttcaggggaatctcaaactgccatatcagaaactgccatatcaggactggatcttcagctcttttctgggatgacatttggaatgataagataagaagcaatgtttttccatctttatatatggttgctttagataaaaccctctctgttaagcaaatgggttctactcctcttgaggattgtttcttactgcccctgaacacccaagcttatggagaattcactgttctagaggaggaatggtcctctctctttgcagaacggtaaaggtgatgaatggtctttcatccggaactgtgataaatacacagctaagaggttttataagctcacatactcaaatgtgcatgtgccaaggccttttgtctggatctagaaaacaaaatgtgtaatgaagataaaagtttttgcttggcttttattcagagacagacttaacataagagatatgcttgatagatgacattgtgcaaaggaaaacaaagacctcacttgtgaattatgcctgaataatatcagagagacaagagagcatctctttttcttctgccctttcagtcaacattgctggcagcatttgggaattgcatggaatcctgacctagaatttttccagatggtggttttggctcgcattcagttcaataagagaggtttcttggaaattttcttcattgctgcttggcacatttggaagcaaaggaatgggaaaatctttcgcaatgagcttccctcgttcagctcttggagggctttattctaagccgatgttcttctgcatttgtgcagaatgaaagatccactaaaacatattattttttattggttacaaacagtgtaatcctttgatctttttgtttcccttttgttctcttgtaatttgtatttataaaattacactatgaggcaaagtcctggcagtatttccagtcaaaaaaaattaattgcttcagtttagagagttttttcctacaggcaggtgagatgaccaccagacaccagcacagtagctcattacaagagcagaaaccagattgaagattgtttggcagctcaaactgcactgtgtaggcagtagcccttgcttgagaagtgatggccatgaccttgagcctttgatcatctggaacagcaacacttaggtacgcaagaagctcttggaagtggcgatatacattgtgtaaaatatccatcaattactattatccctttcatccatcagaattgtgttacttgctgtctacggtttaacatggcactctaccaccaaattttgttgtaaacatggtatctaaacactgcttgagcgatccaacaatttagcactcagaaaatctaccactaagttatgtcgacatttattttttcttattaacattttaagcttctagcaacaacataaaataggaatcaaactaaacaatatgcaggaggcgtgccattggtgttggtatttcttaacgacattactagaaatataattcctaacaatggcgcagaaatacttctaatatattatggttacatagtccatctgcaagcgcatggatataccattgtagcatttcacccgagagtattccatgggtatcgtatatattttatcccgtgggaagatcatgtagagagaactcaactaataatttatatattacttgtgataatcatattctaagcaggggttaagataatccaagggtagagtgacacacaagcagtaaacactcattctcataatatatcatctaagctaagtggaaagaaaagagaaagaaaatctatttctatacttctaatatacatagtatacatacattctagttaactgatatactagctaataccctctatcggatgccctcctggtactttgagaagccacccctgactgccgagttccttacaacaacccgtcatgaccatacaactggggctaaatacggaggaatactctccctagggaattaacttaggattatataccggcgcggaggaatacccgtactgagatgtcaccatcagcggcccacctctcatcctcaatatataaccccaaataatgatatcccgtaatctagacaccacgtctaaactaccagatactactctaatatcatcgtcatgacatagagtaattgcatatgcaaacattatacccgcaccaaagcatctcctagataagctagccgtatattcagtataacatgaacataatataaagtaggtactcatatacttgaaagtatttcaataccataaatgtatttagaagagtattctaataaaagtacaaagcttacaaaagagaagagaaaagctactagagccatacccgaactcttccgaaggcttccggactcctgatttctactctatccctattccaccagctagatactactaaactaaacttaagagaaatgagagagctattgcttgaggtgtgtgttgaagtgaagagagtgaactccttaaataggcaggtaatgacggttatggtggttagaaaggtcggtaataccctccaaccgccatagggagtgaatctccaccgttcccccaaaaccctgcatccagcggcttcacggtaggttcggccgaaccaggggccggcccaaccagcccacatttttgctggtggcctcctctggtattcctctcagtagacttgtgaattttggcccagtgtgtcgtgttaattctgagttcttggcccattcatacataagtctggttctcgacatcgtccgattgatttatcgtctgagttgatgtcgattctcctccattttattgtcattctctgcaaaaggttagtatacctactactagtggaatattattattctaacatatttatgctttgcaagcatcactagttctcctctattttggtaatattgacggtcgaaactgatcgataacgaccatcaacaattggcgtgccccgtcatctagttattagaatgtctagttaacagatcaatcttctctctcaattttccctccccttcatgtcgtacaaaatcgtaaagtggcatcttctcgcagaccatgatactttggattgcttctttccaatttcatttgatgtgctcaaatctctgtcagattctattccaaagtcccttggaatcaagaatttttggaacgagtgctgcgaatgtcttttgccacttgtctaatgtaacatgcctttggtgccgccttgtacttagatggaacactgggatcattgaagtcaaatccttgctgttcaagtgttcatttggagactctttaagtacatgtgttattatttgcacttctttggtaggcattccctcgcaagtaatcaaagtcctgaagtttcaaactcagtactttgtttaatctgctttgtgcgaacataaacagcagtaaaatattgcaattacatactagtgatttttgatttgctgatcttgtttgggataaagaaaattacctgtgtacagtttgttcatattttgcttcattatgcctaccactcccctggctggtgctgcactgctctgcctccccacactgcctgtacctcgctgctccaggacatataaatcttcctgctaattagcaatgatcagtagtccagtacatactcaagatcaaatcaatttttgggacctgtacaaatttcctgatggttccttctacaaaaattgaatgtgcaatatctgaatgttgcctatttttgcatgtattgttttgctgaaactgagtgtgaattgattcttgtgatttttttttacagtatgtcagttccatttcagaaagcttagaaacaatgtgatccaaactgaaatttagttttcctaagttgcactatgtgattagttttatctgtatacatccaaatgaaaaatagtatgcatctaatcttgttcacattgagggatatctctgaggtaattactgccctgctatttcggtatggtatgcatatattgatatatactggtccctgcttaatttatattgggctttacatcttcagaatagtccagaatgctttacatttcagcttttatgagctaaattaacatttgttcttaaataagttcaccggccttgaaatatacaagcatttgccagaatacattctaaacatctctcttttgtcgaaatgagcgtttttgtgtgtcgaaatgaaccggtaagaaccagtttggtatgctccgatctttttgtttgtttatgtataataacttaaatgatagtattattatttgtagaaactatgatgatgaaacctataacactttaaaacatgatgaattcaaaccacttttatgaaattgataatgatcaattgttggtggaagaggaaaacaaggaagattcttatgcataacgtatgcctggatcttattcaattcttatgtgtccaacaataggtgtgtcagcatggaattgaatttggattggtatggtgtgaacctttgatcccatatttgtatttttctttggacatttgagctgaatgtcagttgaattagacttattgtaaagcaaactttatatgtaaagagggcatatctgttaaaagatatttggttaattccactgacttgaaaagttattttttaaaaaggaaaatgtgtgctcctgcttctgatgatattctgcaatgagtatattcttgcagttgcagtgtattagagttcatttatattgcctaatggcatgcatagcacgtacacgcttactaatgtgtagcagggtttaccaaaccgtttgagggtaaccctacgtttgacggttactggctttgtttggcagccagttctgctgcagcagttgaaaatcgctgcagctggcagccgttttgaactgctgcagccgcagctgctgtcgaaaaatctcttccgaacacacccactgcggtaactgtgaggtataccgtggtttcaaaaactgaaaaggttatcgcatgtaataacctggataaacgcatgataaccatatggatagtattatgttgtatattattagaatgtcttgttaacaaacatcaatcttctctcaattttctttccccttcatgtcatacaaaatcctaaaaggtcattttccattttctctcagaccattgtactttggactgtttcttttggaacttcgaacacggctttggtacgtttgagtaaaagtgtacaaccacctaaccctccgtctcaaaaataaggatacagattcatagtatcatagtattatcttaggatgggggtgtcctatagtatggactaatatattaggatggtgaaaaatgacgtaaaccttgaattactattttttatttatttactgcgttcaatttaatttaaattaatctgtccctaacaatgtgatgctattaggcccatagcccgatacattaggccgtcccgtttcgaattttttacatttttaatttttttaatatttacagaaataatctatcggcgaaaaaaattaaaaaaaaatagaccctgccgccctccactcgggcggcaagctgacgtggcaaacgggggagggacgggcggtgacggcagacgggtggcggagggttttttgcacgaaaacccttgcgcccgatgcaaaaaagccagcccggacaggccattttgcaggcggccccttgccgccctctggccgggcagcaggcctcgctgcttataaaaggcctgccgccctgcccctagccctcattcctcccctcacacctctagtaaaaaaacaagaaggggggagaagagaagaagaggcgaagccctgccggattcagacgccgattttaggtaatattcatagatcctatatgtgactattgagttaactaatgtgtattttttaaaactttgtttgaataaatacattatatttttagggttttacttgtactaatctagaactgcatactgttagatatcggtaactatgtagatctgctagtttgaaatcaatactttaccattacattagcatacacaacaatatattacattgtaggcgtttattacatgaaagaataatatgatctagttatttcgttgacaaatatgtccaacaaacatacatttcaagtttaccatggcctaggaaacgtccgttacgggccaactggggtagatctgtcaaaatttattgtaacaccaaggggaattgatagaccggctgagaggagtgtaccttctataaaaggatggttgatgaggggcttgagagttgatccacagacaagtgacataacaatcaatgttatagtaagtcgggcaactgagggtttttattgggaactaatgccagttcaaaactctcgtatgtggagatggtatgtggagaatgcattgcaacgcgggtggcctctagctatggttccgtttgttcacccgaaggatctaggtgtgcagatgaacatggatgatggcgagggaccaagtgctgaagtaaatgagacttttgtggaagaggtcaacgcaccagaggaaggtggcgtagtagctccagtaggcattcaacctggttgagtagccaacgagggggagactgtcggtaccattgtggatgaaatggagagagaggattttgacaacgagcgtgtagaggaaggtggttcgtcagatgatgagacggatattaatccagccgaatgggctagtgaggatttttctggtctggtcgtctctgaagaggatagtgtgagatgggaatacaaagaaaatgaggttattcagggagcgatttatactagagcagaagaaatgaaggaggcggtaaagcattttgtagtgtcacttcatagagagttttgggttgccaagtccaatcggtcgcaatatgaagttcggtgtgttaaggaaaaagatgggtgtccctggagagtgcacgcttataagggaaaatggaaggattactggacagtgtcagtcattaccagcatgagcatttcagaaataccacaggtaacattacatgtgcatttgttgcatctgagatgtatgcgcatgtcatcaataatctgacatatgaaccaaagtcaataatccgacatatcgaagagacatacaagtatactattagctatgccaaggcgtggagagccaaacagaaaataatagagatgagatttggaacttacgaagcctcgtatgacaatttgccacgcctgcttggtgttatcaaacaaagataccctgggagctcttacgcagtgaagaaattcccctcaattgaacatcctggcaagagtgtgctgcaaagggtgttcttagctctacatgcatgcaagatggcattcgtgcactgttgtcctgttctctacattgatgggacattcttgactggaaagtatcggggccatatactaacagcaataggggtagatgggaacaatcaggtattgcccttggcatttgcttttgttgagagtgagaataccgacagctggtactggttcctgaaactggttaaaacagaagttgttggtatgaggcccaatgtgtgcctgatacatgacaggcacgccggcatgctgcgagcgatagaagagttgcagtttgggagtatggatcgaggataccctggtgaatgggaagatgtacagagtaggtggtgcatgcatcatatgtgagctaatttcttcaagcaattcaagaacaaggagctcatgaacatgttcaagaggctatgcaatcagaaccaggagaaaaaaattcaatgagctttggaagagattagatgagttgacagccaaatgcagttatctgcatgcagcgggaccatcgaccgccgttattgaccatcctcaagctcttggacctctcccaacagatagtccaacattggttagaagaactggagtagagatccggaaattttctcagtggattttgcatgaaccaaaagagaaatgggccaaggcttatgacacaggtggttctagatatgggataatgacaacaaattttgcagaagtttacaactgggtgatgcgcggtgtccgtggactcccactagttggcatagtagagttcattttacatgggacatgtaggtattttagggaccggttccagacagttcttccctctatgccgaacaacgacattttattcggaactttcatgcagaaaaagctagaggagtgatgtaaaaaggccatgaaacatcgagctctagtgcaaggtacccaacagcataggtttaagatactatgtcaagataaggcacgcaggggtatctaccgcaagagagtgaagcagggatgtgttctcaaagccgacggcacatgtcattgctcatgtgcaaagcctaagctgctccacgggccatgcacccatgtcattgctgccgcatcggagtgtggcataccagatgcagtatatgtgtcacagtacttcagtaagcaaacaatatatcatacatggagtggcgagatttatgggttcggcatagctggggagttcacagagactaatgatgaagtaatcaatattcctgacccatcgaagctccaaggcaaggctggaaggaggaagactcgtcacatccacaacgatatagacgagtcggaggcgggcagggtgaagcgctgtagcaaatgcgatgaacgtgggcacacctacaagcattgtcctaaagacaaggaaaaaccaagtgcagcggaggcaggactatcaggatcagtagcagatggagctcgccctacgggtgaaggcactacctcaactcgatcccgtcctagacgtcgtcgtgccacgtctggctacgtggtgtagttcttgtgttctatgttggcatgtggctttgcttgtaatttggttcaaacttatcgatgtgtttatgtttcatcgtgtaatgtcagacttccgcatgtaatgtctttaggtctcgtgatgtaatgtcagactttggcacctactgtctttaggtatcttgatgtaatgtcagacttcggcatgtaatgtctgtaggtttcgtgatgtaatgtctgtatgttttcgactgctcacctgtcgtgcagacgacgttgcttaggcagacgtagcaccacagcggccaccctgactaactagtcctcatctagttgcgcacgttcctaagccgactccccctccgcacggaggtaagtatatttaaggattttttgtacatgcctcgcacatctatgtgagccgattgatccaattgcttcaggatttcatgcaccgttcagcaccccgccttccacgggtaggccatctgttgtgcccctcacagctatttaaaaaaacaatagtacttcgacaatcaatttacatgcattttatgtcttagtttacaagggtcccgttgtcgatgtctaggtttcgcccagtttgctccgacgcaggtcgcccacttctcctaggctgcagggtcagcgtctcaggcagctgcgtcgacctcgcactcagcgcagttctggcagtacaccgggacttcgtcacaggcagtcggcacgtcgagtcagggtccaccactggacaatgctaggacctcgtcggactacggggtggcttccaccttgctcttctccatgagcgacttcgacttcgcttcagtctcgacagaggacgtcatcggcccctcacagctgggaggcgcaccgccggtgcagacgcaggaccagtcgccatccactccagcgccagacactcatgctacccgtgctgtgccaccgaatcgtttcacgtactcccaggaccacgtgcgagcacaggctcggaggaccaagcgtggtcgcggcgcggggcagggccagtagagcagacttatctttgtttatttactttacatgctagtactgtatgcttgtgtaatgaatacgttgttgttattcgggtttctcatccctgaacttcgctgttaatttttacgaaagcacgatatctttcggcacatgcatgacatatttctgccgcaccgatgcagcctcctttattcgcgtgcgatacgactgcggaatggctgacccaccagtgcccacatacaactttcggcgccaatcaggcgtacccaccatggcccgcgacgttgacatgtcagggatatcactgcgatttttggtgcctatataagtcgccttaacgagcgaggcctctgaagcatctaggcccccgttgttaattttggtaattaatgacaagcgctaagtgtggactaaccattgctattaagatatattttaagttaggtccacgtcatgtgtgcgcatggatgattatcgatggattaaaatttgatggagcgaagcgaagaaaagaaaacggtaaaactagtgctttagttttaaaattgatcgaggtgaagggcgatcaaatttgctagtttatttttagtttcgccgtactatcaaggggggtaatgacctagaaatgagatgattttaattgccacattaggtcattatgcatttagacttgtgctcacatttcatctcacacacacaattattcatctttcactgggatcgtcctgaccaggggcggtcagaccggccatagagtgacggtttgaccggagtgccccggccggtctgactggccccaagcgggcggtctgaccggcgcataaggccggtctgatcggaggcacatgcgcggtcagactggccccctggaggccaggatggtgttgctcggggtggccgatacagagccgacggagccgtatttggtcagaccgagctgatggcagtctgaccgagccaaggccggtctgaccggccactcactatcggtctgaccggccaggccgatggggccctctaacagcgctacaacggctcgttttctagccgttgcagagtagcacggtctgactggccacatacctccggttagaccgccagagcattgagttggggaatttcgcccccaacggctagttttggttggtgggagtataaatactccccctccagcagcaaggggctctcttggcacccaattcaattgcatacaccccttgcacctctctcacacccacttgagctttgtgttcatccatctagtgtgttagagggttaattagccaagagtcaagtgcatttgcttccattgtagagcttgtgtggcacttgattgatcatctccacgccggatcattgcttgttactcttggaggttgccgcctcctagacggcttgtggaggagttgcctggtgacctctccgagaagattgtggaggaggcccggcgtcggttgtgagtggtttggagttcaccatcttcggagtgaaggaagaactaccctagtgatcgaggcttgggtagtcctctccgtgggccggctcccgccttgcccaccccttgacaaagggggcgtgcggtggcttcgtggttgagcggtgtagttgggctcgcctcaacggggagtaggaaaccgacgagtttccgaacctcggtgaaaaatcttttgtctccttgtctcatttacttgttgcatttacatttgtgcaatttacatttctagatatatactagagaccatttcaccttaggattgctaaacattaacataggaatgtgatttactttcctagagatataattgagccattatcacgctaggtttgcaaaacataacttagttacttagttagagttgaccctcaccaagcctagcaacttaggttagttttgattaggtgtcatttagtttaaatcgcctattcacccccctctagtcgacatctcgatcctacagcctcacaatctttaataactcagtcacattcggtactctcttccccacttgcttcattacaaatcctaccagctttcgtcaatgggtagacgcctgggcattgaggatccgaattggcatagtgatccttgtgtatacctactaccaccttggtgccagcgtcctctctgcctatgcggtgactgatgccaactaatggcttcgaggaatcctgatattcgaggaaggcccttttttaggtgccctaactatgaccgtgaggtattttattatttgcatatgcttattcattccgtatgggcaattattttattcttcgtaatactactctattcgtcaggcccgcactacggcttgcgtatatatcgagtgggtcgatacagaaaatcccgttctcgacctaaccacttgtttacaagaaggatgctggtatttcgcattcgaaagtactgagcaatacttgcagagaaaagcggcttacgaacgataatgtcgtgaacaacagtgcaactagcgggtgctaactacggcactccctccatgggaagcccgtccaagatgcacaagcggtgatcgttgtcaggttcttcgttccataaagcctacgagattgggtcgaaggttctttgtttgtccaaatattcttgacgacaatttcatggtaagaatattttgattatcatgattccttattttctcacaacatttactaactttgttcgcttcacatctattctttcccccccggaaccaccaaggagatgtcaatagagagaacggatagacaccagaagggttctaactccacctagccgtgctgtgcagcttgaactaccagagcaatacagggatactaaagcgtggttttagagaggagagggatcctcacgtagggattagctattatcagacaacttggcatattgaaatttgtactttcatgcttccttgtcccattatcacatcgtcgttgtgttcaactcttgcactgcctccctcctagttcgaatataatatcatctatgtaaccgcaatggaaatagatgtatcatgttcaaattctactactatttcttcatgttacataattctccttgtttaagtctatataatgtttctacgaccgagattgcgataggcctatatcaatttcgtacactaatacgttgaataagttacaaaataatatcttacttaacatatgaaattgcgaaaacaaccaacttcaatatatttttaaaacattattaataagttttaccaataaataattctttaattattattaacataatagagaaaaatcatttggcttgtacttagtacgagccaaatgctctttagggctgcaaaaattgcatttagccccttgccgccctctagaggtggcaagggtgtaaatgcaaaatacgcatatggcaccgtccctcccccgtttgccacgtcagcttgccgccctccattggggcggcagggtctatttttgtaattttttgcgccgatagattatttctgtaaatattaaaaaaatttaaaaatgaaaaaaattcgtcctgtttcccattgtccatatcatacaatgtcttttctcaacgggccggatataacaaggtttttcaccccatcacatcgaatgtttggccacatgcatgaagtattaaatatagaaaaaaaactaattacacagattgtgtgtaaattgtgagacgaatcttttaagcctaactgctccatgatttgacaatgcggtgctacaataaacatttgttaaattaggcttaataaattcttctcatggtttataggcaggcactgtaatttgttttgttattagattacatttaatacttcaactgtgtatccgtatatccaatgtgacacggcaaaaattttcacccctggatctaaacacagccagtcatcatggcacgtttccttacaacgcctacgtttgaatcgaacaatgaaacgatggattatatggtactacctccatccccaaatacttgtcgtcttgagtttttgtttgtaaaatttgatcattcgtcttattcgaaagattatagaattattatttattttgtttgtggcttgttttattatgaaatgtactttaagtatgaattatccttttttatatttacactaatttttcaaataaaacgaatggtcaaacgttgcaaccaaaagtcaaagtgacatctattatgggacagaggtagtagtccatttacatgggtaagctatatttatatagtatttatgtggactggatgtttctatttctatgttgtttgaggagaaagagtcaaaacttacactataagtttcatatatttgcactataattttcagtattatgatgtaattggttattggtttaatttagtatataagtaaaaaaataaaaagtagaagggaaatattagggatggtctatgtgtcaaacaactttaaaaaataaattttataaaaccctatatgatggtccaagttttgcaaaattgcgtaaagtttggcacgtggcacatttctaggtattatggttataaagttttgcaaaaccacattactaatcattttgactttgatttaccacacttttaagatctacaatcatatctcaaatttatgagtgttatctatcatatagatgttacacccacgatttctattttgatataggagtatgtaaaaatggttaatggtgtagttctgtgaaattttcgaaccataatatctatggttctatgctacgcgctaaaatatatatggttttgtgtaatttggaccataatacctgtagttttgtacaattgatataacccaattagttaatgtgtgaaacaatagaactccttgtattattagttatcacagaacaaaatatattatagaattttttttatcacaaaatttcagataacatagaatgaccacatgttgatgagttgggaaaatggaaattaagaagtataattgtaatgtggaaccggagaagggagaacatcagaagcaaaagtacacgttatcttggactagtcaagaatatatatactgaccaagtatgcgaagttgatccaacaaaaattaacaccccaaatgtactgaggagagcttgataaatattttacgggggcttctaaactactccctccgtaaaaaaaaccaatcctaaatttgaatctacatatacactatgtacagatttaaactgaagatgatggcagcgagtcagcgacgcgtgtgagaacggggacgagttcagctgctgacgtgagtggaggaggggggcaggccaaaacatactcggaacaaaaacgggtcaaaaacccaaacctaactgcaagtcttggtacgatccaacggtcacaaatttggaaaaaaaatacaaatgaataaatcttttcattttcttcaactcttgctcccgattgaatctgtctccctcaaccataatactacatccgtcccaaaatatagctacatagtactaggaccagattcgtagtactaggtaatgccacatctagtactaggtagctacattttgaaacggaggaagtactgagtataacacctccccaactttcgaaaccagagcaaatcgagtctctttggatagaggtttcatccttcatgacgctcatgagactgtcggtgagaaaaattaaaataataacagcccccacctctccctaggccctagagcaaatcgagtctctttggatagagatttcatccttcatgacgctcatgagacctacatgttaatgagaaaaattaaaataataacagcccccgcctctcccaggccaggcccacttacatttggcaactttcatatgttgtagactgtcctcacagaccaacacaagtcttttctgcacactaggccaagcacgcttaacctcagagttctttagatatcggtttctggaaaataagttgcaacttgttgatgtaagtattctattaattctattaagccttgggccaagatgtcacaatccatgagccctgcgctgcatccgctggccttcgacccggttgccgaggtcgctagggtggtagacggcggccgacatcggcgagctcgcagggagtgcgggtaggaatagcgaggagctactatcctgaaattgttgtcgccgtccgacaaggcatcgttgccttgctcctctcctgacattcgatgggagtttcccggactaggatgccacatcagtcaaatcagctatccatattgtcttactacttcagggcctgtttagttcactaacgaaaatttttagcgtgtcacatcggcgatacggacacacatttaaagtattaaatatagactaataacaaaacaaattacagattccgcctaaaaattgcgagacgaatttattaagcctaattaatccatcattagtaaatgtttactgtagcaccacgttgtcaaatcatggcgtaattaggcttaaaagattcgtctcgcaatttacacgtaacctgtgtaattattatttttatttatatttaatactccatgcatatgccgaaacattcaatgtgacagggtgaaaaatttttgtttgggaactacacagggccttatttaacccggttttgaaagatggatgtttaataatttctgaagataaaggacctacagtgaacttattccatcccaaaacagtgtggtggtgtggcttggatgggccgggctgggcctcctacagtccggctcggtccaactatatatctctcccacctttatctattctattaacaaaaaagtgaaaaataaagaaaaattcattcttcttctccttctccttcttctcttcttggaggatatttcttccccctccgtctccggcgccgatctgcatccacccgccgagcagagaccagcgccgccgccgccgccgtccgttcctcctgtatcgcgtcctggtgagcatccgcccctcgttacgcacatttttttattcgaatttttttttcaagaatgaatttctgtgcgttaaccctagatagtacgtagcttccgttgtagatctggatctggaaagcttttctcttgatttgttcgtaatgtgatactaatagcagtttctttgcttgtttgtttgtttccctaaagaaatttcttttttctgggatgtccgacgttggagacgcccctgtgcagcgccgctcttgttcgaatccggccggtggtctgtaggattgggcggctgcggcggcggcgagatggacgacgacgccagcatgagcataagatgggggggattcttcgagtcgccggcgaggaacctcggcctgcagctcatgtcgtcggtgcctgctgagcgtgacaccaagcagctgctctctggtagccccttcctgcatcatcagcatcagcagcatgtcccgcaccaccaccatcagccccatcacccgcgtgactgcggcgccaatggcaatgccaatggtggtgctatgcctcctcctcctgccacggaggctcccccttcaatgccgatgaacttcgcgcgcagtgacatgtggatgcacccgcaacagcagcagcaacatcatcatccccgcgagcacaaggctcttcacaatctcactgttggccatggttcttcgcacattgcgcatcatgacccagtgggctatgggatgatccccggtacgcataccctgcagatgatgcagcagcaaacagagcctcaactgcaacccccaccaccgcctcagcagccaaaagaggaatgcatttcctcgccattgatcgaggaaaatgtacctgttattgatgagccaccacctcccaagaagcggcagcagggccgccaacccaaggtaccaagggctaagaagcccaagaagtctgctgctcctcgtgaggatggcgcaccacccaatgcaccagcaccacggagaaggggtcccaggaagaatatagggatggtaattaatggtattgatttggacctctcaaggataccaacgcccatttgttcttgcacgggcgcaccacagcagtgctatcggtggggtgcaggtggttggcaatctgcgtgctgcacaaccaccatctcaacgtacccactgccaatgagtacgaagcgccgtggtgcacgaatcgcaggcaggaagatgagccatggtgcgttcaagaaagtacttgagaagcttgctggtgaaggttataatcttaataatccgattgacctgaagaccttctgggcgaagcatggaacaaacaagtttgttaccataaggtaaaagacaatgaaattctaaaatttgttggctttgtaggttgctctgcagctgtttggtctgagtaattgtctgtatgtactctagattacaaactgcagaatccttttaggtgtaggttttaggcatgtcctgtccctttgcagtagtttacatgcctcatctgtgacctgggtgctgacctgtatggtggctatctgcatgtatctttgtcattatctttacaagtagcagtgtaatgcgacaatctctaatttaggtggcatgaaagttaatctgttcaacgtttctcattatgcttaagtcttctgttatacaatgctccattgcaatgcctggatgttttacagaatacaatatagttgctatctcatgaagtagaaacgttatctttttcatgctgtgttctgtatgcatgcaaagtttatatagcctatatatacatgtcttttcttttattgaactgatgtttgcatgcatgatgaatgtgggcaaaggttctgtacctaatctggattacttaaccagttctaataatatctttactgtgagcaaggttcttgccaatttcatttgatgtgctcaaatctctgtcagactctattccgaagtcccttggtatcaagaatttttagagtaaatgctgaggaatgtcttttgccacttgtctaatgtaacatgcctttagttctgccttatacgtagatggaactctgggaccattgatgtcatctttgctatttagtgattaccctttaagtccatgtgttattatttgcacttctttaggaggcaattattggctagtaatctaagtcctatgtttcaaactcagcactttgtttaatcaactttgtgcaaacagtaaacagcagtcaaaatattgcaattacattctattattttttgatttgatgatcttttttgggataaagaaaattacctgtatagtttgaacatattctgctctattatgctgcaagatatcaagctatctgcataaatcttgtcatcctgaaccttcaaaaaatacagtaatatttcacatgttatgcattcaaaatgttgatcctgtctactagggcaatttaactctgtcaaggctaattgcattataaggtatgcatgttctctattttttctatttgtagattacagagaaagtggtgccatttgtaataaatgatgttatgattcagcaattttcttttttataataaagtactataataattagaatgctgatatgagaatgaacgatgatgattaatgagcatcagaattatatgaaatgttagataattaattatcacaaaagctattttctttccaacttcatatatgctgaaatgtgggttgctgctagtttcgtgttgcctaaactgcagtgttacatgagaatattgaatgtttgcacatatgttttagaggccttgagtgccacaaacgatggacagcacctttttgtaaaatgtaaatacccagtaaaattattgtgcaaaatatttggtagtctatgaagccattaggaaaataatgtaattctgagcaaatagaagctaatagtgccaataccagagctattgtgatagatattgttcactgatatgatatgtgtgaaacgttataacttgagctattgcgaattgcggtagcagagtgtgcgatttatcagcatcatcatcgtacatctgggaatgttgtcttgggtgatctgtacatgtactctagttccatagatcttacatgctagcccctgctgttttttcttgatctgttctgttcttggtgtgcattcgccagaccgatgtatgaagatatattatctgcatttgttgatcgttgtacattttttttattttttgaaagaaaagtatgctatgtttagtttgctgagatgcaaatgcaatgcatcatcaggctagagttgatgatcaggctgagatgtggctgcaaatagtttttactgtgatgtttctcattgcttccatgttctcagttaccatggaagcagcagtattcccatcatcaatgccatggaattttgtgtatatgatgtgatatggttttccctactgttcatacttgatgtgttctaaatgagagtgtgacactacgtatcttgaagctacaaaatgaataattacccttttattctgtctatacatgattgttcctccatttggtcatttcattgtctcgtgtggtcttcacatggcttcattgttacttgctgagatatatcgaaaccaatctcgccatcattcatccattctgatgcattttgcagtagtgcttattgttttgttgtacaaaagattattatttattagtattgtatagaagaaataaacaaaagcagctctaataaggtgaactacagctgcggctaaaactgggcaagtttttgcattttaacttatggaaaatattgtttgtgcaactctccaaggaccaaagggatctgtattggccatgtttcagcacacggcaatgaggttcagacttcagaagtccaaactgatttgtgtcttcccttcccaccatgtactactgataatcttgcaacttgaaactcatcattgaccaacagtttcatcgatcagagcctattaacatgcagagagagaatatctaatagcatatgtggtcaagtttgctcacatcttaagcttttcttagatttctaagggcgtttacagtgtgccgttgtggctttcagccttactcccaggaaccgaatattcgtgtccacgtactcaaaccgtttggcctcctcaggaccaaagcacccatctttttatcctatggcaggattggtgtgtaggcagctcaaattcctagccccacatttctgccatacagcacccctttcatgaccctggtactactaaagaggaaggcaatgtttgatcatgctcctcctgcagtaaaaagagcacattccagctgggccttattgccttccctctctgataatgggctttctgatcaggagattttagatgttgcacctttgcaagcccagccatcaagtccagaagtcaccctagtagtgcttcagattcctatggctcctgtgaaaaaaaaggattggaagactatcctatacaatcctactagaaggtagagctctaggcttcttaatgccaaccaagagctcaaatttgatcatcgaatgggaattggcaaacaaaggggaaaatcggctaaaaggctgaagaagttggcaggtatataaaaaatccttatccctggcagcaaaattactgaatctgatttcaatgctctggaagatgatataaactcagattcttcccgttctgattgttctttatctttgttgcaaaagatgggggtggacctatgtggcctgaatcctgaggatgtggctgaataaagtttagggggagaaaaaaaggaagaagctttcccagccaaacatggatgattaggaatgaataatgtttctttgctcagaacatgatctttttgtttttcagtactgtcgaactgtgatcagtgtcagtgctctttgtgtttgcttggaacttattttatatggccctatgcaggctaatttaattagctatgtatctatatgcactcctaaatgttttcctcatgaataatgtgtttaaatcctggaatgtgctgtgctagaatataagaggcatgaatgctgatacggaactgttgtctttgaggcaaaagatagaggaaagtggttgtcaggttttctgtgtccaagagaccaaaaaacaaaatttctctttggctgatattaggacttctgctcctaagcgttttgatgcgccctcaaggggtgcttcagggggaatcttagcggtttggacctctaaagtgtttttaggaaccccaggggaaataaacagtttttctgttacagtaaactttgtttgaaggcaatcttcagaagcttgggccttaacttgcatatatggcccatgtagtggcccaaaacgtatagagtttgttatttggctgaaaaatatctcttttgggacaatggataacatgatttttctaggagactttaatttataccgatcggttgaggacagaaataagtcgggagccgacatgaacgatatattcatttttaatgatgtaattagttctcttggtctgctagaaatccctttaaaaggaagaagttttacctagagcaatatgcagaccagtctcctcctggagcggcttgattgggtctttacaagtccagcttggactttagttttcccaaacactactgtccactccctgacccggaatatatcagatcatgtgccctgtgtagttcaaattgataccaagattccaaagtctccaattttcagatttgagaattattgggttgaaatggaaggattctttgagcttgttagcagaatatggtcaatagaccctggttatgaagatccggcaaaatgcattagcttcaagttaaaatgtttgaggaaaagtttgctgcattggagtaaaaacttgtctaagttaactgctcttttggttaattgtaatactgtgatcaatttcttagacctaatagaagagcataggcccttgtccatccttgaatggaatttcagagaaattgtcaaaatgcaggtttttaagctccttgagtttaaaaggctttattggagaaaaaggtgcacgaataggtggatgttattgggtgaggaaaatactaaattcttccaagccattgctactgaaagatatagatcgaactccatttctcaggtgcaggatcagcatgggcagatagtcactggtcacaatcacaaagcagatttgttcttccatagtttcaaaaacagaatggggatttctctcttgcctccaatggactttaatttgagggatcttttccccaatccggaaaacttggattgtttggtggatcagttctacactcaggagaaggacaatcttattaaggtaattctatcagataaagcacctggccctgatgggtttaatgggttttttcttaagaaatgttggcaaatcatatcacaggacttctacaggttagcagctcactttcatgcctgctatactgatctgcagtcgataaacatgtcttacataaacttagtgccaaaaaagtcttctctagaaatagtaaatgattacaggccaatttcactgatgggcatcagtttaaagtttataaccaaattgatggcagataggctacagagtgtaatgcccaaactggttcatcaaaaccaatatggttttatcaaaggcagaacaattcaagattgtttagcatggtcttttgaatatatccatcaatgccagcagtcaaagagagaaataatattactaaagcttgactttgagaaagcatttgattctatagagcactctaccttgatatccattatgaaatgtatggggtttcctgaaaagtggctgcagtggataagatgattttttttcctcggcacattcttcagtactgctcaatggggtacctagaaacttttttaaatgctaaaggggggttaggcaaggagatccactctcaccattgctttttgttcttggtgctgagttgctgcagagaatagttaacaaagcttgctccttaggtctgttgaccaagtcaattaatgaacttgatgagaggggtttcccaataatacagtatgctgatgacacttcaattcttctcaaagcattgcagagagaggtgttctgttttaaggcattgttgaattcttttgcacattctactggcctcaaagtgaattaccataagtcctgtctctacccaatcaatttatctcatgagaatgcagtgctttttgctggtctgcttgggtgcaccataggcacaatgccttttacttatttgggtttgcccatggggacaactaggccaagggtagtggacttttgttgacagaaaacacgaggcctgggagatctgcttaactccagtgcaggtccaaaactcgccttcggatgtgtgagcgtgccagttgatttgatcctgcaatcaacaataaataaagacaaagaaaccgcgattaatcttataaatgatagccgatcggctaggtgccgatgacatatcatttattttaggccgatgtcatgtgtagatcgatcggcagtcatgaataattaagaaagaactaattctactcgatcggctgtagacattaacaatatataactgttatgtcgatatatacttaaatcaagtgattgggataaatcggtcgccatgccgagacagtataaatcacttagatcgaaatataaattaacgacagaactatatacgttcatagcatagccgatcagatagatctagcatgtatcggctaatactccgataccacttcatattaagatattgaagcaagtagaatatatcaaatagaagcataatatacttaaatgcatcaagatcttaacacaaagggcggatttaacatatcaattaggcatgtaaggtaaaagaagttaaataaggtaagatcggctgaaaccccgatgctacgctaatcggcaaccaggaagcacgctagagattgatattctaagcacgacttaatagatcaaactcaactgatgcagcattaagtatgaaaagaagaacaatatctagacaatcaagccactggatgtttcatagagtggtagatactttatacaatccaagctaatatcgctatttaacctaatcgaccgccttctaccaacagatgttagccgattgtaggttagatgacgatattaccaaagattatacaagatatatgataacttggcgagttacataaacaagattagagtgtcataaagatggaagcactaatcccgagaatacaagccgccataacaagttttacctcttgttgaagatcgaaaccgatgcagctcaacccggaagcaagaacccgtcgaaacaaaacaaaagtaaaagggtggcgatgcgccgaaattgtattgaacgtgtgttatttattacatagggctcggggtctatttatacctgagaattacaagatatgtctataccggacatgactattatctctaacaaactccaagataccataagtctttgcggcagacttttgcccaaacatatctctaaggaaattacataaaatatcctaattaatagatacaattgccttctcaggactctatccatgcgtggcaatcatcttgaagcatatcaactcaacccgatgatgtacaccaaatcgtattcttggaatcggctgtatcggctagccctgtctgactcgaactctgccgatcctgaccgttgccgattcggattgcagccgattctcgctctgtttccgcaacgttcttcgtcttcgattccacttcgatctaatcttcttttccgatgctgatattaccaaatctggttcttaacacatgccccccaagtccggaatatttgataatgtttcggatttgccatatatcgactccgagtgaatatcgcacttgccgttttctgaccgttactctagccctttaaatactaaccgccacccccgagaaacttcacaccgtttcctccgttttcaccactgaagcaagccacgttttctctctctctccagcgatcccctcggtgcaccagcgatttcaaggcgattccgtccccggttagatctccgcccccggcaatgtcgacttccgccgatccatccaccgcgccatcggccgagtacgtagaggtaagtacccatcggctagatccctttcttttgtagcagattgattttctctcacctcatcttgttttcttcctctctatccccatctgtaactgtagcatatgtccaatctggttgcgattccgagtctgtcgcacgagaaccactactttcttggtccaatcggcaaccttgaccctactgatttcatcactggtgaaaccaacagaatcccctttagattagccaaccttaatctgggtcactggaagaataccttcaaatcttggccatctcttgagaaaactacccctgagaagagttggaccacatggtacaagcgtgtatcggctagtaaggcagttcactgggatgagatcgggatcaaccaatcactttccctcaccatagccaattccgctaaggacgaatccctgatggctgccgccacctatttctggtggaacaccatcaacgccttcctattcaaccaagggccgatgaccccaactttgattgacatcactatgatcaccggattagatgtaacttcatcggccaatcctatgagcttgaacactaagaaccaatttgatttcaggaccaaaagcataggtggttggtctagttacgtagcagcatatatgggtaaagggcttgtcactccccgagagcatgtagcctttttgctgatgtggctggagaaattcctcttttgtggatcaagctgtggccccacaaccaattggcactttgtagccgaagccctagaatcacgattgacaatttcccttgggcaaaatcctcctcggctatctatatcaaatgttgaacaatgcatcggccaagatagccgtcggctcagtagttggggcaggtggaccatggtggttgctgcaaacctggctaaacttggcagttatgaaagttgtcaatcaaccatctgtgacagaagctgaattcccaaggttggagccgattgtggaagatgatggagaagaacgcactcatcgtagatgcatgtcatatggagaatatgcatatacgccaactgatgctggagcaaagttgtcggctgagctgcttaaggattggttctgcagcttttatgaaggctttcagaaagatgcccgggtttggtttccttatgaggactcagcagatcttgaacttccatcagatttcagatttgaagatatcaatcatgaaaaataccagaaatccagggaagttcttacggctgcaatcagcccatgcatccttcttgttggcattcattagggcagaaacatccaagtttcttatgaattttaccacccaatgagctcagctagacaacttggattgggacaactcccaatcggcttattctttgctgacaaaatccagtgccgaggagaaatttcatcaactctgatgatggatcggctactcaacatcccaggaccccccttgggcagtattgagaacatagagctggcaaggctcaggagctggaactttgacagatggtggggtgaatggaaacaacatatcttccatcaaccagcttccatgaacataatagatctgttccctgatgttatccctcaggtaaatctttactttatcaatcttgctcgaacaactggtagctgatttgaaccttgactaatcttttcttttgacctgcaaacaacagaatcctctcctcctcaccaaatcaacagtagcaaggatattgaatatgctccaggtctaattccaaatggaggtggaccatctccccctgtcatcggctatcacgcccccattacttcaaccctcctccaaggcctaatcagggaaccagccgatgcaggtaaggaaagaaaaaacaggtcatcggctgtggacacatcagctccggctcccaagatgaaaaccacatcaaagaaaaccaagccagctgatgacctgcctgccttggatccacccatcgaacaagctctggatgaagaagacattgaagatgatattgatcaggctgcaactgaagtgagcgatacagagagaacaccattggcttcgcccaagcaaactcctccaactccttctgctccgactcatttttcaagggtaagcagctctcctctgctccttttgcaatcactttacttatagccaactgctcactgatcttatagttacagaagaagaaaactgctatgaagaagaaatcggtagcaccaactctcaaaccggctccaccagtaagatattctcaatcctctcattaactgatcccggccgattatgtctaacatttgtcctttttacagcctcctcgtcctccttcacctcctgtgcagctagaatcaggcaaccgtactccatcggctgcagacagccacaacgtcgaagaggaagaacaaccagctgcccctgctattccagtaagtttttgttgatacaaatctgagatcggccaatcatgttttgatccttaaccatccacaatattatctcttgcaggtcttagccgatctgttctcatttgatatcaagaattatctcgatgaaacagaggaagacaccaccagtaaagctatagctcctctgtctgatgatgtaaagagaacgcttgaggatatctctcatcggctagaagcatcactagacaatttggtgaccaactgtggctcgatccgggcaaggttcacagatatccaagctctactcccggatgaactagccgatgcccttactctagccatctaccttgagcaacaccaattcaagctggaaaaggccagacagagattagccgatcgccgggagtgcaaggatattgaagctacaatccagcacaatcgacagcttgtgcatgtagagaaatccaagcttgatcagctgtctaagggcccgatcaagtcaaatatcgattggcttgaagctcgtaagattgacctcatggcacaacttcaagaatgcaacgccgagctggatatggagcacaaaaagttagccgatctcccgaagtctatcgaagatcaaaaagccagactcaaatcggctatcaagaatgttgcagatttgaccaagtctctgaaagtcatctctggaaccgatgctcaagatgcccaagctattgaggaagtagagcaaattaggcaaagggctatttcggctatccagcgatacttgtctcaatgaccttctgtgtaatagactttctatgtaattggctaaggtactttagttactttgctgctgattaatacaacttcgaaatttgctcaaaaatttccattatttgtatatatatgcccccctaattttataatgtcagaagcattgataaaattataaaaacaactaagggcgacatatttatatcgaccattgtacatcggcaaaccacaaccgattataatagaaaaacaactaagggcgatataaccatatcggccattgtacatcggcaaagcataaccgattacaatataaaaagaactaagggcgatataatcatatcggccatctcaaggcgatgtaaacacatcggctatcatgcatcggcaacaccagccgatcatgcgttaacccaaacacttgggtaatatttcttcaagtatttgccatttagcgctctgtcataaacttcaccatcgagtccttgcaacatgtaagcccccttagataccaccttatgaatttggaacggtccttcccaattcggcgaccacttgccgaatttgctatcccgagtcccaatcggcaaaatcaacttccatataagttcaccttccgaaaaatctttgggcactactttcttgttataatgccgagtaactcgctccttatctttgataacctttgctagggctcgtaaccgtgattgaaccagatcctccctctcatcggccataaggttggaatactcatcggctgttaaatcattttgcaattccgttcttctagagccgattctaacttcccatggcaaaatagctttatgtctataaacaagtttataaggaggaacctgtatcgagccatgacaagccatccgataagaccacaatgcttcggctaaacgagtatgccattgccgaggataatcagaaatcttcctcttaatcaacttgatcaaactcttgttagatgcctcggcctgcccattagcttgtgcataatacggtgaagaattcaacaacttgattcccatgctatcggcaaactgaataaactcatcagacacaaaaattgaaccttggtcagtcgtaatggtttgagggataccaacccgatagattatatgctcttgaacaaactgtatagcatccccagaatcaactttcttcaaaggaatagcctctacccacttggtaaaataatcggttgccaccaatataaacttatgtcctttactcgatggtggattaatcataccgatcatatcaattccccaacctctaaacggccatggtttaatgataggattcatagccgatgccggcgctctctggatcgctccaaatttctgacaatcttgacaacccttataatatctgaaacaatcctccagcattgtcggccaaaaatatccagcacatcgaagcagccacttcattttatgagccgattgatgagtgccacatatcccttcatgaacttcaccgattgcaacttttgcctgatcggtactcaaacatttaagcaacaccccatcaattgtccgataataaagctcgtcgtccaacaatatatacttcaacgctttatatcttaacttccgagaagccgattgagatggatcctgtaaatactgatagacataatatctccaatcatcggctgttataacagcaacttcaatctgaacatgtttgatcatcagcttatatcccgatgcgccttgggctagatcattagcttcaatattctgctctcgagatacatgcttcaaagttactagccgaaattccctcatcagttcttggcacttctcattataaactatcaacgtatcattcttgcattcatattctcctgccaattgactgatgaccaacaaagaatcccccatgatttcaatagtatcggcttcgacttccttgagtaactgcaaccccttgagaactgcctcgtactctgcttgattattagttgcataaggtttaatagtataggcaaactcaaagcatgccccccgaggggagattataaccaagccgataccacaaccatgagtacaaactgacccatcgaagaacaaagtccatggcacaacctcaaccgagccgatagaatcatcacgatagtcaacaataaaattggctatagcttgtcctttgatcgcctttggtgactcataccgaagatcaaactcagtcaatgaaaatatccactttccaatccttcctttcagaataggagccgataacatatatttgacaacatcagccttgcatatgacagtacattcattggacaacagataatgtcttaacctcgtacatgaaaaatataaacacaagcataacttctccacaggggagtatctagtctctgcattcaagagccgacggctcaaatagaacacaaccctctcttttctttcgagctcctgaatcaagaccgagctgattgacttatcaccggccgataaatataaccgaaaaggtattcccttctgtggaggaatcaaaacaggaggggaacttaaatattccttaatattatccaaagctttttgttgttctgccccccaggcaaattgctgatcggccttcaatctcaataatggtgtaaaaggttctaactttccagacaaaatagaaataaaccttcgaacaaaattaattttgccgatcatctcctgcaattctgtcttgtcctccggaggtttaatcttcttgatcgcattgatacttctctgagttacttcaatccctctctcatgaacaagaaatcccaagaactggccagccgatacgccaaaagcacactttgtcggattcatcttcaagccatatttcctggtcctctcaaaaacttttctcaaatcggctatgtggtcctctatttctttagacttaacaaccacatcatcaatatagacttcaaccaaccagccgattagatcatggtaaatgtaattcatagctcgttgatatgtagctccagcactctttaagacaaaagttatcacaacccattcaaacaaaccgattgcaccaggacacctaaaagtcgttttatgaatatcttcctcagccatgaagatctgattatatcctgcgtttccatccataaaactcaaaatcttatgtcccgaagcagcatcaactagttgatcggctactagcattggatattcgtcctttggggtagctttattcaaatatcggaaatcaatgcacaccctgaccttgccgtttttcttaataacaggaactatgctagaaacccattcagcatatcggcaaggacgaataaaaccagcatcatacaaacgcttaatctcagccttgacaggttcgagcatatcggctttgcatcttctcggaagctgctggtgcggtctaacccctggtttaagaggtagccgatgttcgacgattgatcggctgtgtccaggcatctcataatactcccaagtgaagcaatccctaaattctttcaagagctctatctgcttggttctaaattctgcagataaattcttactaataaatgtcggccttggccgatcgccggacttatatctatttcttccaaatcatcggcggacattaaaccctgtccttgtttgtcatcgagatcatctaccgtgtccttggtgtagacgtttgaaccctccatgacgccctcaaagcaatagctcgggttctccatcttcaattggctgtatatcagaatcacactttcagaaaatctccatcccaaactttgccggataagcaatcaaggccgtccatctcctaaagagctaaatcagcactagcaacattgactgacctgtcggctggcacgatttctatcttgtcgccttgccattgaatcaagcattgatgtatggttgaaggaatacaacaattggcatgaatccaatcccttccaagcaacaaactgtaagaacccttcccatcgatgacaaaaaacgtagtaggaatagtcttactgccgactgtcagctccacatttagaacacccatggtttctgatggattgccaccaaagtctttgagcaccatgtttgttttgatgagatcttcggcgtttctgcccaacttcctgaacgtagcataaggcatcaaatttactgcagctccaccatcgaccatcatcttagacatcggcttcccattaacatagccatttatatacaatggtttaagatgccgattctctgtaccctcaggcttttcgaagactacttgttctggcgatagaatcaacttagccgattcttcttctatttcatcaacatcggcttggtcgatcccaaattcggctggcaaggtaaaaaccatattaaccgatgcaatcacaacgcttttccctttggctaatctctttgcttcatcggccacagcttcatcggttacaggagtgtttcttaacgcgccattcctgcttcagctttgttttccttagccgatgattgatttcctgctcgacttcccgaaagcgctctcggtttctcattctttgaacccttctgttctaattctttgtaaatatactaggaggacaccactgagttttcctctttttgtcatcctccgggtcatgatcctgatttaccgggcccaacctttgatgaacagaaacccttgcatgcttcagccgattgcctttaatatacgactggcttgaactctctgcaacgttgccgcattcaggacagtcttcaatagatggcagcctcataccttcattccaacagaatctaaagaactcacaactctaatgaggatcgaagccatcatcatctttctcgtagcgcttctcctgttgtctatcgtacttcttttggtacttattgatgatcttagccgaattcacttgaaaaccccttgcacggcccccatcggccgttcggccagctgtatgcaccatattgacaggaaaaggattgccatcaaccttcatcggcctcttggaatcatcaaatttgattttgcctccttcgatagctgtttggatctgctgcttaaagaccttgcaatcattggtagtatgagatccagaattgtgccatttgcaataccttttcttgcccaattcctcagcggatggaatagtatgactagcaggcatttgaatctgcttctctcggagtaacagatcaaaaattttgttagcattggtaatttcaaaatcatacctctcctcttttccagaattcttcacccattggcatggtataacctttgtgctccttacccattcggctgcagctatttcagaatcatcatcctcatcatccgatccacacatgtaagaacagacattattaaccttcctagaattcctcctagcttcagcaaacctctgctcgtgcaaagttaccttttgtgtaagatgcgataagctttcaaagtcctcagatgagaatttctcccggatcggagcaatcataccctgaaaagccaaatcggctaactgggcatcagttaaactcaagctaaagcacttattcctcatctctctgaacctctgaatatattcatgcacgggctcgtcatgtttctgcttgatcactgtcaaatcagacaacttcatctcatgtaccccactatagaaatagctatgaaattgcttctccggatcggcccagctgttaatcgatccaagcagaaaaccaagtaaaagccgatccagccaaagacaatcgaaacaacctaaccctcaaggcatctacagccgatgcttcaccacactgagctaaaaatcggctaatatgctcataagttgatgtactatcttgccctgacaactttgaaaaatctgaaactttgaaccggttagggagagggactctctcaaaccattcaggatatggctgtcgatataaatttcctgtctcttttggtttaagcccaaactgttccctcatcacgtcagcaatcacatcggcccatggccgttattgagctgccccttgcgattgttgctgcctgggctcaaattgattgtactgtggagcaaattgaggctgaattaaccccccttgctgatattggtcttgcggggaagggagttgatattgataatttaaattgcccccctggtaattttggtagtttggctgaatatttcgcaccaagtgctcagggacaatctgaggtactaccatgtggtctggctgcatgtgatggaccaaatgctctggaacaacctgattcgaagtatgttgcccagctgatggattcatcaagccttgctggtgaatcggctggatagtctgctgtcttgatggcgtttgctgaatcggttgtacaatctgctgccttggtggcgtttgctgaactggctgcacaacctgttgctgaattggttgtacaacctattggattgggggtgtttgttgaatcagctgctgctggactgggtcaacagcaaattgaggtggtagaaatatggcagcaacctgatcttgcattagctgattcgcaacttgcccactatgctgcggctgctctctcgtcaacagccgaggaaaaagcgtgttgacagaaaacacgaggcctgggagatctgcttaactccagtgcaggtccaaaactcgccttcggatgtgtgagcgtgccagttgatttgatcctgcaatcaacaagaaataaagacaaagaaaccgcgattaatcttataaatgatagccgatcggctaggtgccgatgacgtatcatttattttaggccgatgtcatgtgtagatcgatcggcagtcatgaataattaagaaagaactaagtctactcgatcggctgtagacattaacaatatataactgttatgtcgatatatacttaaatcaagtgattgggatagatcggtcgccataccgagacagtataaatcacttagatcgaaatataaattaacgatagaactatatacgttcatagcatagccgatcagatagatctagcatgtatcggctaatactccgataccacttcaaattaagatattgaagcaagtagaatatatcaaatagaagcataatatacttaaatgcatcaagatcttaacacaaagggcggatttaacatatcaattaggcatgtaaggtaaaagaagttaaatcaggtaagatcggctgaaaccccgatgctacgctaatcggcaactaggaagcaggctagagattgatattctaagcacgacttaatagatcaaactcaactgatgcagcattaagtatgaaaagaagaacaatatctagacaatcaagctgctagatgtttcatagagtggtagatactttatacaatccaagctaatattgctatttaacctaatcggccgccttctaccaacagatgttagccgattgtaggttagatgacgatattaccaaagattatacaagatatatgataacttggcgagttacataaacaagattagagtgtcataaagatggaagcactaatcccgagaatacaagccgccataacaagttttacctcttgttgaagatcgaaaccgatgcagctcaacccggaagcaagaacccgtcgaaacaaaacaaaagtaaaagggtggcgatgcgccgaaattgtattgaacgtgtgttatttattacatagggctcggggtctatttatacctgagaattacaagatatgtctataccggacatgactattatctctaacaaactccaagataccataagtctttgcggcagacttttgcccaaacatatctctaaggaaattacataaaatatcctaattaatagatacaattgccttctcaggactctatccatgcgtggcaatcatcttgaagcatatcaactcaacccgatgatgtacaccaaatcgtattcttggaatcggctgtat

SEQ ID NO: 7580 - DNA, 10693 bp, Oryza sativa
  unsure (1)..(10693): unsure at all n locations
actccaacaaccacgagttcaatctcggcgtgttgcaaaggaacaagacgcagacaaaaacccagatcgtttggtaggatttgtaggtttggatcctcacgaaccctcggtcctgcacggtcgggatgatcgagaatcaaactctccacgtgacatgaacatgatcaacgggagggcggcggtgaaccatctgctcgagcaaacgcggatcacacccgcactcctgcccaacatctgaacatcgttaactcgatcctaagagaaagccctttcgatacggtcttgcatcccaacggtgatcaatgggttcagcgactttgggagacaatggccaacctgaacagtgcttttgcgacagttgccaaaccaccagccccagacttgccgcatcaaggagatgatgtacatgacggagccgacaccgaagtcagtcaagaccatagcaatcacccaagtcgagatctaggtcgaaatccccgcaatgcttcacctcgtgtccctcgtcatcaaaccccaccgccacaaggtaatcacgatttacgcgatcacttagttgggcgtcagcgggaacaacgagttgacaacaatgctcaccaacgccatcctccgccgcgatgaaacaacgttgcgaatcaaggaggccaccctaacaagaaccaagaccgataggattgtcgaagtcatcatgatgatgaccgtcgagaacggcgagatcgggacgacaatggtcgaggtcaacgacgagataacgatgatcgacgatggcaggagtcgaattctccagcctcccgtcgatatcatcaacaaggacgccgatccaggtgcaacgctccatatccgagcggcccttcgtcatcatcatcttcatcgtcctcatcatcagctagaccacctagaagacagcatggacaccgaccgcgtatcgtaccgggaggaggatgcagagcattcacacccacagtacgagaagtacggtggcctgagaaattccgaccaggagcaatagagaagtatgatggaagcatagacctcaaggagttccttcatgtctattctacagttctctatgctgctggggcagacgacaacgcactggcaaattacttaccaactgcgttaaaaggatcagcccgatcatggctggttcatcttcctcctcgctcgatttcttcatgggaagacttgtggcagcagttcgtcgctaacttccagggaacgtacaaacgccatgcaatcgaggacgacctacttgccttaactcagaaccccggtgaatccttgagggactatatttggcgcttcaacgaatgccgaaatacgatcctcgaaatcatcgatgcttctgtgatacgtgcgttcaaatcaggcgtccgaggttgctacactacctaggagctggcgacatgatgaatcacctctgcacgcaagttattcgagatcgttgataggtgcgctcacacagatgatgccttaagacgaaaagataaagggaagacaggcgaggagaagaaaacaatgaacaaagaagcgccagagtctagcaaaaagagaagccgtaagagcgggaagcgcaaggcaacaaaagaggttctagaacatatacctaattaagatggacttcatcagctaattaaaagaaatataataaagtatacggcacctttgtctaatcctgatcttaattgttacttatcaatttaattagtagacctgcttcctcataacataaacaagatacagatcattcaagtcggcagctccacgtgcatagagccaacctgaattaattaacttattcttcttcttgaccacaatatcagcagcatcaaaatatgtttgctgacaccatggaaaaacaccagcagctagcccttttgatccctcgctcttgccatttttcatgactgaagtacaggaaccaacctaatattcattaaactgtcggttgtaatatttgtgtccctgcatgcgaatcagctataggtgaaatatttagggtagacatggtctcatcacacaaattgtacaaaataattgatgacacacagaattccaagccttcctattccaaaaggaaggaagaggttcccattgaagaaaacgtaccgactagcagggtacgaatttgtaacgtcccgcctcttctaggccgggcccttcctgaccggtcacccatccctaaattactccaagccaagcatgcttaactttagagttctttagaaatcggctttcgaaaaagaagttgcaacttgttatatgagtattctaataattctattaagccttagatcggaatgttacataattgccccttgataatacaacaaacatgtgactagaacaatgcctaagcctaacctataagtaaaggatactttaatttccagtacagctagagcaaaatatggacaccgttagcaaagcagcccccatccacaaaagattttcttaaagaaattatttccggactattaacacattcaaaactatgcaaaattagaatattcacatacctctctcagagagagagatagttaagaccagggttcacgattccgacgaaaaccgatcgaattccacgaaatttcgaggtttcgacgaggctgcagaagccggatttcgatgagtttcatccaaatttaaatttgaattgataaaaaagaaaaaaattaaataaaatcttataaatagtatgatattcatcaaacctattgggatataattttttttaataaattgatgtattccatatatttactaaaatttatagtaggaaagaaaagaataaagaattaaaaaaggaaaaaaaaattagtttacctctttttctagttaccaattgaaattttgatgatttcgctcagaatttcgccaaagccgaccggttttcgcgagcttaggtaaactcagggaatttgtattcaaaatttggtttatgaaatttgttcgaaatctaccggcattccaccgaatttcgcgaaaaccattgttccgccagagcccgaaacataaggccatctcggaatcgtaaaccctggttaagataaacgggataaatgggaacttaccgcgcagtggtggatggcatctgggtcaccaccggagtcgacagcgatgcgttccagctccaggactggcgccagtgtccacatcattatcccgtccaccttagcctcccgcgctgtagccttccacaagaacctttggttgcggcggccattgggagtgggaggaccgtgtgttgggactgaaccaaaacacctagaatgtgcaaagtacaattcactaaccggcaaacatatttcacacaatcaacccatcatcttgccatgaactttgaggatagtttcaactagcaaatcaacaatgcaataacaataaacacatacacacaagatatggtgatttacgtggaaaaacctcctcgatgtgaggagtaaaaaactacgggaccaacggtccactccaagcttccactataatcaacaatgggtacaattggagtcttctctagaacatctagaggcacatctcaatagcaactacaacatcaagttacacacttggcatcatcaacatcaaccatcaaagctaacaagaggtatatcaacaaacaagcagagaaatggcagattttgtcctcttcggttctcagctgagatctctcaaaccacagatgcaaattgatgaaacatggcagaaatgatggtctatgagtcccttccaagctatccaaaaaacagcttaatcggacaccgtttgacccctcaaactgacactttactaattgttgcacaatctgtaatttcagtaactcgagttgataaaccactactcaaatccggtgctctactcaaacatttctcatccaaactggccagattaaagtgctcaaagtgaggaacaaactcaccaagtttggtgccaatccaaccacgtttgagcctctaatcgctgacttgataaagatcgggtaagagccccgagctgaacaagctggacttcttcctctccctctcttgtgtttgttggttatttcttcgatcaaaggctactgctctctctccctccaatggaggctagggtttttcttcctaccacaaggataaggcaatatcaaccattgatcaaggcatgaatcaatggctcacaattattaggcatttttactgcaatgggctgagaacaaaaggtacatgtggagtgaatttagcccaacaccgtggagaggaatcagagggaggagcacaggcggttacgttgcccggagcggtgagcacggaccacggagaggttggagtggcgcggtgcggtggcccgtgaagagtatcctctgccttcacaccgtgaaggcaccagcatgcagtcaagtaatatcaaccgtccaagccaatccaacggctcatcaaggactgtgtaccatttaactcacgctcaactacatttttacttcaatggttatatgggttttgtttctttgacaaaattttgttggtgcagtaatcaagggccgtgctatcacaaaaaacgccgaggtacaaaataccattgctttcaataagcaaaaggcaaaagtacggcgtcaaagctatttttcgcacaaatttttatatgagacccaaatctggttgaatacttaggccattcccaacctaaaacactatacataatttccataaactccacatcatcaagaaactagtactaaacactactcttccaatgcaaacaccactgttccatacttaaatttaatactacttatctcacatgatatcttagatgttgtgtagaaaccatgtctcatgtaaaacatggtttccttctcttttctcatttattcacttgtcatatcattttttcattctaggtggcagcttatttaatgctatggacaccatcctagtcattgggttggaaatgaccttaggctgcgttcgggaggaggggttgtgataccctcctccccggcacgcaaaatggaacatgtattattacatgattaattaagtattagctaatttttttaaaaaaaatggattaatttgattattttaagcaactttcgtatagaaactttttgcaaaaaatgcaccgtttagcagtttgaaaagcgtacgtgcggaaaacaaggatgaggggctaggaacttgaaggaaagaacagagcttaggagaacccatcacatgacatcgcatcctagcggctagcggcttcccaccgacgagttagtgattatggttatatcgattatgagaggcttggcagattgctaattttattgatgctaacgcgatttgaaacaattgcgaacgatccaaattccaaaacaatggcacaaagcattactggctaatggctatagcagtatatacagatacattataccctgacatatccaggaccaaccattcaccgtactgatcaaaatctgatgcacagaatcatcagaaccaatggcccacaaaacaattaattatcctccacaagactaagggtaaaagggatggaaggactcctgtcctgtgatgagattatattctgcagtttattttccaagcagacggcgtgcccgagtgtttgctcccttgatcctgaagttcagttcgtcgtagtccttctctgaatctcccaaagcctttgtttgtctgaatccaatcaacagacaaaaagacatatcacatgatgatttttattggttggactgttaaagcaacaatactcatcagatttaaatataattatgcaaagtgttccagattagatattaggaagtaatttgccgcttgaatttgaaggtactttggccaaactttttactcctttttagttcgttcagcatgaagaagtgaaaatttttaaagaatggactaaacataaactggcagttagtacaaactataaaagtacgctggaattagagcacaaaaaagggattccacataacaatacgccaatctcagaaaaaacaagtgtgtattagtttttatgaactaaagtgaaaaatgtggcattcacctgtcaatctcagtgcccatgtcaaccgccatgcctttcagctcggtcaatatgttacttagatcagataggccatcatcctgctttgccttctccatctgagcaacacaacaagataatcagaatacacacacttagcaaatcaatcaccatatatgtcttagcgcattacctccactttctggagggctgaagttggctcggaatggaattggcgtgcattcgattgaggtgggtgatccgatagtcccagtttgtgcctttgttccaaatggctgcccttccgaatgaaggaatcatctgcatacaagtaattccatccttccagttagttacacagagaacataactgataagtgataccacatagtacaagctttccctgtcagcaactgttgttgcagtctactatttcaagactagagttggagattacctctagttagcataggccccctgatttctccattcttttttggcttccactttttggaaaatatacccccaagatcacccagcagcttctcgctctgaaaaggtgcgaagaattccctttagccattattaccacataatacagtaaatttggagttggcaattaatttctgaagtgtgacacgaagtttgtttcagttttcgtggacttattaaggatggaattctgaaggaaacaggccaattttggtggggacttgttacgccactatgtgatcaaacagaattaatcaggcttctgagtaatcacatagtattagttattagtttgtgttagttaccctggagagatcctggtcgatgtcgagggtcatcatgtgcgtgcgcgtgatctgctggccctgctggtgtatggtgacgaggctcttggacgcggtatccctcatctcctcggcgatgcggacgcagccctgcacccgctgagtggtctcctccgccttgtacgccgcgtagccctccagctcctgcaccgactgggcctccacgccgccggtgtcgcggaagtcgttcctgtaccggctcctcgccgccgccgacgaggcggagaagccatccccgccgccgaagagggagccccgctggtcggccggaggaggcacggaggaggccctcgccggtctctgctccctcccgccatcgtcggagtcggagtcgaaggggttgctgctccgcgacggcttcttggatgcgaagaacgatctcctcccgctcatctcgaaaactccttgggtcagattccgcagcaagcaagtttctgcgcacaaatgaaactgaattgggcaaagatcatcccccgtgccaacttgccaagaatacacacaccaaatcccgattccttataaattccagtaaccaagatcgaccttaactatcaagaaggtccagaaataactgcgcgtacctctgcggacagatcggaagaattagtagtaggcaagaagaacaaggaagagcagcacatagcaagaggatatataacagtagaaagcaagggcggatggtaaaagcgaggacttggtcgcgcgaaggcagaaccgcaatcgcgtgcgttgcctctggaccgctgaccctgtcctcctgctcctcctactcccttcctggcttcttcggcggtagagtgcggggcggggagccagggacacgcgcttctagttggaaacaggaaaaaccgtcgagattaagaaagaatataaattggcgacagcgatggggatggtggctttacgcgcagggactgctacatctctatgtgaaggcagcgaaatcttaactactccatccgttttatacgtaagactttctaacactacttaatatatccgtgctaaacgctacggtgtaattcatttaaaattttatgttagtaattttttttgttagcataaagacgtgaatataaactcaaataacaatatgaatatgatatgatatagatatcaaattaatggtttcaccatgtaaaacaagataacaattgttggtcatcttgttaacgtctacttttaagatatacatggaacaactactaaaatttgccgatggcaaaagtaaatatttagtgagacataagtgttaacacatagtcatgttatcaatccggtgcaaattgacgtatctagaacatgatggtatggagaagataatcacataatattccacctaaatagtgatgacgtgctttacaaaacaagaggaagttggtgagtaacattcggattaacaatttactatcttctaaaatatattttcgaattaattttgatcatgcgaacctacctttgctcaccagttaagaacatctttatacacgatattcttggtgctcttccctgtggggtcaacttctttctttggcttttccaaaatccttgttgttagccttgacacaccccttgacaatgcatcatatagctgaccatgtgaaaacacgggctctggaagatagatcccaacatttgggatggtttgtccttgtgatttgttaatggtcattgcgaaactaagacgtattggaaattacttccttttgaatttgaaaggaagagatatatcatcggagggagataaagggatccgtgggatgaacacccttttgctggcatgttgtccaccaacaatctcagcatcaattgcattatcttggaaagctcttaccataagtctagttccgttgcacaacccattattaggatcgaggttgcgaagaagaatcacaggacaattgatttttactatcagctcgtgtggtgggagaccatttggagtgatagagttaaggtaatccagaggatagctattgtgagggtcatcatcaacagagtcaaagctatgataaaccttggcctgcactggaaatctgtcaatcatattcgcattcagcttatccacataatcatttttagtggatagaatggcacgtgtgctcatataagatgcagagcttgcattcttttcatcatcaagcgagggaaacacatgattaatcaattaatgtactgaatcctcactatccccataagcaatcacaatttcatcaggcaagcgaacgtaatcatctctgatagtgttttcagttccatttccaattctaaggagatattccgaaaaccatggattggattgagccctcatgttacgcgacaatcgtatcttcctaatattttcccataaatacgatctctgcaatgttgcatcagttatctaggcccttgtcccacgtgtaaccacgggaagaacctgtctgaagtcaccgccaaaaacaacaaccttgcctccaaatggcaataaataacccataatgtcttgaagatacctatcaagtgtctcaacagctgacgcttcgtcattgcagcttcatcccaaataattaaggacgccatgtgaagcaattccgcggtgccactttgcttcgtgaagttgcacatgctgttgtgagcaatcttaatagggattttgaatcttgagtgtgaagtacgtcctccgggcaaaatcgacgctgctataccagacgtcgcagttgcaatagctattaatccctcggatcgcactctagcaagaagcgccttgtacataaacgttttgccagtgccacctgggccgtcgataaanaatatctggctcttcttattagttacattatcaattatctcatcaaatcctgcacgctgctcgtcattaagggatgtgtatatgtctagatggtcttggtccactagcacgttaagttcctctataatctctgtcattacgtcgttggtacgttcacctgattagtgaaaacaaaaatatgcgtcatgaaactattgatgggtggtgcgaatgtaaattaataaaaaatatgtgccagtataacaaaaaatacctatatcactgatctcgagaagaccatactccgtgatatcgttccccatggaatgaagcaaatcacgtatatctcgtagcaccatctgctctactgctgcagggttagtgttccctcggctataatcttcagacattgcagccttgtgattgtcccataatgcacggatatcggtgactcacaaaataccagtatggttgcaaataactgacgcagagcagatggcatttggaaagtggatgcctcatttaaacaatcatcatgtgacttgtccgtctccacaagccctctcttctcgcatgcctctctaaatgtagagtacgttgtacctgacattgtcctcaaatcttcaaacgaggtagcacctcgcacatggttgagaagaactctcaagttgtatctctccccttctccagggtgagcgtacacaacccgtccaacttgacctctctgcgttttccttttctgccacacattctgtccaattatccagcgatagtgttcggggaactccttgtatagcaatttccttgcttctgggtctacttgattcattttaaaatactccgtaagagttgtcctagaagaagatggtcgattgacaacatcctcaagattaccatcctcattatacgtgacatactgcatgttaggaagatgaagttggagctgcaaaacagctggatagataccgaacagtgggaaaccaagcatcctatatatagcctctagtggtgtcacatatctggcatttatgtactgttgtatctcatttatttccccagatggatcagccgagaaagatgcacaatcgtg

SEQ ID NO: 7581 - DNA, 11936 bp, Oryza sativa
aaatacctgtaattgggcccaatcaccatgccattggattaagggccctcctaccatgatcctggagaaaattcggtgccaaatgggccagcaaaggtttggtcgaacccattcggccccctttttcacaagcagttactatcgatctcctaatgatggttgtgatagtttatagcgctccaaccgccatcaggaggatagatggcaagaagagagtgaagatgcccttagaattctatggatgatcacactcccaaggcacctccacctataaataccccctcacctccttcattccaacacacaccaagcatgagctgaattacaagaggctctattgtatcttttatgtacattagaattgggagagaataagggagaaagagttggagaaattctagagttgttggtactttcctctttacttttgtaccttgtcaattactcttctttaattcataatatctttattgagtaattgagatttactttgtgatgattatctcttagttagttcctattatcgagtaaatgaacctataaatagtgtttactttaatgtttcattggcattaaagtagtattaaatagtctagacgtggtgtctatactagagtacctgcatttgttgtgtatcccacagttcgttagagtagaggtagtggcagccctcgagatcactgtagtcctccctgtccgggtacggagtagagcgctgttaacagtgaaatttggtaaaccccgaagtcatcatcggcctagagtcagtatcggtttcagagtcctggaatcagctgatggaattatcaagtcgccaatagtcggattcttactatattcggttaagaaaattaatctactaatgaaagtttatctagaagacatcgagttcaaggaggatgcggcatgacagtttatgtattaattaggaatagtttgttagtttccttttatctttaggaaagtgtgtttagtgcccgataaggactttatgttttccttttatctttaggaaagattctttcttgtccaacaatgactagtatctacccatgggtataaatatgtacacccggggtcattctaaattatctcaacgatcaatacaactactcttggcgcatcgccaccgtctttaccgagggtgcatcggctttcgatcttcagctaaggggtaagtcttatgttccgtcagtcttggccatcgtattggctacattggcgtcgttcaaggctacatcagtacattcgacctcttggattgctctggttcagttgatatatttgcctatttatttatcatatatcttagttaatctagttgagcatcttaatttgatcatattggctgagatttgttttagggtttatgctggtatcgactaaatatcttgctagattagattaactaaggtatctaccactcttaaaatcagtcaagggcttgattgtctagatattacgtttcttttcatacttagtgctgcatcagttaagtttgatatactaaatcgtgtttcgaactataatctctagcctgctttttgattgcccataagggtttcatcggggtttcagccaatgagttatatggatgttggatcggtttacaaggattagatacatgttggttttagccgattgcaacaaaggtttcactgtttatctaatcttgttaatttaatgacatcggaccttgttggtatttcttaacgatattactagaaatataattcccagcaatggcgcagaaatactcctggtatatattggttacagagttcatccgcaagcgcacggatataccattgtagcgtttcacccgagagtatttcaaagatatcgtatttgtttaatcctgtgggaagattatagtagagagaaccgtactaataatttatatattacttgtaataaccatagtctaagcatgggttagtataattcatagggtagaatgacacacaagcataagactactcattctcacatttaatctatctaagctaagtgggaagaaaatagaaaagaatctattcctatacttctagtatgcatattatacatacatcttagctataagattaactagctaataccctctttccgatgccctcctggtacttcgagaagccatccctgattgtcgagttcctcactacaacccatcatgaccatacaaccggggcttaatacagaggagtaccctcctcaggaaattaacttaggactgtatacacgcacggaggaataaccgtactgagctgtcactatcagcggtccacctctcttctgcagcatataaccccaaataatgatacccaataatctagacaccacgcctaaactaccagatactactctaatatcatcgtcatgacatagagtaattgcataagcaaacactatacacgtaccattgcatctctcagataagctagcagtataatcaatataactcagatataaagtaaagttggcattgatatacttggaaagtatgtattacaatagcagaattgtataaaaaagaatattctaaataaagtacaagtcttacaaaagaagaaaggagagctactagagccatacccaaactcttccaaagacttccggactccggtttctattctattcctactacattatcttgagaatactaaattaagtttgagagaatatgagaaaactttgcttgaagtgtgtgttgaaatggagagagtgaggggtttatatagcctcccaatgacggatgtgacggttggaatggtcggaaataccctccaaccgtcattgggggctaatccacaccgtccagccgcaactctacatccaacggcgccaggatgggtttggccagacccttggttcggccgaaccatgggctgggccaaaccagcccaatttcgactggcggcctcccctcttgatatattttgtagacttgtgaattttggcccagttggtcgtgtcatttctaagttcttggcccatcgttccacaagtatgattctcgacatcgtccgattcattgatctcttgttttgatgtcgattctcctccattttatgttcattctctacaagaggttagtaatcctagtactagtggaatatttattattctaacacaaatatgcattgcaagcataactagttctcctttattttggtagtattgatggtcgaagctgattgctaacgaccgtcaacaaaacccccaagcttgaacctttgctcatcctgagtgaaggacaaaaggaaacaaagatttggttgttgatcaggagttgctactatgcagtatatctcaaatgtataggtgcaaggtatatgtactctctctcaaattaaataattctatggcacggtggcttacccttacccctgattcccacgagacactgtctcaccttgtcttgagtggttgaaagacaaaacagcaattagagcactaatcacccaatctttattcaacttttattccggaagtttttcaaaggattttgcaaaagaaatccaagttcctcaaatgattcactcggtctctccaagtgtatcaatattatttcctcactatttatgcctctttgattcctactctaaggttgatatgtggagctcggtagggatcaaacatggcatacttgtattcacatttattactaagtcaaaaactcaaacgaaaatagataactaaacatactcaagatcaagatcgtccaaagtgtgtgtgtgataaatggtggaaatgaaatgtgagaaataaagaaaacgcttctcctttgtgcttacttccttctcccaaaatccttttcttataaataaggagagggcatggctacattattttctcttttttttccaacgtcatgctcatgcttgaaagagcataactttattattttcataaccttgcctttccctccttcttttctttctctcttttttttcaaaaaggatttctttttaggagaagaaagcacataaaagcatggagaatttatttttggtggtagtatggaaatggaatggataattgctagcttctagtgtaggagtttagcatctgcatatatgtgggtgtatgatcttgatcatagagcatgagaagtatctacacaagtcacaaagatttgacaaaattcaatggaattgcaagtaaccaaaatgtatatggtttaatcaatatggaatatttttggctctggtaagaatttatatcaaatgaggaacttcataagtttatcattttgaaaaataaaacatccggaattcaagtcaaacttagacaaggactatagcaactcttatttactatctcatatcttgcaacaacttagactcagattagcaaatgcagctcatttaccttaggttcccagataattgttggctactcatatttaatttttgagagtacttacctatgaactcatatatgagaaatataaaacagagcaactatttatcatttcaacaaagagaaccaatttgtcttacctagcataataaaatttaacctatctttttggtattttctattttgcaaatttttatgttgttttcaggtttatagaatgcaattggaaaaacaaacatgcaatcggaaagggaaatatgcaatgtgatataagttaccttagtgggcggatagacatctccctccaagcttggctttcgctcagggttcttaataaggattgaatccctagaagcggaagtacgcttaaaggccatcatgctgttgctgcatgaggctgttcatgttggtgaactgagcatcagcattttgttgccattcttgcatttgcgctatgtgttcctcgaggttgtgttgggtctctcccgtctgcatatcaagggtatccattctcctggtgatttcacccaagtcccaacgagaggaactcgtgcgccattcaccgggagatggaggcataccacttgatctgggggactgattgttccagccttcccactgtatgtcatgaggcgcccgccaccggctctcactggcactttcccagctcgagatcccaatgttgtggtgtggagcttgggtgcatccccagttggctcccaacctgcctcatacatctgtacgggtgttgaggatgttgaacctttccgttcattccttgccatgttgcgtgtctccctgtatgttccacctacacgagattcttctatggtctgcaggggtatggttagttcatgatagttgtacaaatgataccccgcgttaggcaacggaatttcatttgtacaaccagggaaaaagtatatcaaagacccatctactccatgtttaaggatatgcccttgcactagataactctcatcaacacagggacgagcggttgaaatataagcaatttgatcattggtaataacccctagtccctttgctatgcgagtaatcagagaagtgcataacaggagcagtaaatcttatactttctaaccattgccttatcatacattttataggagcaattttaatcttcctaaccatggcaaacatgataatcagttcatcctctctaatatgtctaagatcacctataggaaacaaagtcatagcaatccatttgtgaataggcctaattgtaggattatggatatcattcatcctaatttcttgcaaattgaagcaccagaaatgtcttcccaaaatctgtttttctcaaacccggaaattccttcccgaagatcgattttataggaatcgtgaaaaccaagaagtgtacttaatcctttccatgaaagtgtgtattcattatggaaaaagcgaaaggaaattccatcttctatttctttcgaagtgcacagaaattgcaaagtaagcaaacgagaaccaggctcatctactacagtaaatctctgccatccaacagctttccaaatagcacgaaagttagtatccatacctatctttttagcagcgccggagagtatacccacgtgtgggcatactcccggtccttcagcatgtagtaggtttgtctttcccgatcaccgacaaggtcgaggtcggtgtcgctcaagagatgttgtggaatgtcagcatcctccatcgagacgtctacggatgaacgagcactagactcatcatgatgacttgatggagagccggatcccttcttgaacagactagacagttgcctcctcatcctgcacaaaggaacaagaacaaactaactcgacgggggttagaataacaaaagtttcacccgccggttagcttcatcaaagcaacttgtttatgcaactaaatgcttgaatttgagggaaactaacaaagcttgaatgaattttgagagcaaatcatggagagggagtgaaaatgagttgaaatgggggtggatttccttctcccggccggttggcttaaatagaatgcccacaacggtcataaccgacctgtgggacccactagccgttgcctcaaagaaagaggcacgcaaccgttggccttgctggaggccaaacccttggtgggcccaaccaaccccacattcggccgttggattccaacggtcagtgcggtcatggctcagcgaattttcgttgaaaattttattttggtttgctctggaaaattcatttgaagtaattttctcaaaattcaattctaaatgcaaattttggaattcacatatgcattgatgcaaaaatgcaaattgatggaaataaatatgtggatacataccaatttacctgttggcgaaggtcacgtcattttcggtccaacgtgcaagaccatacctcccttcagtttagttcgcggagtttccacccatctccggaggtgatggagcgggcgtcttttgctttaccttccacaccttctttggttttggtgcgggcgatggcttcctctgagctggcttctcttgtttcttggctgttctgtgggtttggcccgtatttgatccggaccatggaacattgttcggtcctcggctaaaactcaaatttttcttccttcccgttgatacggaaacggatgcttcctgttcctacatcaatgttggcatccgcggtgctaaggaatggactccccaaaatgagcggcgtctcctttttagtgtccatgtcgagcaccacgaagtcgaccgggataaagaaatcccgaatcttgatcggtacatcttccgctatcccagctaggtagcggaccgatgagtcggtcaactgcaggtgcatcggtgttggtgccaacaccatgaagttgagcttgtcgaagacgtctttgggcatgacgcttacacttgctcctaactcgtagaggacttggtcgaatttatgtgtcctaatcgagcagatgatcgtgggacaccccggatccttcttcttttccgggagcttgtggagtatgacattgttgcactgctctgtcagcttgaccacttcagttgttgggagcggccttttgttgttgagtatatccttgagataacgtgcgtatgttggcacttgcatggcatccaacaacggcacgttaatgtggatcttctgaatcacctcaagaaaatgagcgaactactcatctactgccggtttcctgcttctctgagggaatggcagcagtcgtgtgtcacaatactcctggggcacggtcttttctggctgaacttcttcatcagtcgtgcttccagatggtgcttcttgggtgatactgctggtttctacagggttaggatatggcggatcacgagtggacttcttcatgggtttctgggcagtcattcccagagtggtccatgctgtcgcagacctcacacgtgacgtgtgagtccaaggccttgatggtgccttttggccttttctcgtgatcgtccaagagtttcatgaggaggtccagtttggcagcaagcatctccggctccttgacggtgtgcatgcctcgatgacaggtctgaagtcattcctcgctctagcccatattggagaccattttctctatcaagtcgacgcctcctcgaaccgtcttagagaaaaaggctcctccagctgccgcgttcaggtggtcgcgagacgtgggagtgagtccattatagaagttttgcaggatcagctagtcatccatcccatgatgaggacagacggccatgtattcctgaagtcgttcccacgcctcaggaatggactcgtcccttgtctgctggaaacttgaaattctcccacgaagggtgttggttttgcctatcgggaagaactttgacaggaatgccattgagcatttgtcccaggtgttgatcgtggcacggttggcataaaaccactgtttcgctttcccaaggaggaaaacggaaacagtcgcagcctgatggtgtcaggactgacccccttcattgtgtgcatgctgcagatctccaggaactgttgcagatgtgtgttggcatcctccttaggcttgccacagaacgggctagcctgcgccatcgtgataaggctggacttcagatcgaaattcacgtctgccatgttgatttgcgacccagtggccacattgtcagcagagggagcagcgaattcacagagggtcttgtcagccatagtcttgaaagttcgtggcactggtatggctggtttctgtgtcggaagagttttctgcggagcgacgactcgcgacttgacgctctgaaagaaagcctctggattttccttgaagtttttcggcaagttaaaaccaatcatgcactaccctgtttccacaataaaagtgaaaaaaaccaaggttagcctgcaaaggacaatgattatacagaggtaaatatagagtaatagtagtggtaatctcttttataaatcttcccggcaacggtgccagaaatgtttattggtatttcttaacgacattactagaaatataattcccagcaatggcgcagaaatactcctggtatattatggttacagagttcatccgcaagcacacggatataccattgtaccatttcacccgagagtattccaaggatatcgtatttgtttaatctcgtgggaagattatagtagagagaatcgtactaataatttatatattacttgtaataaccatagtctaagcaatggttagtacaattcatagggtagaatgaaagacaagcataagactactcattctcatatttaaactatctaagctaagtgggaagaaaatagaaaagaatctattcctatacttatagaatacatattatgcatacatctttgctataagattaactagctaataccctctttccgatgccctcctggtacttcgagaagccacccctgactgtccagttccttacgacagcccgtcatgaccatacaaccggggctaaatacggaggaataccctccccaggaaattaacttaggactatatacaagcgcggaggaatacccgtactgagctgtcaccatcagtggcccacctctcttccgcagcatataacacaaaataatgatacccaataatctagacaccacgcctaaactactagatactactctaatgtcatcgtcataacatagagtaattgcataagcaaacactatacccgtaccattgcatctcccaaataagctagcagtaaaatcaatataagtcagatataaagtaaagttggcgctcatatacttggaaagtattacaatactagaattgtataaagaagaatattctaaataaagtacaagtcttacaaaagaagaaaggagagctgctagagccatacccgaactcttccgaagacttctagactctgttttctattctattcctactccacaagcttgagaatactaaactaagcttgagagaatatgagagaactttgcttgaagtgtgtgttgaaatggagagagtgagaggtttatatagcctcccaatgatggttgtgacggttggaatggtcggaaataccctccaaccgtcattgggggctaatccacaccatccagctgcaaccttgcatccaatggcaccatgatgggttcggccgaaccataggctgggccaaaccagcccaatttcggttggcggcctcccctcttgatatattttgtagacttgtgaattttggccgagttggtcgtgtcatttctgagttcttggcccatctttccacaagtttgattctcgacatcgcccgattcattaatcgcttgttttgatgttgattctcctctattttatgttcattctctacaagaggttagtaatcctagtactagtggaacatttattgttctaacacaaatatgcattgaaagcataactagttctcctctattttggtagtattgacggtcaaaactgattgctaacgaccgtcaacagacctccagccgatgtatgctttaacctttggatccgtgcttattctatcgtatcattattagccgattggtttctattagattatattgttgttatattacattatcatcagccgattgactttatttacatcaagtgtcagattctgcatcaaacatatagccgacagctcaaaaccctatcgctatcggctagtattggcatcgactggaattattccatcgacttgtcagtcaatcggctcattgatctgctatttgtatatcttgtcagttgtaggatcaaactgactggcatgcctgcatctcatcaacctttggacctgcactagagctaagtagatctcccaggcagttgtgttcttcaacttagttcgcgccaacatagttttggcaccatctgccgagcgcggatttctcgtcaacaagcgtgttctggtagcaacgagcaaatcagtgcatgaagtattgcggtagaattaaattaagctttctgtagacactgtttctcactaggaaatctattagggttacggataaggcataccttctaccctacgatttaccaaatataccggattggcatacctcgtatcatacgatatgtttccgtatgcgataaggaaatatacaagatattatggaaaatatcctcacaggctagagattatcagagtcctactcggagaggatagggactattctctatcgtgcagggttcgttgtctttgagttctacttagagactaaggcaactcatggtataaaaggcacaccttcgaatgggctgaggatcatcgaatcatagcaccaacacacccatcatagtttacaaagccgaatgacttaagccgaagccaccggggtatctcgtcgaacaatctcgacaaggatctcgccggtaccatcggattcatccgttccctttgtattatgtggttttccatataaatctcatataaactggattagggctactacctcacgaggggcctgaaccagtataatccttgtctcttttctactttgattttgtatcgtgtagattctcgtaccaacgtaccccaatacccaattcatccggtctacgggtaccccccgtcgatagtggcgcgccaggtagggggctttggtgatcaaggttctgccgacatgacttcaagccgctccaacaactttgtctacatcggccccattgcaggagatccaacctcaattccgctaatgtggactcaactcggatccatcgactttccggtttactctgcgataccgatctcgtctggcccaatctctgtcgggaacaagaacgtcgtagctacgacttcgagaaatgacatgtcatcggtgcctccctccatccatacggaaaaaacagacaacgactatgacaacgtcaacctcaagcggccaatccccatcccctcatcgggaaccaggcgccgacaaggatgttctctcagaaatcatctgcctggtgtgttatccataaaacacccaagcactttctatcagactacccagtggcacaacatgtgaaggatgaactcagatcttataaagaacgaggaatccaacgaacttcaccgacaaata

SEQ ID NO: 7582 - DNA, 30973 bp, Oryza sativa
  unsure (1)..(30973): unsure at all n locations
atggcctgttccatggaggtttcacctgatttgtgggccctccaatcggtgtgctcgcgcctgattggctggaggtgtgtttctttgcatgccgggtgtgttttcttcttaaaatccctgcatacacatatttcaccaacactagtggaattgattagtaataatccctaccactatgttggtttccacattttattccattatatgcaggcattgacggtcaaatattatgacttaaggaccgtcaacactgttgctgtggaataggcaaatgttgtcccatggttatctacggaatcggctcaactatcggttgccttggtctaaacatagatgcgactcggtccagagagattcgaacaaccctacattcataaccaggtatttagaagtgcatttgttgtcttttagattacatatttactatattgcaaattgatcgtatgcgataacaaaattaactctaaacggtaaaattgaaaccacttctacttgaacaacaacttgaatagaagtatacatgtttaataatttattcaaatacttgtttatttatcaccaacaaatataaattttgtggaattttagctctccgttttgacctcctgaaatttcaatataactttcagcctaactaatttcatcttttcaccagatttaaaatacttggaatttatgtgtgaaactttgaaaaatggaacctataaaccaacacctatcaccacaccatattcctgaatttttgaacaagttttacctagacaaatcgaatttaccatgagagggaaagaaaataaatcctggaaattgaaagaacgaatctatactcagtttttcacccacctctctcaccctcatagacagccatgtcttgggtccacttgtcactgaccttgggtgcctcttaaaccccacaacacacccatgggcgtgctcccacctcagaacttaaggggggcagagaaaaccccttcttcttcctccccattcattttttttcgaaaggattccctttcattttcactgcctgttctttcttttcctcctcaagctgagttcacatctaacttctcctccccaaaccccatccaatagcccaagatcaatccatgcatgttagaccacaacaatccccatcatccaagctttccatccatcccaacatcttgcacatgcatggagagttgagagagatcgagaaggaataagagagtggtggtttcagcctacagggcagcaacagcagcattttgttttcctccatttggtgagcttccttttcatccatggtgcctcttttgaattccctccatgttgaacatctatagcataacgttgtccactgtagacccccgattttggaaatcggaaatcttctgtgtttatccgtaccaatccctggatcagtagttggtacacacatacatagttgaatcacaacatatcacgaatgaattcaggctaaaagagttaaatacttacattagggccaggtagcccgtcaactatcagataacagcagcggaagaccaaataatataagggcccggttaacatgccacaggcagtcgactggggaacgagacctagaaccagaccgcactccgatcatcttgttggatacgcaagcgtaccgacaagggcttctcttcaacactctcctaaaagatgtataaatagcaagagtgagtaccaaccgtactcagcaagccaccacaacaacaatgcatatgatagagggtatttcaaggaatagccacggttcttttgcgcaaagcaagttttgcaattcttttcataagcctaagacctagcatagactgatcaaattttagtaccagtgttcacattaaacaatgacggttctgtccaccatccattgtgatcccaaggatagcttcccgccattgagtcgtcatggttttctgaggacgtccaccttccctcctctcaggaagtggctccatcagcataaaaatcatcatgcaatatcccatcccacacaagttaagaatttagagtctagccaagtgtaatacatgtcccagtgctcaataaccgcgagcacggctattcgaatagatttggtttactcacactgcagtggatgtacactttacccgcactccgcactancaacacatgagcctcgtcccaacacatgagacgcgtcacggcanagcttttcgataacctcgcattggcagtacccgctccatgaacttaaatcctcatgcactctaggcgtccatgtttctagcagtgagaggagttctggcgctcccgggaaagagaagtctcacacacatattaaattatggttcaagttaagttctctctctcacacactcatggcaatcctaccaatggcgacaccgatgtagggcgacgcctctcggccctacctcaacggctgtcccacagtagcgcacctacctcactcaggggtgaaccatctatgcagggatactgcctccgctcggctatctaatccgctaggtctatacccattcgagaagtacggttgtacgggggtcgtttcatgcttaacttcatggctcggtccttaattgaccggggacagtactagccttttccagataccacccaaatcctccgtccgccccagtcgaaaacggttgtttagttttatttctcctttcacaaatcatgtcatcaacatcatggcagtgtggcgctcatgtctccacatgccgcatctcaattaccttcccaaaggtaattgcccaagcatatagcatttgataaatatgggtatgcatgattctagaatagcacttctaagcaattgtcataattgactagggactcatacgtaaacatggttacgaaggaataaggggtaaacaataatcaaggcatggcataatcacaagtaggatgttcatcattgcatgcaattttatttgtaaataaaataatttcgcaattgggatcaacatgttcaaagaatagtgatgacttgcctgcgcatgatagtccttattcttgatataattattgttcaaccttcacctcctggaagttgtagatgttgccttacaactgaccgatacacaatttctataatacgcgagaaaaaccaatattcaagcaacattcaaatatgcacaaacaaaatatatttgatgaggtcgaacctagggttgctcattttattcgcgcttgctgatggattccaacatgctaagggctaaagtttcttaatctttctgttgtcatggtggtctatttaggagctagccaacgtagtataaatgagatacatatctggctaatatgtggtttagtctagctaaaggctatggaaggattatggctacacatgcatcgatctaaataaaatggtcatatactagaggttctgttgtcgtcggatggatttgggatcaagcaattaatcgcagggaaccatttgtattattattttattgatggaggctttgctttaattatgaaaatattttacttgtcacaataaattagaaaaggttaataattatccatgctttgtatgttagagttgtttaggttaatcatattatggttacagattatcccatcacataattttacaatgaataatcctaatttacaattgaactataattatatgagatcaagatttataactagtatttatctaatattcatgtttgtcatatagtccctctaatttaatatatgcaacaagcaaattaatactataccgtatagctataatgggatgtacagtataggtgtgtgcacaatatcttaatattgaatcatttatttgaatagttgctatttcctacgagctacacagtacatgtgattttaagtggatttatgagtgagttaccgtctatacaacttaagggtcgatttccaacctacacatatactactgtataggaaatgccgttaattaatttcgtgcgggtgattttagtcacactagctctgttattatctctcataaacaagttaaagactcatctatgtgtgttcaacttttagtcgcaaagtatgaggctaaacattatttatacaatttggacgtcacgagtataattatatattgacatatattaataaatggcactagtatttcctatgctttaattaatttgaaacaatgctcctaattagtttacataggttttacagtgagaaagcgtgttaaagacaattatttgacatctactttacagtacaatatcaattttatttattagcacatttttaagttaactattatgcatcatcttgatattaattatttaataattataaatatattttatcaaataaatagtgaattatataccattggaaagcttatgaatttagatgaatttaggttcaagtttcactcaaatcagagctaaaatgaataagttatgctagtgtaaagattcaaatttgaattaattctaataattacgaaatggtactgttcctaattcatttatttataatacaaccttatccacaagctatagtgactgacaggtggggtcttcctatttcttttcttttattttacttttctttctaaaggaatccatacgggcaaatgacaggtgggcctaactcctttgactagggtcaaaccggccattaaacccggtagggcccgcttgtcatagactcgaaactataaactctccataactagatttttaacgacccggacctacatgtaatagacttaactaataaagattaagaaggggattactatttactaatcacgtggggcccactctaacctctcttctctattctcttttctctctctgctttctctgttttctcctctctctctctctctcacggccgagcggcgcggctaccggcgacgaagggaggcgggagggcttactggaccggcggcgacggcggcgaggacacggcggcggggtgcggcgtggcggcggcgagacgccggggcatggcagcggcggcgcggcggcggaatgcggcgtcggtggaggggaagaaagagcaaaaaggggagaagatggggggaatggcgtggggagggaagggaaagggggggtatttatagggctcgggggaggggtggccggctttaaacgtcgacgggatggcgcggcgacgcggggctcggggcgatggtgacgcgcggcgttgggatggcgagcgcgacgacaacagtgcgcggcgcgggcggggctcgaggcggtgatggcgacggcggtgacgcgatagcgcagcagtggcgcggggatcaagggtgacggcgttgcgatggagcgcggcgcggcgataggacggcgctcggcgcggcagtggcgacgggacggcgatggtgacggcacgcggcgcggtgatgatgacgacgtgatggcgacggcgacgtgacgcgcggaggggtggggctccaggcgacgcgatcggagacggcgacggcgcgtgacacgatgggacgcgagggggcgcggcagcgcgcgcagagcgaagcaacggcgcgcggcacgtctgagcgacggcgacggcgacacgatggggtgcggcggcgcggggcgcaaggcagcggcgcggcagggctaggcgcgacacggcaaggcagggcaaggctaggcgcagcgcgggcagggggagggcggcgatgggacagggttgagcacctagggggcaatgaacagtgctagccgatttatttggattttattagatgttttttctaatttagaaaatggactattgccacctattttgttacaatgtgtttcacacaaaatctatgttattccatcaaaatttatattcaaatttaatattgaacatatccttattattattatatatttttctgagttttcctattttcttacttttaaggctttggttgatttataaattgagaaaagttgcaaattaattttttatttactcctaagcatttgggtgaccgtattaagtgttcaatgtgaatttgcccaaaatttaatactgtccaatatttaaggtttattaaagattctataatttcctatatttgggattttggtatttatctgttttcacacatattggtttatcttcttggattggttttaccaccacatggatttctataatttagcatttgtgattcaattcaaattatataatatctaattattttttcccagtaaaactattctatagatagagttccatttatttgaacgattatcatttcctaagtgtttatatttcatggcacgcatcacatgttcaagtatttaatatttgatccataaattaaattagtaattaaccttccctttttatggctttgttttcttgtgcgtaaatatttatagggttcataataaatatcttattattataattattacttagttgtataactttagtttaattttccattgtgacaatttatagtttggcaagcaaaagcaaccataacatccagcatgatgcaaaaattttaaaaagttcaaaattctagtgattttgattgtcttgaattttcagggtgttacatccactccattgctgtagctagaaggtagctgcaactcaccccgagttcatctcttttgatttcggttgaagcagccctaggcaacgtctcttgccgtcagcccgaggccttgctccgtctcttgccatcagcccgaggccttagcctcgcacaaccctacgtccaggctgttgccatgtgagcgaaatccggtggaagttggagaaaaggggagtgaaactagaaatcgatttctgagatagctattgagctgaatgagtatgaactttaaaaatccataactaattcatatgaactccgaattcagtgaaccaaattcctatagattcataaaaatgaccaacttttgtactggttttcccagtaaaaatataaatagctatatgtctcccttgtgtggtctagctcttaataatttcgtaagaaattattggtaaaagctaaaattgcaaaccaattttgttgagcttatattttagtaatctttgctattgtgaagtttttggtaaaactacctcttaaatcttgtttaggactttatttagcattcccatgattttaacttgtaaaacccatatatgaataatgacaacacatatagctatgaaatattttttcttagaacctgtgagtgatgtactttactctaaaaataatcattattatgaaatcttggtttgaaatgcatgtttcttgtaatgtactaaaggaaacattaatatttacagaactgccattttcagcaccttagagcttgtcattttcatatctcccaaaccataagtgataatcttgtgattctttcatctaaattcaagttaaaatatgatctacccactgtatttatttcataatttattgatcattttgcatgtgcatgtttatttggctcttattcgcatattgcttcttttcggtagattcagagaatacggagagtaacgagccatatccagaggaggatagtgactaccctcagcagcaaggcaagcacctaagcatatagaacctatgctttctctaaaaatgatttgtttgcaatctatacgtatatatatatatatatatgcatgcattgcctagatattaatattgtcggtttatggtgtatgggtagaacctatttatgcatttagttcttgtgatattgctatccttataccctattaccactagtcgggattacttgggatgtcttattcattaatgcttagccatgcttagtgctaatagaactatagggatggacaatgttgttaattgtggtatatagacaacttgcattattgggcataaaacttgagcacttacacaaaataatggttgatgaaatatgttggacttggacgggtgatagggcgatgatgggaggttggtttcccctgatgcaagtagccccgtctaggtcattaaggaccgaacattttgacttctaatcaagcaccctacgtacttaccacatatcttatttgggaccggcttgttcttactagttctactgtgatcatttataccactgtcacatcctgatttttgttttaggatttataaattatttaataaattattattagaatttatattaaatgttcactaatttacaagaagttaaatgtgggaaataaaatttcctaaatataaagcatggctggatttaatttttattaaattctccatggttaattatactctctggaattttcttggatttttcggagctcaattcctaattttaatcttacaaacaacatttcagtaattatccacatattaaattaatcattaaatggtctaattataatcttgttaagtacttcgagtgtccaagtattttcaggatttttcttgaaattatttgagcattggaagtatttttaacaattcaaagatcatttcagtgattaatttaattggaaaagtaattaaaattcctcttttccttttcgggccgaaacaggaaaagttctatctttcttggcccaatctcctcttttcctgaaggtcgtgctcgcgaaccggtccttaattgttatgagtacgatcttcaaaaccatgtgctcacaacccaccattgacaagttttaattatcaattaattatcataacacgattaaccttcgtgagctaccattaaatataaccataaataataatgtagaatgatccatcccattaatgagctaatgtttctaagcatagctaagcaattatatatatatatatatatatatatatatatatatatatatatatatatatatatatatatatatatatatatatagcttttagctgaaccaaactaatatataaggttcaaactaatcaatttgttatccaaggtatcaaggaataggataatcaatgcaaactggccataacaaaggaataggttcacaccacccggtgacattcgaaaaataaatacacagttgaaataaatagagaatttaaatataggatcaacatggtcaaaggattgtgtttgggatctatgtgacttgctttgcaataatcggtcttcaattagtcttcttgaacacttccgacgcactcacgaaccttcgcaacgacgaaaacgacaagctaacacgcaaaacgaggaaaaagactaataaaaaccaaatagatcatgattttagatgaatttagagacttgaacggcctcattccgagttcatctgaattagttacgaattttacaagattaaactgattttagccttatacagaaaaggattaacgatttatttcagaaaagaaaagggctttatgacatcatcaccggaacaaggcactggaccacacggccaccggcgctagaggactcggccggaccaaccgagggcatctacgcgaaggggatgacgagacaaactcaccaaggggcggcacgacgacgaacgacgatggaagacgaccagcgacgagctccgaacggcggcgaagtcgggacgacgacgacggcgactttccggcgacgagcagcggcaacggaggggtggacgggcttctcctcggtgctgcgatgccgagggaggtggcggcacaggttggggacgaggcgactgctaggggcggctggagcggctgccggcggtggacagagaagacgaacgcggcgacgacgctacaagcgacggtggagagaggtagaggtgccagccgaaagaggagagggaggggactctatttatagccatgggagagagatcgatccaacaacgagagaatcggagccgggattttctagggtttggtttggagagataaacacgaatcgagctagattccgcgttgattcttcgggataaagtccgattcttgggggaaaggatagaggaggataagaggaatatttcccctcaactaattttgaaataacacgagagaggagaccggatttggaggggaaatcgacggcaatggcggcatcgggctctgtctccagccggctggaggttgaagatgccactgtagcggcagggaggaaaagtagactctgtagatggtagatgcacgggcgtcatgacagaacacacattttcattgcatgtaccatagaatcgtaatgttggtgttagccttacaaatatatcatattaaaaaatataaacattatgagtaggctaccaaatccaattgttgaggctgtctgaatcttatcgttcttactgatctgttcacagttgtcacggtcttttggaacattgatttcattttggttaacagcggcacgcttgtttgtcaacttggtatcaattagattagttatatcggcaaaaggacctaagggaggtatttgtaaaattaggaggaaaaaatatctcaatcaagcaatgactatgactatgtctgggtggatgaaagtcggacatgatcttttcaacgatcttgaggcggaatccctaccattgttatccattgcaagtaacttcttcatattttaaatgcaactctacaaaaatcaatttttggtatcaattaaatcctcataagctcataacaaattcgacttttcctctctaactataactgaaatatatagattatgatgtggggatcatgacgtgaaagagctaccagaaaggtagatgggtaaactgcacagcagaaaattaagacaaaaacatggtgcatgtactgaaatggatttcttaataccataatatatagaagacactaagcaataacagagaatcaaatcaacttcaccattgcacctatatgcttgaatatatgaatgataaaaccgatcccaaaaataaggaaataagaatcagggtcatgcggagaagagacattttattcagtgcccctattctgtaatgattcttgttcagtgcttctaaacatagctcaatcagctatataggcacacaatactccaagcaaaagagcacatgccaaaaaaaataatttgtcccctgtctacatgagcaatgcaaatttcgaagctgccaccactacagttataaaataaccaagccatttaaggacaccaaagctacatatcaaatttatttgacacaatactatggatcaaaagagagtagtcaagaccttcgatcacaagcggatccaagatacttaggtctgcacaacaccagaaagttagatgtccacacaaatacacacatacagacatgaaaccccaatctcacacaagaaacccgcaagaaaaacagccttcacgcttcaaactctcatgagagatctcattccccgcttgcgctagggacacgagctgtggtttgccttctgcaacagcaaagctgtggtttgtctactgcaacagcaaaaaaataatcaaaacatgcagccacatcctttttaatcagcaaaaaataatacataactgaataaaattgacacaagagaaggtttgcgtaactcaccttggagagactggagagaaggtcgatcatgatggagaacgatggtgatgggcaaggtagaattttgatttgtaataaatttagcacattatctacctaaatgaaatgaaaccaaatcagcgagagagtttaaaaaataaattaccactgacctcctaaatacagtaatcacacttacagcaaaaaaaacttcattcagtttggatgtttcatcagcaacttcacaactcagacactaccataatgagatggttttaatttttcacaaaatgatctcatctacaatgtataggacacctggtcatatgcacgttagtagtacctctcccacaattcaaggcaacaccagaattggacaacgataattaaaaatttatgccttcattggattgactcatagcacatacaaaggttaggccctgcaatttagtaacaattgactgttgatcatagaaagcaatgtcagaacctttttttccagatggtcaatttcagaaagacttcccccttcacaaaatttctttgttcagagatcatagtacaaaagttgagtgcctttaattaattgcacagaaaggtccatctacaacaaaaatgcagaacaagggataaatggtaggatatagtgttatactgaccagatgtatgtatgatatttcgtcacaacctgaccatgtaagtggggtgataattctgcaaccaccattaaatctaattgtcattgtcattaaggtgagtcagtgtaggtgctgtttttacttgctagcagtatggtagagtatgactaacattatggtttttatagcatgattgaaaattgaaataattaaataatggtgaacttttggggctgcatgaatgtctaggctgaactgaatttttgcctaactttttgggggaaaaaaactaaaggcatttgatcgagcactacgggagcaatggcacgaagcaatgtagtacatgtcaagagcgttgggcacagccgtccatggcctgccggcctgctcgacccctgccttgacgtggtgggaggcgacggtgattctctgtggcggcgtgacggagatcacacggcaggaagagtgcgcacgcataggggggcacgcaggagagcagagcggggatcgactgcgtggcgtggatggaggcggtggcgtttgggggagagcgagggggcgggaggcgaggagacaggcggaggtaggtgctggaggccgtcggcaggcgatggcggggcacgacggcgacgagcgtcgacggcaggcgatgcagcgtggagtgcgaggtggagaaacgccggggacggggatgtggggcggcagactggacagcggtggaggtggatatgacgacagcgctcgatccaacgatgggcgcggcgaaggggattcggctacggtggaggacgcgggatcggtggcggtgatctaggaggaggtgcgggacgggagggaggtgtggtgccgccgcggattgcggaggcggaggggattcacgacgagatgatgagccgtggctaatgtgaccatggttactacggatacatccgttgatcacatcatagaagaacaataagatatcaagttcgagtcctccaaatgccagaatccaattcggccatctgctacactgctgacttcaaacggccgccgaatctgcatacgacctccgttttcggcccatgagtacttgatggaaagctctcggagtcctctttccaatggatccaacctcattgccaaattccatctcagtcggcagaaactgaagaaacaagttgctgtgacacctgtaatgggcctatgggcttgtaacttcgtctgggaccccggcccaagtgaggcccatgtggggtgcatcccaaccaggtggaggacgacctagaggacctcccacctccttaaatagctaggtagccctttagagtttcttgggttttgatagattaaagtttagccattgctacttgcttgcagcgcgcgtgtcagctagaccgtccgtctgcttgttcttcggaaccccaacttatcatttgtattaaattcctatttgcaatatcagattgcttttatcttattcttgcttgtttcttcgatttgcttgcaggaatagggttgatctgcaccggcaagatcagcaacccacggagaggtgtatcgatcgctaaggctcaacacaacgtctcatacggttgtagtcagatcgtcaacgtttctcctaaattgtagttatcacaactcaccgaaagatcgggccaacaacagccttgagtgtcgagagtaactcagggttcatcaaacaagtataggatgcctaccaaagatgatcaagtgtaacactagatctaatgtttgtttgactatgcctttatgcaatgaattgttggcggtggtcttgacatcttaaataccaacctttttttttcagatgcaatacaagtttttgttgtttttttttgttctaaaagtttttgttgtttcacagcagaaactggacattttgatgatggtatacacaaatcaaaatttatggtgtgaccagtgacaattgctctttctctattcttgtcttcccgctccatactctatccaattctctatgaccagaaatgcgtagaattggtacctcaggctgatgcactttaaaaccatttgttttgatagtgagactgcgagtataaatcacatcgaagcgcggttgaaggggagcataaagaagtgaaacattgagctttaaattcttgcctgtagcaaccgttgactatgaacatttggtgttctttctaagaaatgataaaagtggacaaggccaaatggttgaagttcagtttgcacaatgaccagtaaaaaaattttaagaaattttcttgtgcaattaattaatcttgaatttatttttacatgttctcatctgaaaaacatggttgacttacgaatccatgtttcaggcgctacgcacattattgaaaataaactcttgaaatgcctaaacaattgagcataaaaagtccaatatttttacttttgttgttctctccacttctcatgtaaaaatgattatatatacatacatttgaggcacaaattttcatttataaatgataattgtgcttatccccgttgcaacgcacaggcactcaactagttaattattcttaaaaatacctaaaagcccgtaagctaatactctttggtcgtaattcaaggtgtctacttgaggattgcatgtatatcataatttaaattcattttaatttttttatcaagacatatcataatttaagttctcaaatttgtaattccaagttttaaaaaataaattaacaaacaaatgttaaacctagaaaaaaaagaccaccaaatgaaacaaaaacataacaaaatatactctcttgggattcaaacatagacaaagcgttctgtcttttataatagggttaattggatccatactattgtagatttgactattcagaaaaataccattataattcgtttatttgtagccgtgccactgaacttttacaaaattaattaaaaccgtgccactaccgtaacattttccatgtattcccttcattttccatcttcttcctcccttctcccgtcttcttccttcctggccgtggcggacagggtgtagttccaaagcaacgcggagatgacggtgagcttggtgctacaaagctggccggtgcagcacactagccgcggcacactagcccgaccggcatgctcaggagctcgccgctggagccgcatggcagcgcgcgtcggcaacagctccggtggcaacaggcaccacgcttgcttttgcgtcggcaacagctccagcaaggagtcccttgttccacctcctgtactagcctatggtggtgttcttttcttctgaaaatgaagatgacgatgaagatgtatcactggattcagcaaccatatgagcataatgatgcctgcctcaccaaggcttgctcgagttcgccgcggactgaggaggagaccgacgctgccagcgaggtggggacgcgcggatcggccgcgggaacgggagagccagcttgctggcgccggcggcagcggagtaggcaaggcgctggtgctagagcccgccagatggaggaggaagaggaggcgaggcggcggccggagctggcaggagtcatcgggagcaaacagctcaccgcggcggtcgggcaccacgccgagcagcttctccatgcagcaccccgcgatggcggcgaaggacccgccgcgcgcgccgccgcggcgacgacgccgccgactacgccgaagcgtgaagccgcgcggatgacgtggttgcgcttgcggctgctgctgctacaccacccacagcttcgtggcagagcccctgaagatggggctctgcgggcaggcacgccgccctaacgacaggaacggcgagcacagcgttgccgctgtggccaacgttgatgccgtcgtcggctgtgccgacgcgtgaagccacgcggacgctgtgctcgccgccgacgtagcagacgcactcaacttcgctgcgggaaaaagaagggagaagacagaagaaggaagaagacgaaaagggaagggaatggataaaaaatgtgatggcaatggtacggttttaattttgtaaaatatcaatggcatggtttcaaacaaacgaattgtaatagtatttttctaaacgcgcaaatttgcaataccatggatcgaattaaccctttataatacgcgcagatcctagataacgtggcaaaccgttgccaccttaaacagggcatcagcacaatgcatgtggcaaactctaccgttgccaccttaattttttcaattagtatttgccagtctattcttaaaaacaagttttccaaaagggtcaatttatcaatttttggtagaaaataggacactctacatttgtagtgtaattatatttgaaaggttttaggagaactttttctgtcaaaactcaaaagtagtcccttctatttgtttggaccagtcacaccccattaggccattaaaccacgcctaccgaaaaccagatacaaattctgctcaaaaggtctcagctttcaagccttagccagttttttattcttttgcccttcttttatttttttaaaacgaagtcatcttcattattcattcgagataaactttttttttctcctgaggaaactactatccgacggtactacaatttgttacaatagaaaattggtaaatcttagtagtcgcctaattttggtgcgcatctgagtttacagatcggtgttacataaccacgtataacaccaacagaggatcatctcatgttgccctctcttaggacatcaatcatatcatataatttcttgttggcaccagattgtatctgcagtaacagtagcaggacagttaacttatttgccactagcacgcctaagaacagagaaatttatatgtcacattccatgaacagtaactggattctgacctttttatggagaaacagggcagcatccacagttccctctgcgtaaattgaacggccacatacattgtgttgaaactcaaatgaaactctgcataaataaggggtatcacctcagtacgttgtgcttgtcaaggctctcaatagaatccagcagacctaggaaaaggtttacttacgtctcatccggtgaagtgagatggtacatgtgaaatgcgtgaccagaaagatgttcttctgggacaccaaccaatgtaagctgttcctgaggatcccggacctgcttaacctacaagaaagacatgtagaccagtgtgagagtttgtgaagaacatctcaaggaggttttggttatgctccaacaaaactacaatgcaagaagctgcttcaacaaaactagatatcagccttaagaccattagcctaataaaagtgtgttcgctgctgatggatgggaacatatcaccccagcacggaaaacggagcagtccattagcgcatgattaattaagtattagctatttttttttcaaaaatagatcaatatgatttttttaagcaactttcttatagaaactttttacaaaaaaaacgcaccgtttagcagtttgaaaagcgtgcacgcggaattcaagggagaggggttgggaacccttgggtccgaacacaccctaagacatattagatccaaacaaaaagcgagattttacagtacatcaagcaccaaccctaaaaggtactgacaggttgtccaacactgaatttgcagtgtgcagcatgttactctgagagacagacattgggacaagtaaactagtactactaattaaatctaagtatctagtatagctcattcttgaaatggaacagaagatgcatgcttagtttcttacataatcgtaaactgatttttacataagagaaagcaaatggcaatcctctaaaactaacaataatctgcgaaagacagatatgacaatgtttcataaaaaacaaattcaacataacgattttctgaccatgtaagcttccagttaacatttacctcgttcaagttaaatgacacacccaacttctgaaagcaagagataacagctttggccgtgccagaaatgtccaattttgtagcttgatgagactccatgacctgccaattttgttatttcaaagaagagtcatgggccactgcaaaatatgaaactaaagtatatgatgtacattcagttataacaatagatggattccaatggagacaaataagataaacctactcacaactggatgtgattccaagagccaaaccagaatgaataccacacagtggagataaataagataaacttactgcctgagttatccttatcgactaaacaaatgaatgcatcctgctggacatttatactaaaatactaactgtactttctagtatgtaaagggtgaaaactctaaatggtttaataagctctaggtctgcgtctgacaagtaataactgtggacccccgactctaaatatgtcaagtactaaatgtgttcctgcgcctataactacatctccctaagtagtaaatgtgttccctgaaactgtaaatgcgcaggggcctggtagcaccgttgacactgaatagtagatatgtattttttatagatcatttagctagtcactatagagttgtcaatccaaatcttctgtgaagtttcaatttgcaagaatctgtgcttcaaagtgaagttccatagagcttaacatctaaatagagtgttgacttgtcaagaggaggcacttttcaagtgtaagtcgtatgtgaggctgattccaaatagcttatgagtctaaccatctcagtcataaattttgcaaagactaaacccctgaaaagttaactttcatgtggcatgtacagttgtacaagcacaggcttacaattctagctccaccactgtggtttaggactgaagcacaaatgcagatagaagataggcatactcagggtgttaacggtagttaattcaaatgattagaacattaatgcatcatacatcataatggttaccaattaacagaaatatcgctgatctttcttccattttcctacgatatagctaatttctgcagttcctaatgtagcatgtaagttccacatggatactgttccagtggtttggttcataagttctctaccacttactagttactccactcacttaaaacttccataccaactgaaattgctgagctaaataccatcatgattctttaataaacttcctaacatcaagttaatatgataaagttttctgtttgcacattattgcaagcaaattactgagcccataatgaatacaagtacacaactcatatcaatcaactgaagcaccaaatttgatgttgaatgaagaacaaagagacagttataatgcttgcaaggaaaaatcaaactatacctctagtttgtaacctgaaaatgcaccggggaattgctctgccatgatttccatggcagcaagaaacgcgacaacctaattggaaggaaaaataggagtaagcagtattaataaggagaagatcattagcttgaccatgcaatggaaatagttatacctgcttccccatctgtggggatatcacagcatacacgtttgcgtcctcaactgttttgtgcaacagttgcctatttccacctgttgtgcccataacaaatggcaatccaagtttacagtaaagctcagcattagctgcacatcaaaaacaccataaatgtcagattagcagcaataatagtgagcaaataatatgaaaataaggaacataaagcatatcagagagtttaatttaattaactaactaataaataaaagttaaaaggctgacataagatgaagagcagtagcggctatcctgccaaacctacttccgatagaatatcaactaaggaagattggattctgtagttaaatattcctgtttctttttgtacagttgcaaacagaacaacagacaaccatacatacataagctaacgggatcattataatcgaacatacaacttaatgattacaacttgctcttctatccattcatcaaaatatacgataattttcaactaggttcagttgtatgcactatgtagaagaagctcgagctgaacatgagatagggatttgtctgatataaacaaccggcagtttttgctgatgcaattacggaatgcttacttttggtagagtttagcatataaggagatcaagcaacagaaaatatttatatgctcaccattaacagcatcaggaacagtgtagtcaacaactatcatatctgggtaatccttagcaatcgaagggagaatactttctccttcagatgggtcacgaatataaatttccctatcacaaatttcaacctttccatcaggaacctcaatagcactgaatgatacaggaactaactgaagaccagcagatacagctgcttcagcaacagccttccccattttcccagtacaactattcacctaaacaggtaaatattggtataataagtgaaatctgagataataaaataatggatctacaggaatgtaaatcatagaagcagttaagcggtgctttaatgaaaattttggaagtaattactaatcttagtaacttcaaactcaagcatcacagtatgatgtggagatgttgcaaggagaaaaattcagtacgtctggatcttaaatttacagaacactcaaacaaagtaaaaaaaaaaaaaaaaaaacaggtcagctcaacacgatatatgattgttgacgtgaaaactaatgaaaaggtaaaacagcagctaccagctttttaatatcgtgtgctaatcatagtaactgaaactaaacaagcaatcgaacctgtcggacttccatttcatggtgctacgcacccatttctatatatgaaattgctttataggatattgtctggaaactgaagtactgaatacaacatattaagtgactcaggcagctaaaaggcaagtttgattgagtttttttcaatgctcttttcaaaagcatattttagaagggaggaactgtgaactctatcttcagtaaagtagtacagcggttagattttccaaactctatatttttgttgtagtataatctcaaactgaacatcttttttatgtgcctaattgagttggtcaaacatcccaaattccattccactaccttcttgtcgagcagaaagcaactaactatcagtacatcctccagctgcaggaaaccaaccatgtgcaagaaatgggataggaagaagatgaacgatctttggcacagctgactcgagccagcctgtcccgattggcaaccccttgcactgaacccgcatcaagaattgagaggaagaaaatgaacaggagagatggaaggagaccaaggaagaagatgagggtaatttgttctaaaaattttagtaaacgcatcaaaagggtatgtagtggtatatttccaatacctaaaaaattataaaggcatggctctaaatagttgaatagtagtggcatatatcaaaactgatgaatttataatggcatggattcaattaaccctaatattattgccaacactaattcataatggctgaattaaggaacagaacaggaaaaaaaaagtaaatagatccctttattgtgttgataatcattttgcagccatttctcctttcctacatttcccagtttcggatggaagataatcataattaaagtaaacactaacaagtactccttaggcaatgccaaaggtacgagttaatggccttggcctgtttggttggcagccaaaggttgcaatgccaaaccttaggcacgctgcatgacacaatttgttagcctagtgcttagttggtcggtataattgtggattgccaaacttcgttagtttttatcaaattgcattttgtgtggcaatgcaacacatctggcaaagtgaggtgtgtggacaccaagcaaaccggccctaattcctaaatccacaacaagggcagagccaaaccaagcaaccttaccagtatcgggaacgagtgcttgggaggcgccgcaggggcactctcgaggctctggctagcgagggcgttcgtgatcgaaagcctcgccattggaaaccgccgcctcagcgtcaccgtgacgatttgggaacagaacggcaggcgccagcggatcggacctcgtcgcctggcggctgcagcggcagcagggtgcgtggcaaaggtggaggcgagcatttgggtaggtttctgggatattggtagccggaggagaggacgtagagcggcggcgaaggaggaggaggaaggtgagccctgcccgagtctagggttttgggcgatttggcgttttctttttcttccttgaacggcccattcaaaacccggcccgaggttaaaaaattcccgaaggcccaaagtctatattttgatttaaacccctaatggtggtgtttgaatctcctggagatgaagattaagtatttcacgcaaaacgatgtgataataacgtgtgattaattgagttttaattattataaacttgaaaaatgtattaatctgatattttagaacaactttcatatagaaagtttttgcacggaacacactgtttagcagtttgaatagcgtgccatgagtatccaaattttaatccactcctttaagaagaaacgaatgggacctatttctgcttattaggatagtaatcttttggaatatgatattatttaactagaaaaggactgtgcgttgcaacggaaaacctaatcgtttaggttcatggcgccttgcatgtgtagtattttgacattatggatcatgatgttgacccacatggcaagctatcgtgtagcgcttgcttcacttgattgcaaaaatctcttcgaactaataaatggtgggtcattgaactgaatatgatttgtcgcgtgaggagaaatatgacagcagttcaaaattcttaatgatagcattagtctggagataacaaggatccacctaggcactgaaaaagccaagccgccagatctgcattcaaattcaatcaggattgcattgtagtcaatcataaatctaatttgatcatacatgtttaaaaagtaatatatgtatatacctttcaaaaattgcattagaattttcatcaaattggaagaatgggtttcctcaacttggtgaacctcgacaaaggaataatataatcaaatggaaatttagcctaatttaattcagctttaccaatttacacgcagataccacacgagtaggccaatggcagacaggattttcatgatgtgtattcaagatttacaccatgacatttagaagaactattctttgtgttatcaataaaaaaaatgctagtttttttaataataaaaagatgataatgtgtagaaaaacatagtagaaaattatatatatattgccgttttaacatgaatttcaccgtgacatttgaaagatattccttatgttatcaataaaaaaaatgcaaagttggtgataaaatgtagaaaaacacagtagaaaattacatatattactggtggtttaataataaggggcaattgtgttcctgcccttactttctagttcaattatgattttatccctactttttagggtttgtgattttgcccctacttttttaaatgaagcaaccgtctacccttggttttgacggtagttaggtgggccccaagtttctgaatcaaatgagggaaaaaacgatattgtaatttgtgaattaccatcatgcccctgatttcactaaatcagtctaccacgtgtgaatcggcatttccccaatcgaaaaacctagatcgaaggcggcgcacgcgaggaagcggcggcagagacgcgcagggaggcgcggcgtcgcacgcgagcaagcggcggcagcctcacgggccagcgcgcaggaggctaggcggtgcggcggcctcgtgggcctagctcgcaatgcggcgggccagcgcgcagggaggcacggcggcctcgcgatccggcgcgcagggacagaggcggcggccggcggcgggagcagcaggcgcaaaggcggcggatgggctcgcgcgcggcccgacggcatgcccgcacgacagcaactgtgttggcaacaacattttgccattgggtgcatctgccgtagaggaaggcgccgagtgcatcgcctcatgcgccgcctccttgatggttcattttgttgattgaattaactggcaagcagctgggataaatcattgagggctctgctatatgtgtggatttgggattttttttttttttggctctggttctcctttccttttcctttttcatgaaaagttgggtaataaattgatttgtttggaaaattggtcgccttcttctttctttttcccttcgtgatgtatatatgtgcaacttatatgttcctgaaaaactggcaataaattgatttgtgtggaggtgccatacaatctcaaagttaaatcttttagtatgcatgccagatccatcgccgcatgcatgacacaacggggcaaaaacactgcatcctcacaaagaatgcaaagggcacacctgtccttctaccactaaattaacaccattaaggggacttgacagagtaggggcaaactgaagcttcggtttgaaaaaacaggagcaaaattacaaaccttgtaaaatcataattgcaactcgaaatagggacaagaacacaattacccctaataataataggaggtaataaagtgtagaaaaacacattaagaaattacatatattgctggtttaatatgaattttcaaacatatgaatgcacttttaaaaaatataatcagcttaggagagaaagaaaaaattggtgaggataagcagcatctacccagttcaacaaatggttttactcattcatcgtgtgacatatccaacaatacaaaatcatttgttgagttgtatccgacgtcacatagcccgccgcgctccctccctctcttcgatctcattcccctgaaatcacgcaaaatcacgcctaactccacaaatgacgccgctgtcgccaccactcagattcggtgcaccaccttgcccgtgagcccatccacacatcggcgccccctcaaccctagcgtcattgttccccttgggctagcggaggcagtggctggttatagctttataggactgttgatgtgaaaaacacacactggcctgagagatttgctttactctagtgcaggtccaaagaattgcttctgatttctaagcgtgccagttggtttgcaaccaacaagaaataaaagagaaacaagaaaacaaagttaaatccgtaaacgatagccgatgacatatcgttcaatattaagccgatgttatttgcattagataggcaatgaagagtaaagcagggtaaagttaaatctactcgatcgggtgtagatattaatgatatataatctatttctaaaaatatgtttaaaccaagtgattgggatagatcggacagtttgccgagacagtataaatcacttatgtttaaaagtactttgagatagagattatatatattcatagcatagccgattaagtaaatctaagatgtatcggctaatactccgataccactctatcttaagatgttaaaacaaacgaaatacactaaatatcaagcttaatatattttaatgcaataagatcttaatataaagggcagatttagcatatcgagtaatcatataaggaacaagatgactaaaccaggtaagatcggctgaaaccccaattctatctctatcgataatcatagaacaagctaaatattatgattctagatattacttagtagatcgaacctaaccgatgcagcataagcataaagagaaacataagatctgaacaagatgatgaaaacctctttgagatggtagatacactatataacctagatcaacgttgatatctaaccttatcgactgccttctgatgatagatgttagccgatttagggttagatagcaatattgatagagattatatagcatatgtgataactcgacgatttacataaacaagattacagtatcataagatgtatgcactaatcccgagaacgtaagctgccatgacaagttttacctcttgctggagatcgaacccgatgcagcccaactcgaaagcaagaactcatcgaaaacaatgaaagtagaaaaggtggcgatccgccgaaagtgttattgaactgtcgttaaattgtttacaaggtcttgggtcatatttatacctaaaatacataatatgtccttgccggacacgactctatctctattataacttaaaatacaaataagtcccttaggtggactcttgccaaacatatctctaagaaaactaccagaatatcctaattaatagatacaattgccttcttagaactcaatccatacgtggcaatacttgtgcagcacatcaatcgatcccgtagatgattctagaaccaccttactaagatcggctacatcggctgttcttcatccgatccaatgtcagccgatgcagacattagccgatgctcctgtagccgatatgcactccgtttctaggaaacgatctctcaccaaatccgcttcgactttagcttcgaatctgatgtataatttaccgaatttggtcgtcaacaaggaccaaggaccaaggtccaaggatgcagcagcggcatatgtaggatggattttgtctggtcaggcgggcggccgtgaagtggcgagactcgagagaaggatgcggcggtcgaaagggaggcgtccagttagcggtgacacgatccaggcaacaaggtaaccttgcctcgaccgcgtccacacccctccgcgcgccggtcgcaatccgtcatgatcacgttgtccccggtgtcctctctctcctacatcatctccgtctcccctccctctcatgcaaccatggtggtggcgagttcttcaagcacggcagcacacaagaactatatgattcaccattatcatcttgtccaagattcatgcttcatgcaggacacggagggagtggaggaagaggtcagaggaggtagtctgttcggcacgaaaatctcaggaagtgcgggcacggagcatggtccctggcgaatccaagtcctttgaggccttaagcagtaacgaaatccatgtactgctataattgcaactattgtttctatattgcagtgtgcaacgcagtgctgtttgtgtatgcacataacaagaatgaaattaaggttggatacaaacaaagtgtggaacctctttcgttctaagctggcatctgctgaaggaaattgtggcctccttttttctgattccttttctattttgtgctctttttttcatgtaggggagcagctctggtgcgacagggaagttggcagcacatacgcatttcattgagcacatcttgagcgttctagatttcttgaatgttttatattgtgatcagaccaataaggtattcaactggcatacagttttctcatttgggctcaagtgattggattggtttcttgtatcttgcaatttgttgtgttaaaaaaatattatagttttattgctaaaagcaatctatcttttctgtcatccagatgaaaacagttacttgtggtatctgtaggcataattatggaagaactggattagcatggataataaatggactacattaattggcgatggtttttggtttagttgagttttctatgcacggtatcttctggtaactatgattgaccttttacattttaaattaagtgaaatgaatcattagggctgctatggacacttgagtacatttgaatgaactagcaaaaagcctgtgctttgaaagttgctgctatggacatccagtgtttattcactcaaatcttgcggacacacgagagtccaatttttcatatatttatttttcttttttttctcgatgtacaaaaattacaattttaataagtaatggggattgaatttgtgtaacccaagaattctccgaaatggcacactgcttgatgagatccacattgtctgaaacttgttttgcgtgatactcagtatgctaatatgaatactaggttttgatagtgtcttggcttaactatttgtttgggtaaatctaaaaccactaaaatatagtaattttgctttgttgatccgtctagggaaataaatgagataggacattacaatgatgccagatacgtatcattgccagaggctatgtataggattcttggtttcccacagttcgatatttattcagctattttgcagctccaatttcatcttcctaacatacattatgtcacgtatgataaggatggtaaaatcgaggatgtttgcaatcgttcatcttcttatatggcattaaacaatctcgatgatggtttaaatttaaatttgttggatgggtagtatgaactgtctatatgccctatccttttgttacatattggaaaaaaaagctatgtgtagagatcagatggacttttcctgtgcgaaactctggattacgattcatgtcaggcatgttttttcaaggataatatcacacatctcttttattttttgccttgtgtttgataaatagtttattttagtatttgtttgtattcatattaaaatggatattccattttaatttcttttatgtatgactcttctaaccaataaatttatttgtctaatgcaaggtagctaactattcaaatttcttagtaccttgtcgggttgtatgatacatctctttatgcgtgtcttgaaaattactttatattatttttatttattttataaataaatgcatttgtaggatattgatgagctaaggcaacaatttttgctacatctactaatgtaccaacaaaatgagtgcaaaagcaacatttctagcgatacatgagaatttcttaaatgtatcctaaatgctaaacattagggtagttatttatctatagggtatattctgtatatgtatcaaatgctttatttttgtacttgtttatacccgtaactaattaatggaatagctctatacttttaacatttttttagaactttaacatatttttaaacgtatatctccctcgtatattgtatattgaagtgattatatgttactaattcttgtcaagatttattctgcccacacaatatcatattattgtaatttgcatgaaatatatttgatatacaacatgaaatgaattaaagctcaattgcacagatcatataaaagtattttttgctaacatgaaattttaaaatttattaaagataaatagaatgcacagtagtgtttagcacgggcatattactagttggtcatagagtgtataaaaacatagtaggaaattgtatatattactggtttaatattaatttcaaacatatggacgcacttttcaaaaaagtttaataagaggttgtgataaagtgtaggaaattacaaacatatgaattacatatattgctggtttaatatgaatttcaaacatatggacgcacagtaggaaattacatatattgctggtttaatatgaatttcaaacatatggatgtacttttttaaaaaatataatcagcttaggagagaaaaagaaaaaattggagaggataagcagcagaaaatgaaggggcaatcagagtcgaactcccaacctatcggccacaagtttcattggctagagaagtttgatggttgtgccatgatgtgctgatacacaatgtgactattcagtggtcagtgaggccacgtccatggtaacaaattggagttgttacacgcacggacgaaaattaatggaaccgatcgctcatgtggataaagtggatgatggacggaattttttaaggaagccttgcatattttttaattaggtatagatgtgtttgaaacctcatatttaacatttccaatcagtatcgaagtaattgatattgtttttgaaatcccttttgccaactactcctaagagctagtacgaagttaaaagtggcctacaccattgtcaaagccataccctctatcctaggagtcatgagatatacggatacggtatatcctcaagtatacggaaagaatttaagttaagaaaatcggtaagttcttatggaaatactcttaaaagagcagggaatatcatagtactactcggaggggataagggttctacttgtagaccaaggtgatctgcgatataaatatatacccccaggaggtaggcaacgaatcttagtgcaagacacgccaccacagaagcaatccggaggacttgaagccaatttgtcgatagatctcgtcaaggttctctcgacaaggatctcgtcggtaatatcaaagttccattgttctcatttgtaccctatggtttcttctatattcccatataaactggattagagctattaccatacgaggggcctgagctagtataattcttgtctttttgtgtacttgatgttgtatcgttgttgacggctgttaaataccaaatttacgtcgtcaatatctgcataaatctgaaagtataaaaacatccaacatagtgatagggtttatttctaacattttccacgagttgtcatggttatggataccacatacctaatagtagttgactaaatctcggcaggatccaccacataccatgtcttatacgaaaattggcctcgagggagttccggataaggaaagacaaccagagttctacatggaaacgacaaggactactcggattgtatccatattggtttccctagttctacttggacaaggggacacctatgggtataaatacaagaccccctaggaggagaggggaaaggaccatggaaaacacccatgacaatcaacacacgcccaccagaagccacaacatacaagcctacatacgccaagacacgccgccggatatcgacttcagggataggcatggctattcccctacggtgtctccggatactgtcaggagatacgaaagcgctatctctgatctcgccgggcacggatccgaggaggaagactacc

SEQ ID NO: 7583 - DNA, 2487 bp, Oryza sativa
tccagaagaatggcatcaagcccatgaccaacacagttaaacggcgggctgcagcacagatcaatggggtgtagcccaaggctaagcttaagaagaagcagcgtgagatcacacgccggaccaagctcacgaacgcccatctgcctgagctgttccagaacctcaacacttgattgctctacgcttattcgacgtcaagtggagatatttatttctgtcctcactctacctactgcaatgctttatatacctgctacccttattgtgtatgttataaatgtaattccggcctccgggagcataatctgagacggtcagctttgtaaaacataaatcaattcaagagcttgagatggcataccttcgcctgtcaatgcgttcttcaaattttcgtactgtaatgcccaaacgcaatgtgtttcttgttttcttttcttacgtttcaatgggatcctaggtgagttttggatccataacaactgttctattggcaatcgctagtacatggcaaaatcagccacagcagtgcagctgtaatgtgcaaaaggtgagtcacaatcttcagatcggattaatggaagaaaagagaggcgcactcattatgtttatggtacctggaaatctctcgtactgcaagccgcaccatctaaaagggagctcaaatgttttctttttctcgttttcaatctgcaagttgtttcttttgaatgttgaagtatctaaaagaaagatcaaatgatttccttgtttcaatctgcaacatttcataattgaaggaatcaaatgctacggatgcaatttgtttgctggtagttctcgttcagattataagtaagacgttttgagctgaatgttattatattcaaatgttcaggatttgttaagaactattcaatttcctttttttttcttaagatgaatgaactattcaattgttgaggtctgggtatagtaatggagcatgatttaatcaatcctaatctctccattcatatgaccctatagttaccttagtggaagaatgggccgtatctaccacaacatctcatggttatatggcaatgtgtctacggccgttagatttggacttacctccaaatcggcgcccgatcctctaaagaaaatcggttggtcaaaagttacggttgaccaccagtgaaacattaagttatatatggtaaaacaaaaataatcagtcactggagcatttaaaaaatttgtgaaacacggtgaaacatgttactatcgcttatgaaatattgagtattaacggactgaaacatatgttgttgtgaagttttaattataacaaatacaacagtgctatcttgttgtgaagttttaattataacaaatacaacagtgctatcttgttgtgaagttttaattataacaaatacaacagtgctatcggatcgtagattagataagtagtttatgggaaaaaaatcattttgaaggttgctaaatacatgcatgcatggttagagagtaggggcaaggagttaaataaattttgtgaaacacagtgaattcacactttgaaatatgtcgctatcacatatgaaacattaaattttaacggtctgaaccatatatattttttttatcaaaatataatcatgtgatatcttattgtaaagatttaatcgcaacaaattcaatggtacgatcggatcgtaaatcggatataagcagtctaggagaaaaaaaatttaaagtgatgagaaaaaagaaaaagaaactagttggtactcattttgcatgcatgcagcagtagcaaggaggccgattttttctcttcaaatcaagctactgagcatgaggattctcgtttagattttgccaccataaaaccaatctccacaatgaagaaaccctccaactggaggacctaaatacatactctctccgtacttgtaaatgaaatcgttttggacagcgacacggtctccaaaacacaactttgacttcttgtttctgtaaaaatatttattaaaaagtgatatatgtatacttttatgaaagtatttttcaagacaaatctattcatataatttttatattttcaaactcaacaaattgagacttattcatgatttatattttcaaggtttgacttaaacattgtcctaaacgacttcttttacgaatacggagggagtacttgggtgtagttctttctcaatcccacattcacacgggtaaaagtgcacatgatgggtaacctagagccccagatccacaaaaagcaagacaaaatgccggtgtgccaagtaacattttactgtatatgaaataagggttatttattgggttggttacaggtgtaggtcctacaaaaccatacccacacccgtttatgcacttggtgctattgttttctcgttaacaggtaaatgggtgggtggattaatcaatccccatttcctgatggggtaattattcactaagttcctgggtagccacttgtcctgctaggggaag

SEQ ID NO: 7584 - DNA, 10707 bp, Oryza sativa
ttatattattcacaaaaatcacatttctctcatctgggttatgaacatcaacacatatatgtcaattttgtaaacattggtactatcactttatcggatgaagaagtgaccaaaataaaagttgtagatcttgatatgttgtacaactttgctatttatggctttcccatttgaaatcagttagtatttacaaatgctgtttacatttgtcatattgtcaaaatcaatttcaagctgttggaaacaaagttatatagacaaatgaccaaaagaaaagttgtagatcttgatgagaggatcaactttgttgttgaccatattaccatttgaaataatttagtatttacaaatgttgtttagatttgaaattttatcaaaaacaattttaagctgttggaaacaaagttatgtacacaaatgaccaagataaaagttgtagatcttggtaatctctacaattttgttgttcaccatatttcgatttgaaatcatttagtatctgaaaatatattatgactaataaaatgaattattatacagcagctatatattttgtacgcataaatataaagacttgtttggaaaaatggaaaaataatcatcggtgacgggccttagttaaagcccgatagagattaatctatctctatcgggcattatcttagggcccgtcacagatgagtcatccgtgacgggcctaaatgtcatctcaatcaggcattagtatggagcccgtcaccgatgagtcatctgtgacgggccctacggcaaagcccgatagagatgactcatcactctactataactagggtttctcagatcggatcgaaaattttttctaagtcccgctacagtttcccgcctccttagaaccctagcgccgccgccaactcctacttcgccgccgtcgtcctccctcgccgccaccgccactgagaccgccaccgccgccaccgagcccgccgccgccgccaccgagcctctacaccaactggcgtcggccttcctcatcgtcctcaccgacgcccgacgccgcccgcctgacgctgacctccaccgagcccggcgccgccgccgcgaactcctccttcgccgagcccgccgccgccgccaccgagcccgccgccgcctccaccgaccggcgacgccctccaccgagcccggtgctgccgccgcgaactcctccttcgccgagcccggcgccgccgccaccgagcccggcgccgccaccaccgagcccccccggccgacctcaggtgagtcctccatcgcgccaccctctgctacctgcatgtggtgactgatgaaatgtggatgttgggatgaatttagtgatagatgattttagttgattgatgacatgacgatgaatagatgaaatgtggtgcattaatgaatttagtgatagatgattttagtgatagatgttttttgggattgatgatatgtggtgaacgaatgattttttttgattgatgacatgttgatgaatagatggaatgtggtgcattaatgaatttagtgatagatgcatgatatgtggatgaatagatggtatgaggtgaatttatgattttaggatttgatgatatgtttaatttatttatatgtgacattcaattcattctattactgtgagatgtgcaatttagtttatttatatgcttcatttatttataagtgacattcaattcattgtaatagattgtatcactgaattgtgtatttttgttattttgaaaaaaagtagacgatgtctcagcaaggcgaaccaatgtcgacgacaactagtgggtcctcaagggcacgtactcctaggactgggaacaaaatccctaaggaacggttccgcataacagcggtggatgccgtagggttgccggcatctccaaagaaaatattgagccgatttaggtctatctgcggagtcatagggaggcagaaattcaatattctgcaagatgacatcaagctcgtgccggccgcagagaaggacattgcttggctaacgttcaaggagagcttcgattatcctgcggagcatgaggaccgtctcaggtgggctgcattcaaggttatgggcaatgcttggaagaacttcaagactaagctagttggcgagttcgtctacaacccggcgaatctagatccaagagagaaatttccttggatcacagaacaggtctgggaggaattccatacgaagaagtcgacccccgagtccagatctagtagcgaggcatatcgtttgctccagaccaagaaccagcatccacatcggcttggcactgccggatatgccggtaaggaagaggaatggcagcgtgaggatgaagaagcggaggaatcaaacacgccgctcgtgtttggcgatatcccacaccctcgggctaggaactgggccagagccaggtaccagaagaaggatgatggcacaatcttcatgccaaatccagaagatcaacgagtgtacgaagctatagtaagtgtctagtcaaactagatgttcgcattgtttccgatcatgcagtttatttaaccccactaaattgtaatgcagaaggagttggttgctgagcaacaagcctcgcaagaggcctgctctcaaagatatgaggatgacctcctcacgaaagtgttgggcaacaaggaacaccgtggacggacacggggcgttgggtcttctattccctggaagtatggatttccagactacgcgtggcagtacaagaagtggacttccaacaaggcggagaaagatgcacgccttgaagccaagatccgggcgttgataagagctgagctgacatctgaattcgacgaaaagctcgagtcgatgagggccaagattaggcaagagatccgagaagagcaacagaacccccaggctgccgccgctggtgcgcacgaagagttaggaagtcccacccaaaaacgtagcagttgcacatcaactgaggtggcggaaaatccaacatcggtcgacagcgccatcgaccacataacggtaaaagtttcatccacaatgcatgaaagacttaacgaatccatatgatatataatattctaaaaaaattgattaatctatcgcaggaaccaacgagctgcaccctcacagttagggtgatgccgaccttcacggttccagcagccgagggacttgcgtacaagccgaccccagagacaagagtgcatggagcgcaactcaggagcgactgtgcaaaagttcaagtcgactcggtgaagctggaatatgagctattcccactaaagtatccaccgaatgacgaggtcctctcactaggaaatgcccgtggtaccttcatccaatggcccaaggacctcattgagatcaggattacagtgaggccaaccactgcaccaggcggtcgtccaccaaagagacccgcctctgctccttcagtccctcctgctcctgctcaagatcgtcatgcataatcttacgatatgcagttgcagtacgacacggatttttgggaggaccgaacggaggccgacagcaaggcgattcatgaacccccaccgatgaagaagagcaggaaggcacactcttcccctcagagaattactctcgataaacccgaagcaaaggggagaggaaggggaggaaaggtgcagtcctcgcttctagctccaaggaagctagatctgggcaagggccaggaagaggctaagggcaaagaggtcaagaagaaatacgtcgctccacaggagttccaactaggcatgccattggttggagatgacgtgcttgccgcaatgggcaccgcttgcaaggaccttcacgcatactacatggagaaatctaacgccaggaagccgaataaagctaccaatatccttggagagcacgatggaaagccattccttggtccaacaaattatatcgttgtcgacttcaaggatctattcgacctctacaggctccgagcggtggacacaagcctccttaagtgctactccttgtaagtattgtcgcacaacttaatctggtaataacaatcggattaactcgctaacaagatcgtttatcctgtgtgtaggttaagttggcaatggtgtcagaagaatgcaccggaagttgccttccttgatccataagtggtcactgtcacaaatctccagaatgaccgtcaaggaatggtcaactacatctacgacaccttgtggtcccaccgagataaggagtacattatgtgcgcctataatcaatagtaagtgtgttatctaaatatacacaacagcatgaaacattccttcagtacttaattaactttcactatattaatgccgcagtacccattggatccttctggtcataacacctaagtggagtacatgtcactacctgaactctagaattgataagaacgcatatgattggaccccaattcaactagcgatagatgaagcgtgggtccaatacgtgcaaagaggaggcctcaggaagacaggacatgacacccttatccacaaaaaagacttcccggtgaaacaacaaataggtgaccagtgcggattccatgtgtgccacaatatgcgccttctgtacagagaaaaggtgaagactttggcagagtttgaggtcggtggtctcaattgtgatagactaactacattttagtacttatatatgatcgatcaattaatctggaattatgacaatgtagggcacaataaccaagtctctgcctaccagctttgaggaggttcgcgaggagatagccagcttcatcctccgcgaaataattaaccccaaaggaatgtttaggcttaaactaaaatgatgaacaatgttgaacttttatgtttaggcaatgattaacacttattatgcaactgtgatgatgtaactgtgatgcttatatttatgtatatatttcatatgtttatgttaagacttgctaaataaatatttgatccaattaactcagttttgcaggtgaaatatgataaatatttgaatggatgtgaaatatgtgaatggatgtgaaatatgagatggctgtgaatgtgtggttgtgtgaaatatattgatgtatgtgtatgtgaatgcatatgtatatgaatgggtgatgctggggggctggggatattggatatctgtgtttgtttctgtcatttctgcagcgggcatagctagcaaaggcctgaggctagccaaaaaacaaattttatttttttgtggattatagtcatctgtgacgggccatagctaaatgcccgattgagatgatagtcatctgtgatgggctctagtttaggcccgattgaggtcagtagtcatctgtgacgggctctagtttaggcccgattgaggtcagcagtcatctgtgacgggctctagtttaggcccgattgagatgagtatcatctgtgacgggctctagtttaggcccgataaaggttagtagtcatctgtgacgggcgctaattgtggcccgattgagattggtcatctgtaatgggctatagtttgactgatcgtctaggtcaaagctatcggtgacgggctttacttagggcccgattgagatagattcatccgtgacgaccgtttgcccgattgagataactcttcacattagtgacttctagcctgtgacggacgctgtgcccgattgagatgagggtatccgttctagtgataggcccagcttttataaaatggcacaaccgtaaattcttgtttggggttggaccaccttacaagtttgggcatagccacaaatttctaccaagaaaggactaacagttcagcaaaccctctagacaactctaaacatcacaggtttaggcgaactattcggcggggcggcggtcacagggcttcccgcacgcggtggcccctccctggcgacgcaagcggcggtcgcagagcttcccgcgtgcggtggccgtacctattcgaggcaagcggcggccaagtgcggcgaagggaggcgatggacgcgttgccgggggcgcagcatggcaggcggcggccgcagtccttgcatggccaaggcaggcggcgaccgcgtcgagggctagcgggagagagcacggtgctgcgggcacgctcctacggctgcatccgggtgttcctcatcctgtccctgctgctgctcgccgtcaaggtagccgcctacctccaggggtggcacctcgaggaggtggtgtcgctcttcgccatcgacggcctcttcgccgcctcctacgcctggtggatgcggctccgcctcgactacctcgcgtcgccgctgcagttcctcaccaacgcctgcgtcgtcctcttcatggtccagagcatcgaccatgaaggctagtatttctgaattttggtcaaattttgtaattgcctagtatttgtgatttttttaaagtacaaaaacatcacaagagatgctcatatttggtcgaaatgctcatcacacaagctgaaatcacaaaatagaggtaaaatcacacaaagctgaaaaaatggggcacaaatgcaataaccaccaagggtataaatgtcattttttctacaactaacaccgttaataccagctgttagaagtgggggtacactactgattcagatttaaaaagtaggagtaaaactgtaaaccctaaaaagtggaggtaaaacagcaattcgaaagtaggggcatagatgcaattgtccctatatatattgtgaaagaaagtaggagagtagtatataaataaacaatgtaatgaggtgctggggatggcagattcactcgcatcaacatgtccatttcaaaggaatatatttgtgtgaaaaatttgaaagcatttctcgaaagatcaaatgaaaccatttcttaatccaatgatcaaaccatttatgtgcagtttaattttcttcgtccattggacgtttgaagctttatatttgttagctagtgacggagtaacaaaaaattggtgactatatacatacatccttgtttgtttggacattatattgcacttgcaatcttcagaatgctgcatgttgctttctgcatcaacgtatctcacagcaagcgtaaacagttgatgaagcgccactcgaataagcatgagggggcccatctgacagtgagtgcttgccagaagctttctactcctaaccacatctagtagaatattatcttctcctttttacgccttatcctttgagagaattcctttggatggtcggtataagagatagcaagaaggcaagctaaaacaaaccagctaagcataaggtgaagggtagataaaatacaacggtgaagttaaaagagaaacagagatgaacaagcgaaggttctctacacactcccttatcttggtgactgtgctagcagttctaattgttcttgctatgccaacagctttgctggggctcagtataggtacagttgagatccttatccccacatatatattttttttcctcttcaatttcaggttagaaacaaaattttctttggccggccgtaacgtcccatgatacggcaaagacgggagatgtaaaccatttccactatcttgaaaaaaaaaagagcaaatttttcttcgagagtcgcctcatctggccttctaaaaataaacttgagttaactgacaattgttaatttaaagcatcttatatgatcgagcagataatgagcatctcatctgtagattattttgtgctcacatgaatttttccaccagggaggcgtgctttgggtgatccacatggagttcaatccacagctgccatgcaacaagatgctcaggccgtaggtcctgcgtgcaacacaaacgatccgaatgttccatctccatgcccacctccactatcacctctctcgccatgaaacctgggcaaaaacaaagctatgctcaaggccttcgcttcctttgctccagcaggggattttgagccatatatggttacactattaggtgataaagctatacgtttgtaccacgagaactatgacaagtaaacgtatagattaaccaacatctgaattgtgacgagaattcgtacgttctttcagagaatgttgtaccttgtgttatatggtgcatgtacctctatatagttgtgtttgaataaaacgaagacatgaatttggcgagccgacaggagtcatcttgttatttgttttctgtactacgaagtatgcaggctgtaccatataatttgggagaagttttaccatgtttgcgaggtacatagaggtattgagaagtttagctatgtagacaattgatcgagagaggggtaaggtatgggaatgaattattgtaaccgatagcagtggagtaaatagctaataaaaaatatgcatcgattggaattggatcagattacaccactcacaaagccaaatcgctctactccatcgtatcaccggcgtcaacaccatgcacgttcgatcaccgatataagctgcatattcgatttgtgggttttgcttgtatgccggcaccgaggaggatggcaagattggcaaggacgagcttgcagaacacgggaagctgccacgcgaggtcggacagcatgccaaacaatctaaatcttctcaaccattgtatacatgcaaataccagccgataaatagacctcaatcaggaggttgtttccaaatttatgtgcagaaagatggcaagatggttttattaaggattaaagccaggtcttgctgtccaacactaaaatattcatatttcagtttattaattgtggtttcgtccagaagtgattttatcaagatttcacgttttttggataaaatttaaatcttcaaacaatcatacaaacattcagtggtattttaatcgatttgtgtttcttatgagcaaaatgtaaatataagagaaaccatgcaaataacgtaaaacagaattagagatagagataaactacctacacggtacatatctaacctacaactaacactaaagacaattctatatttttacatctcctagcaatatatttaccctctctaccaacctaactacctatacctttgagatggtaccttttattatgaaccgttggatttttattatttttgaaatgcaaacaccgtacaatcccgaagtaggaatcaatcgagtctgcattctagtaacgttaaagcacaaaatttgacacttttatttcgaaatcgatgtaccacagtttgatttggcataaataatcaagaattttaaaaaccacaggactacgcgctgtgaaagtactttatctgtctaaaaaatgtccaatcctgatgattaatctagacaagcaaattcagattcatcgttagaatttgacttctttttagacaagcagtaaattttagtgatgccatcaagtgataagtcagtcagtggtcaaagtgtaaccttataaggtctacatggcactgagtgcttagagcaggtacaataacaggctattagccagctgtaaatatattttagtaagataaacgatgagagataaaagcagcgggctacagatctgtagccagctacagcgcggactccaagactcaatatgtgtatggcaggtgggaccatatattaatagtatagtaagcaactattgtatgaattggctattagattggctatagatgaattggagctagtagtgggctgtactattaaatttgctctcttataaggtctacatggtggtgagtgcttaccggaagttcctatacctgagaccctgaccaaatatagtagaagtttttccttttttatcttttgacactatgggggtgtttagattcaggggcgtaaagttttagcgtgttacatcggatattatatcgggcactaataaaaaactaattacagaatctgtcagtaaaccgcgagatgaatttattaagcctaattaatcaatcattagaaaatgattagtgtagcgccacattgtcaaatcatgaagcaattaggcttaaaagattcgtttcacaaattagtcgcaatctgtgcaattaattttttagcctatatttaatacttcatgcagatattcaaacgttcgatgtgacagagtataaaattttggggttggatctaaaccgggcctatatctatccagaaagcttcttgaagggttaatataagagagagcaagataaggctatccaagatacaaaggtgaaattaaggactggtttatttcccaaaattttttcccaaaaatattacatcgaatctttaacacatgtatgaagtattaaatatagattaaaaaaactaattgcacagttagaacggaaatcgcgagacgaatcttttgagcttaattagtccatgattagctataagtgctacagtaacccacatatgctaatgacggattaattaggctcaaaagattcgtctcgtggtttccaggtgagttttgaaattagttttttcattcgtgtccgaaaacctctttcaacatccggtcaaacatctgatatgatacctaaaaattttcttttcgcgaactaaacatgccctaagaaaaatagggatgaacaaagccaagagctagcctctgctcactctctcctcttggtgactgtgctagtggttctaattgctgttgccatgccaactacttcgctgggacatggtgcaggtaagtttgtcatggcactccccttttttatctcctttagtttcaagtgagaaaatgaatttccctcatacaaattgcttgtttgtgtc

SEQ ID NO: 7585 - DNA, 2569 bp, Oryza sativa
cgtcacagataagtgtcatccgtgacgggttttagttttatgccgatataccatggctgtgcgaccatatctcaatcgggcgaaacttcggcccgattgagattacttccttgtgacggcccgcaaattccagtcttgttatgggccgccacaaatggaaggatttgtgtatggccttcaaacataatctttaatattttttgaaacacaataaatacgcaggcgcgcatatatatacacaagggcactcaccctatgaacaaaattaacttagtatcatattgcgttcacttcttaattttttgttaattactctctctgtttgaaaatataagggattctatgatttttgtaaatcaaattatcctatggttgaccaaaattattaataaactaatattttcgatatcaaataagcattagatatgttatgatatatgttttcatagtttacttctttgacatggtagatgttatacgcttctctacataatttggtcaaacttagaataatttgacttgggacaactaagatcccttttgttttaggaaggagggagtagattgtttgctagataaaattaatatataataacaagaaaaaggcttgtaaaactcggtacagattacatgcttccaacttccaagttcgaacaatttccgcaataacagcctcgcagctcctgataaaacaaacccgaagaggcttcccagctcaccaaattcatctcttaattatttaacacatacacatagatgagcttgaagtacagtatagcattacatgtttatttcacttgagtgaaattagtattactcacatacttgtgtcaattagcaggcagcatttagcatgactagcattaacctagctagctggtgtaaacttcaaactagacttgtaaactttaagtattaacctagctatttgttctttgtcagaaacttccaattgcataggcactccatcatggtgatggaggcggcggtggtggtggacatggtattttagcacagattacaattgaacccatgcattcccggcgattgggctttggacgaatcacctaaaacccgccttcctgattaaaacgcacaccacacaacacaattttagaagtagcatatgaaccttatttgttggattagcttgaaaataaactggtccaagcctacctgctagaaatgctgcccaaaagtactatacacttgtttaaaataaatctttcgatagaaacaaaatgtaattcttcctaggaagttagaattattgaagcataaaagaaaaaattcatttcataacttgaaatgaaacatagagaaaataggctaatggcccttacagacatatatacctgcaccaagtcccagcaaagcagttggcatagcaagaaccactagaaatactagcacaatcaccaaaagaagagactgagcagatggccttagctttctcatctctttgtttcttacttccacagttgtattctagaatcctgataaaccttcaccttatctcttagtaataactggtgttgcattgcatattgctctctctcttatatgaacagtccagggatctttttggatatccaattaaaaaaggaaaataaaaattatcttatactatatgtggttaggggcctgttcactttgatgaaaaaaaaccttaccaaattttgccattgccgaaattttgtcaattgtgctaaattttggcaacttgccaaattttggcaggatttcttatatagttatcaaaatttgacagcaaactaaatatagttatttttttggcaactttaacaaaatttggtaagcttgaaaatagcataaaagtgaaggcataggagttggaacttcccgaaagcactcactatcgcatgggccctctgaggttacactttgatcattgactgatttgtcattttaccaccaaaaatctaccgtcccgttcctttaaaaaaatctactgtcctagcgcctagcgtattcatgtgattctaggcggatcttcccctagcaggacaagtggctacccaggaacttagtgaataattaccccatcaggaaatggggattgattaatccacccacccatttacctgttaacgagaaaacaatagcaccaagtgcataaacgggtgtgggtatggttttgtaggacctacacctgtaaccaacccaataaataacccttatttcatatacagtaaaatgttacttggcacaccggcattttgtcttgctttttgtggatctggggctctaggttacccatcatgtgcacttttacccgtgtgaatgtgggattgagaaagaactacacccaagtactccctccgtattctaaaagaagtcgtttaggacaatgtttaagtcaaaccttgaaaatataaatcatgaataagtctcaatttgttgagtttgaaaatataaaaattatatgaatagatttgtcttgaaaaatactttcataaaagtatacatatatcactttttaataaatatttttacagaaacaagaagccaaagttgtgttttggagaccgtgtcgctgtccaaaacg

SEQ ID NO: 7586 - DNA, 18820 bp, Oryza sativa
caattgggactaaagatcgatctttagtcccgggtatttgaaccgggactaaagataacgatctttagtcccggattggtagtcccggtttaaaaaccgggactacaggggggttacgaaccgggactaaaaagcacttctccaccagtgtccgcatcatgatgtcctcctcctcgctcaccaccaaactcgatggcactgtctctaccctttcccctctggtcgttgcctgtctcccagcttggaaagagatggggaagtgaggggagagggaagaatagaggaacatgggttggtttgtgacatgtgggcgcatacgagtcccatgctgactcgtcgtgttgactagagttaaatcgctacgtcaatcaaaaccaggcactatactgctatggaatcttaggtacaccggtttttcaggttaagaaaaatgttgtatctggtgttgcgattttttaggatataattcaaacttgacgtcaagatgagggatctacaaggaaattattcctttgcaaatagcaatctccttggggcaagggatgcataggatatccaagcaagagtagtataactgggcttggtttatgtagaatgactggtgcagtgacgctgaacaaatggtcctgatttattttttactgtcagttacctatatttatgcaagatatgtacataaggtgtataagcataaacttacatgatatggaaatacaatactaaatgtacaacgaatttaaatgcattgtattggaatcggtctagattgataaaataattgataagtaaaaaagaacaactgacaaatacataaccatgtaaaaaagtagtaggacgatccagttgcgtaactacatctactattaatttggtcatggacaatcaaagtacgccaattaatagtcggcaatagtcctgaacaatcgaagtacatcaattaatagtcgacaaattagattcactgtacctatgatattcccttcaagcttttttttaataggaaaaagaaacgctgaaaacaatacgtgttgttctatcagaagaaatgtgatggcgacctgaggccactgctaaggggaaacaaactccaaaaacataaactgatataaacactaccagtagtaacagatatttagatttgtagccccaaaatatatcactaggggtgtgtttaattttcacaaaattagaagtttgatttaaattggaacgatgcgatggaaaagttggaagtttatatgtgtagaaaagttttgatcagggccggccctggccctatgcagccgaggcgaccgtcgggggcccatgatggtggggggcccatgatagtggggggaccaatacctaatactagtagtctagtatctgtctatggcctatctggaagcagaaacgccgaaacgagaggagttggagtgttgtcgccttatcgcccaatctgagacactattgatcttaataccgttattgatggttttgcatcaagaaatgcccgaagaagtatcttttcatgagaagcaatggatatgatggggttcttttcttcattaaggtgatgattagttccaaggtataaatatattgttgttttggttgactttatttctcgataattaccagacatattaaatttaatatatgaaagtatttattttcgttttgcaaataaaattagcgtctatatatatcataaaattttatatatatagcttatagggcccatcgcgataagttcgcctagggccctcaaaatcataggaccggctctgttttgatgtgatggaaaagttgaaagtttgaagaaaaacatttagatatgctcttgtctatatttattgtatcaggaaacgtcacaactttttatgggcggaggggtagctagctaaccgatagtgtttttattttaattgtcatataattggttgatatcaataaaactattcctacattagtatatttgtatattgtaattgtaagtttgtaaccggacagagcatctgaccgaaggcatcgatccgggcaccccacactggctgtggcagcctaacaattggtggagaatttgtgtctgaaattacgatcatgtccctgcgtgatgagacgacgatgcaaagcagcaaaggtgcaggccgccgaggaggcgacaaagcacgcaggcacgtggaccaccgcacactggagaatcagcggctgcacgatctgaatctgagatccagccaaactgtcagtctccatctcaaatctcatctcgtgatccatcgtgcgatcataattaagtacgttaatctaatctatcaatacattactccattatacatatgctcccagctggcctagctcttggccttttttatacaagtcaggtgcaaagcgcgcgctcactcagcacatatcattcatgggtagagtagtagtcaatgtctacacgtctacactgatgaacacatgacaaagtttggttttgctctaaaacacttaaaatattttgtttttctttgttgatggacacttataacataagaacaatgtttttgaactcacaaggagaaatgaaaaatagccattgctgagggagctagttcacggtcgcggcgcagtagactcgcatgagaccggtagagcggtctcggagtaggcatgctctaggtgacgaagcaagtgtgagaaacaacaagatggataaccccttagcatgtgttttgttcaagagtttggatagatcgggttagctaggttaaatccatttatcagaatgttaggtttggggatatgcaagataagcgttggaggattaccctttatcgggtgctgaagatgatgttgctggggttactcagaactgcacgatacagctctgtgttcatgaaaagaaaaggatagcatcaatatattctgcagtgctacatacaatccatctccttcttatatatactactgatcctcatattttatcccaagaaatatatacaaaatccggatgaacagggttctaagaaaaaactctgccaacttagcttgggtcttgttttgatcgcctgacacccatggatttgtttaccccattttcgacactgtgcagatcagatcccaacaaatgcatgccattcaggagtacgatctctacttaaacaaaaggaaaaaatcaggatcggagctgtattgctgtccgggtttgtctgtttctctgatgctgcgttcgatcggctcgcgtggatagaaattttcagcccattcaaaacgagagtactcactagcgcataattaattaaatattaataattataaaactgaaaaacgatctatttaaattttttaaacaacttgtacataattttttttaaaaaaatatatcatttaacaatttaaaaagcgtaatggaaaatgagaaatttgaattttggatttggagtaaagaactgggcctagtataattcgtttatagctctatgagttcaggtcagctattgggttaccgttcattcaaacctggaagacattttgatctcttcaggaaatttataatcttcctatctaatctgaattagcatcacactcaacttggttgcatttgatgcggtctttgccttctgaacagggtacacggtaagcactaggctttggctttggatggtgcccacctggcccagcccacttgtaccaccggatctaaatccaacggaccagattggattggattggattggaccagtagggtacagtacttaactgaaatgtgggggtgaaagtggttaagacagatcaccagatcctccggtccatgctggtggggcctaggaagcaggcgtgtgtatcgagctgactgagctgtgggccccatggcttagatgctattgctgcaaggtgataaacccataagcacagtcaacttcgcttaagttaagggaggctaaagcaacaagagatacgctaactcggcattttctgatgaaacccaaatatctatggcagtgtttggcaaatagaaaagggaaataatttttcatccatctttaaattctaagcatcaattattccattttcatttaatcctaaccttttattcatttcctaatcccaattccgccccccatttcccattatccaaacacacctcatataatcaaaagaaaaaaaaacatattgcctactccatctcaatttgaagctgcctactccatcttaatttggagctatgttaaaaaaaagagagatagatttgtagggagaattatccctccaaacattttttaagaagaaattatgagcatgttgagaattgaacacatgacgttagaattaaaaccacataccccttaccaccgcactatcaaatgcatctatagaaacattccatgtccatatatatccacaaaatctacgaacaaattggtaaggtctactcatagaacatttcacatttacaactttagtcattgattgttgcagtcaacatcctgccatacgggcagtgacttgaggcagggtagagatagggcttgcgcaccaacaaacctcaacactatatttgccactgcatgctcttcagttatgactggtagttcgttttggttaggatcaaaacttgtcatgaccaggaaactagggaggatatatcgtagcaggattgtgttcctatatatataagacccgtccgatctcgttaaatcatatgaaactcttacataggatcgggatattaccgaaattaaaataaatactaggatcaatatcgttccttgtttgctacgaaaatactacgatacatatcatacatatcaaagatactgacaaccttaagattgaggacagagctcttgcaacgccccctactcgtgcaatctacatcccttctggtagaggcggagccagctctcggacaagtcaggtagtcgcccaggcttgtccgcttgtgtctttactacagataaccatcaatgtctgagagaattggttgatcgtcaaaaaacggtacccccctcgttcgaaaatataagcatttttagcatagtgcaaagtcaatttttttaactttaactgttaataacaaaaaaacaaacaagatcaataatgtaaaatcgatgttactagatttatcgttaaacaagctatcataatatgcaacattttttatttaaaatattttatttttatagatatgttggtcaaataagcatctcgaagactgtgttgaattctttaaaaaatggttatattttagaacggatggagtattatggcttgtttggatcctccgagctattaaatagccctctggatccaaacaggcctatatagcgcatctgtgcttcgggatcctgctggctcatccactgccttccggcgaacttcggcaggcgacggagctacggagtagctagctagcagctgccgctctccggccggccgggcggcgacagaacacgcatgcacgtggaactataaataaagccggcgacgatctgaatctgagatccagacaaatggatgaacaggcatcacctcgtctcacgtctcgtgcagatccgtcgctgagatcaatatacgttgcctagctagtggctaatatttaatttaatctagtgtctaatactccctccgtttcaaattgtttgacgccgttgactttttagcatatgtttgaccgtttgccttattcaaaaaatttaagtaattattaattctttttctatcatttgattcattgttaaatatatttttatgtaggtatataattttacatattttataaaagtttttgaataagacgaacggtcaaacatgtactaaaaagtcaacggtgtcaaacatttcgaaacggagggagtatttaatttaatcagtgattgtaatttagtcagtatgatcgatcaggcatgttatcttatctgtccggactttgtcaggtattattttggtttcctaataaaataaatgtattattggttcaggtaattcgatgatctcatcccctccgtccaggcaggagatgattatacacgcgtgcatgtctagaatatctcgccattttattatatatatttctcatccgcacgtaaaatgggcaaaatgttttttttgtgcatgtgtgatgtgaaatatgtagttgttggacatcattattgttaattaaaacgatcaaaacataaagcagaaacattttagtagttgagatgagatatttggagtcatcaaaaagagaaaaaaaaacgtgatgcatgtattggttcgataatttaactattttgattctcttatttataatcgtcgtttagcaatttgttctataatcctattattgttatcagtcttgttaatgtgatcattaaaaaaatttctaatcctctctttcatctccagttctccactggagcaaagcatataaataatatcccctgatcgggccactgtcttctgtctcaccatccgcccttcatatggtaggtagttgatcatgcatggggtaaggtgagttgaccacattcaccattagagcaagtttaatagtatagtcaactataagttccaaatcccatctatagtcaattcatatagtagttatctataaatatatactacactattaatacatggtcccacatatcatacatacatggtgtctgagagtctatgctgtagctggctgtaaatctgtagccctctcatcttctctctcctcttttatattttcgatatgagtttatagctgacttatagtagggtcatcaccacatgataatatttttcatcttgtcagtaaaaaaactaaatttgccgcgaaaccatgcattagcaatgaccttgcacttaggcttgcgatctccgaagccacccattgtgcttcttatatggcttaacttctttcttgaattttgttcggttaatcccgccctcaaagggattgagggcttatttcgcggtagtctttctccaattagacttcccaaataaaactctccaaacacccatatagctagctctataattggtttcgcaagccaaacttgttgctcactccaacaaactgttcctctactttctctactctgaatttatgacactaaggccttgttcgatcttccattttagagatagattgttgatacacgcaaaacgagaaacctcattagcatatgattaattaagtattaactattataaattaaaaaaaatagatttatttttttagcaacttttttaaaaaacacaccatttaactagttgaaagaaaaacgacgaaattgtagtttggagttgaagaatagaacagggcctaagacccatatgttagcctctaccctctcccccctctttctcctctttctccctctctccctcttctctcactggggccatcccagagctcctcccggcccactccctctccgcagcgatgatgtccgtgcgaaggtggatggtggtggaggatccttgagtgcgaggtaggggtggctgacgccgaagaaagggaggtcgtcgcccgtgctatggcagcatcattggggcgacaatgagcgggaggccacggcggtgaggaggcacgtggaggctgtggctacggagtcaagggagaggccactgtgacagagtcgagagagaggcgctctcgacggtgccggttccgccgctcaccttcccgagttgcaacctttaacattgctctcgaatggaggaagaaagtgaatatgaggtagtgggacccacagaaggtgtgtggattgtaagtggagtaagttggccaagtttgacgagttaaggagtttggccggccgaatagtttggagagtgtgatggagagactatatgaatgcgattttttttatccacaagtgctaatttttgtcttttaaagtgggatgaagatgctctaacttaaaaatacatttttgcgagacaaatcgataaagctttttttaaaaaaattttgacgaagggagtatattacttatggcacatttcaaatttaacgaaaatggagaacaaacttccgctgcgcacaaaatgtgcttctcttagttcatgaccaacaatatccctaaatgaaacccaattctaaaattgaggtttattttgtgaaaagcttactcaacaactcccctagagatgtatcaaaaaattagaatcctcttctcctcctttctcgctctccacaagtcgagagatactctcgctccaaatttccgcatggcgaaaggagtgggtgacaagtggagagatcgtgtgcgtgggaggcgatgggcagagcaattttttttcgtatctgttggtagttagggggtggttccattttttattattagaagttagtttacaccttaaaatcaaactagaaattcaaaaacataattttagagataaatttttaggtatatcttgggcatattaaatatttaggtatatcttgggcatattctttggtactccctctgtcatattttaagtgcagccatgattttccgtgcacaactttaactgtccgtcttatttatttttttaaaaaaaattaaaatcataagtgacgtaaaagtactattcatatttgggtgaatagctaattaagtccctcaagtttcaccgaaggctcaatttggtccttcacgtttcattttatccacatagctcctctaaatatttgttttggcttgacatcatacttgggcccacttaatatgccatatggctatttttaagtcaatatttctattagaaaatatcccttttgcccttaatttatatacaactatatactaaaagggagaaaaccaagatgaataaacaacattgcatatatacttcccattatttcaatatgtgcacatgaaacttaagcaattactatcgtatacacttgctagtacataatttattttcgttttacataatttactaaacattatcttaaaaaaataaagcatacaaattttctcttatatatgtgaatgatgggggtataagtgtcatttatcaagagagttgttggtttaaggataagtttgaactaaaataaaaacttgaatgagtaatatggatagactgaaacattaagaactaaactgagctttggatgaaacttggaggaccactttagctattcacccttcatattttatcatcttataataataaaaatactaattataaaaaaatttaaataaaacggacgataaaaattagacgcaaaaacttataactgcacttgaagacaggggagtaccggagtgccatttaaaattgggaaaacggaaaagtgaaatattgagctgaatttccgggcgctggggagtaggggggtcaaaagagtcatttccgcgtatttctcgcccgttcgccatctcttgtcgtgtagtaccgccgaaaaggaatttccctttccgcccctgcgctgtgcgctccactccactacttgagtcccccatccccagactccgccaccaccacctccggctccccaccccgaccagcggcgccagagcagaggcagtgaggccgagctcctcgcctcgcctcgccgtctccgcccgcgcggcgctgccgccgagccgccgccggcctcctcctcctcctccttcccggttcggatcgggcccaaggtatatgccactcgtcttctctccctcctccccgccgcttcatgagccaccggagattgccttgaggggatttcttcccgctcggatcgacggatccagtcccgtttcttccgggttcttgcggtgtagagtcgtagtcgtagtggtagtgttggtagcggcttgtttttcgagggagggatttgggggggtttggttggttcgggttcttggggagggtttagctgaacccgtgaggtttctgaggtccccgcctgaacagatctgtggtgtctccgtgtgggagcatgttttgctgcgtgcgtgcgtgcgtgcatgctagccatggattggtgctcacgccgcatgcgtgagctttggggggggggggggggttcagttgttgttggattatgtgagcgagaacgcatgatacgatgcaatgccgcggtcctttttgttgtgatgggcagcctcacagcatgcgtgctgcggcattcacatggacgtcgacaccgtgtcgattctttttgtgtctcttgttgtgttgtgaaatttttcatgaatggtgcaaggtggcggttggtcttggatgtggatgttgagctgggaggatcagttatcctacaaattgcatcttagtagtacatatgttgacatggcattactgattcaccctcctttttttgcttctgcatgtcattgccctgttaccccttaaaataggttctattatggtatacctatccagtgtgcaagaatgatatgcctttgacattgttgcgtcatctttacttggtactttagatggtaaaatggaagtgtgatggatgtaactgtgtcaatacagcggagaagatattaatcaataatcatgtacatttgttgtttttggcatcttctcatgtaaaatcttttgggtctgttcttgttatgtgcttcactttcacttttactgttttttttttaattttcaagaaacatacagcttcagtgtggtgattgataaaaatcattactctaactaattctgttttctcctcgaactgttctgttcctagagccggactgcagccatggcagatctgcaggagcccctcgttcgtccgaagaggaagaaggttttggtggactacttggtaaagttccgatggattctggtgatctttgtggtgctccccatttccgctctgatctacttcaatatctatttgggcgatgtctggtctgccatgaaatctgagaaacgtcgccagaaggaacatgatgacaatgtgcaaaaagttgtgaagcggctcaagcagaggaacccaaagaaggatggccttgtttgcacagctaggaagccctggattgctgttggcatgcgcaatgtagactacaagcgtgctaggcattttgaggttgacctttccgccttcaggaacattcttgagattgacagagagagaatggttgccaaggttgagcctcttgtcaacatgggccagataaccagagctacatgcccaatgaaccttgcccttgcagttgttgctgagcttgatgaccttactgttgggggactgatcaatgggtatggtattgaagggagctctcacctctatggtcttttctctgacactgttgtcgccgtggaagttgttcttgcagacggtcgagttgttagagccactaaggataatgagtactctgaccttttctatggcattccctggtcccagggaacacttgggtttcttgtttccgctgagatcaaactcattcccatcaaggaatacatgaggctcacatatactccagttaaagggtcactgaaggagatagcacaaggttattgtgattcgtttgcaccacgagatggtgatcctgcaaaggtcccagacttcgttgagggaatggtgtacacagaaaatgagggtgtcatgatgactggtgtttatgcttccaaagaagaggcaaagaagaagggcaataagatcaactgtgtcgggtggtggttcaagccttggttttaccaacatgctcagacagcactcaagaagggtgagtttgtggagtacattccaacaagagagtactaccaccgtcacacccggtgtctgtactgggaggggaagctgatcttgccattcggcgaccaattctggttcaggttcctcttgggctggctgatgccaccaaaggtgtctctgctcaaggccacacagggtgaatctatcaggaattactaccatgacaaccatgtgattcaagacatgctggttcccttgtacaaagttggagatgctcttgagtttgttcacaaggaaatggaggtgtgtttcacttcggatcgaatatttgatgtttaagtatcaaatatgcatttaaaacgaggcttttcaattatataactacttctagaaatgaatattccatgccataaattgttatgcttgcacatgcattctattacttatatctttgggcttgatgtaagttcacctaactattcttgtgcctgtaccaactattttagtgtactgcaatctactgctgcttacagttcactaataatttctgttattaggtttatccactgtggctgtgcccgcaccggctctacaagctccctgtgaaaaccatggtgtacccagagcctggctttgagcaccaccacaggcaaggtgacactagctatgcccagatgttcaccgatgttggtgtgtactatgctcctggtgctgtcctgaggggcgaggagttcaatggcgctctagctgtccacaggctggagcagtggctgattgagaaccacagctaccagccacagtacgctgtatctgagctcaacgagaaggacttctggaggatgtttgatgcttctcactacgagcattgccgccaaaagtatggtgccgtcggtacctttatgagcgtctactacaagtccaagaagggaaggaagactgagaaggaggtgcaggaagccgaggccgccatcctcgagccagcctacgctgatgaggcgtaatttcgttgagacctttgatggtttagtcgtccgggttttctccccattccaaatgggatttttcatctgaactatccttttgcttagaacttgatgtgcagtgtttgtagcactttgtaatcctgtcatcgtcgtccgtctgctcttggtacttctttcacccttgatcaagttgctgaacttagtcaggacttaagtggtatttaacccaagatctgaataattttgtggctactggactagttaatttcctcagctattaatttgagctgtagcatcagatgaggtgaactttagcaattgagctgctgtttctggtgtgtcattattcgtcaagaaccttttctgttcattttaatatacttgaactgatcaccagtcactatcgcactatcgatattgatcatgaaaagcaagatcttgaggaaaattgagtgatggggttggggccaaaattgtgggtcgttgcaaaggagtactgtttgatccacaagaggataagagatgatttgagggaaacaggagaacagtgttgcagacgtgaatgggatgcatgtgctaccggttatgttctgttacatagaagatggtacatgtaccaccgctttgaggctcttttcttccccttgtaattcgtggtggggttgaattgattcctgtagaaaataaacgctgctcaccctttcgtttaattctcccaccaagtggattgaacgggatttgaagagaaataataacacacatcttcctcaattctctccaatctctttcttacgacaatgccttatgagatacaatggcgttctcttttgaaacaaggggatttctgattcatgtgacgaggtctctgtatcggagtcctaaccattggtgatggaagggacaagaaataattcttcatatatataagaaaaaaagagaatataagtggttccttttctttatatatgaaattcgattatttcatttgtgttcgcgtttgagattttagttgtgacttgtgagagaggccccagtcatctccattccttaggggttccccaattacacatcaaccacagctcattccttttctccaatcataaataaactataatctctatatttttctttcatccccattctcttctttctaattaaaatagaaacggcttgaaccatactcttagtatttttaaagttctacattcaattagggaggtagagcttggatatggatttttcagaacttccgcttggaggaaatggacgcttgattgcataatttgattgcatccaacaaattttagtaggccatgagtaccttttctttataggaaaagctctccttttgccattccttgaataccgtattatctctttcaccatcattttcttaacttctttctttcgccactattaagtggctattcagttctcttttgcgaccacaacctaaaaaattcctttctttcctttcttttttttttcagaatattatctttggtcaaagtcagttgaccattgcatatatttctcctaaaagaccattatgttctcatgtaactaaaaattataaggatattctacaaatcaaggaaaacatgattattaatttagtttttaatggatgagtaaacactttatgatatgaaaatttttagttagtttgcaatgtctccattcatagcttaaatgaaatatttcagatgaaaatatctcgtatatccacatatatgtattgcagaactatgaataataacaatgaaatagcaactataaattattttatgaaatatttaaaaccaaaaaatttccatgttgcttttttttaaagttaatcccaattagtttttctaaaaaaacatatttcaagtgcccaaaatttgtttccttgatatttttgtggcattcgctaaagtttcaagcgttattttgttttggaacatctttaaaagaaaaatggtcttccaaaaaaaaaggcagcctaggaggagatgtgacctcacagtcaggtgtcatcgacaagacgaagataacaaaacaaaagcgcactaccggaagaagagtaaaagagaaaaaatgacgacattaatttgagagaatatggtttcaaccgaaccacgaaaattgaaaaaagaaaaaaaattctcttctttgtatcgtgtggacaattataaccttatagcatttttgattggactccaactttaaattttaacttaagagtttagatttagagtgaaattgtgaagcagactaaacccagttttatttctgcagttcattttatgagagcattcttgctagctccacttctattttacgtgaaatcgaaacattttggctgaaaaaaagaaattgtttggctgtgggctctacctcaggagagatgtgtagcttagagctcggaggtcggcgtgccagccaaacaggaccttgaaaccaaaattattaaaatccggtgtaatacgccctctcgcaaatcccatccgttgctccgtaaacggacggccaggattcaaccacggcaaacgaagcctcgcctttatgaaacgagagaacgcaccacccatctctctccacctcctcctcctccctctttctccgcgagagagaggccgagcagcgaccgcggcggcgctctcccccctcccgccgcctccacccaccccgtgctcgccggcggggcgaagcctccggtgacaatccccgatccgatcgccgcgctcctctcctctacccccatcccctcctcctccgacgcctccgcccgcccgccgccgtacccgtaccaaccggaaagcgcagctgatccggtacgaaaccctagctgatccccgatctggtgcgcgcgcgagcgcgcgagatcttctggtgggtttgcggttggtgattggcctctctctctcttttaccctagtcgatctccccgttcgtccccttgacctcgagttcgaccgccgcgcgccgatctccaatcccgcgcgagcagcgggcgtctgtgcttccgcgcggaatcctcccgcgccggtgaccatccgtacgaaatcgcacgtccttctcatccctaggcacgcttttcggtcacctcgaatttgcgttaaccctggcttctcttgtagatctggaagctttttctatatgcctttaccatactagtaacaacagacactttgttccctcacaaaattcatagctagtgctggcttactgcaagacgtacccatattatgagattgtttccaaaaatccaaattactgtgattgcaataatgtaaataaggagccatatcagaaattttcatcgaaactgactggccatttcggacgcgaattcgagggcctatagctgcttctgccttgcaacggggaggagcatacgattgattggaaattgatgtggttgcgagaacgtaaatgagtaaccatgtgggaagtttttactgaaaatgtttgagcataagtatattttggctgcgtggtgtctcttggtggcagtcttgagcttatctgcagtagcttatcctttgaagctgaattgttgtcaatatgttaagataccagctgattaatttgttgttgtcaaaacctgctttggtccattcacaccatgtgctttaaccttttatctcataggttttactgagaaggccaaagtaaacagtgtgcattttcctgttcagctgtttctattcatcgtttgttcttattcctatcacttaccaaacatgtcaattttagatggatctcaaggatagcctctccaaatttaagcagcagcaagagaggtgccaatcatctttggccagcatagctgcatcgacctcaaaaccaaagcacagggcccaaccggttaatgctccatccgctccagcaaggccactacaacctattaagttttcaaatgatacagaaaggctacaacacatcaattcagttaggaaatctcctattggagcacagatcaaacttgtcattgaattgctgtacaaggtaaatctcactaagctacaaccttgtttcattttcctttccataatagtataaacaggaatgttcccccagttctggtatgtaatgtcttccaatgatcctgcaagtcaccatgttgattgagtttatatgccagtaaatgccaatggttctgtataatctgttaccatattagaatattatgcccttgattagtacttctttttttttttggatcaatggagcctgaattgttaacatattatatgagagtgcataagacgtttaccttttgctttgttctgttatttatcattgtttcacaccccttggtgcatgcaagatactcagccagcaaattcagatatgcaaaatttggtgccttgctgcttattctgtgttcaacaatgatgtgcatgttgatatctggttaaagatacaaggatgcattgacaataactattataagcaatatgtgaagtacacatttaatttgtattaatgctgcatacagtggtgcagccaggattatatgctcaggaagaaaatttgtaagggacaacccatacaacttgtagctacaaaagttgttaaaagtaacttatgtaatttatagaatcacagtattaaagagcactatgatgatttccgcgctggtccattttctgcattttagttatagttgtcaaaatggtttaccaatgtcttcatgaatgatagcaaaacaaatgttttgtgaacttccttataaatagcaatgctgtattgcgtattgttgttgtaactgagatgtcttcaaaatctgcagacaagacaagcttttactgcggagcaaataaatgaaacaacttatgttgatatccatgggaataagtctgtctttgacagtctgaggaacaatcctaaagtacattatgatgggagacgtttctcttacaaggtaaagaagtttgttattccagtaactactagtcttgctaacatcaatacttgtttcattggtatatttacccaattgtctatccttcctacctgaaataatattaatggctctcatcctatgttccccactaaacataattaattcagaagtattgcttaatgccttaatatcatattgcatttcgactattaatcactggtgtggcaagctaaacctgtcatgaccatggaatttgtaattgataatgaaatgtttttctttaatgcttgtttcggggaaaatgatataatgatgacaattatttatgggagaacatcagaaatgtttagtcttaagtttacataggcttcccatcttgtttgaagttgatttacttctacggtttcacgcgttaatcattgttgataaacgtgcagtccaagcatgatttgaagggaaaagatcaactacttgttttggtaagaaagtatccggagggtcttgctgtggtggaagtcaaggatgcgtacccaactgtaatggaagatttgcaggtgagccaaatttcttacattatgctttgaggcgatgtcttagatattactgttcttcaacgctcaccattttagtttttaattggatccttttttgtcctccctaagatgctgaatacttttctcctttcctcccctgagtttctggaatatcacactgagggtgtgctcatttcagtagttaggatgggctgattaaccgcacgtaaaacgagaaatgtgattaacatatgattaattaagtattaatatataaatttttgatgaataaatttgttggatttttttaaacaacttctttatagaaagttttcgcacgaaatagaccgtttagtagtttgaaaagcgtgctaacggaaaacgaggagaatctaatcctataagctgaaacgagcgcatcctgagtacagttaatggtagtacaagactggatttatctgccaattattgctttacgtccattcttttggtaaaattcaattggcatgatacagttgaaatatacttacgccccttacagaaagttattttaggtcctatgtcttttcaatgtgtatccatcatgaaaatgatgtctgtgtgaactccagaaatttccttgcaatagtaaaacagaaatgtataatattgggagttcagccctgcaagatctttgtccataaagctgtccatagatgcatttttaaaaacatttcttgtactcttcatttgtgccattattagatacttttggccttatttgcactatgtaggcgtattgtcccgacacagattagagccatgcaaatctagtagtcaaaatgtgcgt

SEQ ID NO: 7587 - DNA, 2190 bp, Oryza sativa
acgcccgattgagatagattaatctctatcggccgtaaactaaggcccgtcaccgatgactaattttccatctttcatttgaagtttttgtatttgtgagtgcaaaatatatagctgctatgtaataattcattttattagctataatacatattcggatactaaatgatttcaaatggaaatatggtcaacaacaaagttgtagagcctttcaagatctacaaattttattttggtcatttttctatataacttttttcccaacagcttgaaattgaatttgaatatatgacaaatataaacagcaattgtaaatactaaatgatttcaaatggtaatatggtcaacaacaaagttgatcctctcatcaagatctacaacttttcttttggtcatttgtaataaaacaaaattagccatattaatgactacacatatcaagtctttgcaataaaacaataaaacaaaatactccattcattacaatagataagtacaaatgcatcagtcacaaggttatgccttccgtatgatctgaacgagcatatgccacaggctcttggggatcatcgtcacagtcaatgtgaggtcttacatgaagattatggttgtattcttcttcatcgacgacgttgtcaactcctacaattcggcgctttccatccctcacgatgtgcatcttcttgtttgaagggtcttttatgtagaatatctgctcgacctgtttcgcaagtacaaatggttcatcggcgtatcccacctttgatagatctactaaagtgaaaccttccttgtcggctttgacaccagtgcgtagattcacccaacggcagcggaacaaaggaaccgtgaacttgacgtagtttagctcccagatctcctcaatgcggccgtagtatgtgtttgacccaacttgatcctggaatgcatctatacggacgccgctgttttgcactgtgcttttgtcatcttgtttgacggtgtaaaatgtgtatccatttatatcatatccttgccatgtgtctacggtctaagacggtcccatccccaacaactgtactgtctcatttgggacatccgtggacattgtcacacgattcttgaaccattcgttgaaccgagaattatgttctctgttaatcaatgcatcagatcgccccaagttctcatctcggattttcgctaagtgctcctcaaagtatgggccaacttctgttatatgttggagcacaacgtaatgagcctgcgcgtacgacgtttgatctggcctaattcttttccttccgattgtgccaacacctgacaaccttccctcgtgacgagacgcaggaactccgataggatcggcatcggacatgtaattgacacagaactcaatagcctcctcggtcgtgtaaccttcaatgatgctcccctcgggtttagctctgttacgaacgtacgacttcagaactcccatgtacctttcaaacggacacatttcccttagaaaagccgggccacatagttttgtttgcttcaccatatgaacagggagatgaaccattatatcaaagaaagacagtgggaaaaacatctccaggtgacagagggtattcacaatatcggtctgcaacccatctagatcttctggatctataaccttctgtccaattgcattgaagaaggagcacagacgttggatcgtgtgacgcactttcggtggtagaatgcctctgatagcaactggcaagatttgtgtgattagcacgtggcaatcgtgagacttcattccaacaagttttagatcgtccaatttaacatacttacttatcctcgctgaatagcccgatggaactttaatatccttcaagcatgataacattgcgatcttctcatcctttgacaatgtgtggcaggctggaggaaggtacactctacctgtctctgcatctcgtatgggctggagttcactgcaaatattcatgtcctgtagatcaaggcgcacgttcaacccgtcctttgtcttcccgggaatattcaacatcaggccaaccaaactctcacacacattcttttctacatgcatgagatcaatgcaatgacgaacatcaagatctttccaataaggtagccgccaaaatatggattttttcttccacatacccttctcctttgtcttgctacgtttacttttcttcccaaactcat

SEQ ID NO: 7588 - DNA, 31340 bp, Oryza sativa
catgtgggcacacaaacgagcaattggatgcaaaagttatttaatcctgcacagatatgcaatgatactatttatttctacatgaataaactaatagaacatcttagatgataatcaatttgagaaaatcttaaaaaccttatgagatgattgggatggagagagtaattggcttaggggtgacaattttcatgttggagcaggggacgggtaagaatttttatctgcatctgagtggggactgggggcctcgcaaatatgcagggacggggatgggggaggggtttgacccgctggtcacccgcagggccccgggatagcctatttcaaggcccagccgacccattaagggaaggagtatataactatgccctaatttcctccacaccattcaatcgccaacttcccaccccagccaacgagccgttggagcgctgctccaggagggaatgggggattcgggtctagccagggcatgcgcacctcgcccagagctcggctgccccggcagccccgtcgccgcccctagccatcgttaattcgtcacctccccacagctgttgcaggccctctccacctctagcacgtctttcatcgtctcctttcctaacgtcgtcgccctccacctacgctcgggtagaatgcatgtgcttccttcctgcggtgccactctcctccgtcggcctctggatctggatcaccactgctaggggctatcaccgtcacggccaccgccccacctccatctccaccacccagccctgctgttcaccgcccttctccgcgcaaccgcgcctctctctgaattgctatcagaagcaatttgaggtctatttttgtgatttataattatgttggcaatgcggggccatgctcacccgccgggtcctgtgcgggggtggaggtgggtgatgtttttcactcattgcctttgtgagggtgggggcgttccagcctagttcgcccgccccgttgccacccctaaattggcttgtttacatagactcaaaaacaaaaaaaattatataagtaggagcatctactttatgttaggttctatggctaagtaggaatgatataattttttttataaaactccaactaaatcttatatgcagttactcttagagaaacatattagctttgattttgggcaaatctacaaatgagtgatgaggagaaggaatccatgcctaaatttagaaattacaattatgcaaattttcgccgactttggatgcctattttctaataggattgttgtttgaataagttatatcacttcttttggtggagttgttatttgtcttccatttcattttatggtagctaagtttcggggctttaagccaataattatgtaataattggttgtagcttttgttgaattgaaggcagactttcgtccattatcttaagaaaattgaagcgttcgagtcaaaagtcacgcctaatttaaagtctagtagtttggaattcaagaattgtgcacaaaacacatgggttgattctctacttttttttaaaaaaaagaaaacatgggttaattctagtaatgcaaaattcatttgtttggcatgcaatacttatatcttatatgttcaataaatgaataaatgaataaaaaaataattaggtatatagaaaattatatttatggaatttaaaataaagtgatgggcgaactacgggagttgaacccacacatggatgattcacaatccactaccgagatcccggcaaaggattttctcttctattttttctgatgaatggacaagtttattagataaatagttgaaagcatgcagtctgttgcgagaatcactagctgttttgtaaaggatgatgcgttgcctcttcgccagcaagtattaattctcttagcaaacaatatattaacacaaaattaacatgataaggctgagtacgagagtgcacgtttcgaacccatcttattgacgtggaaaacgaggtaagtattgttttaaaacttaaaatagattaatattatattttaaagtaactttcctatattttttttcaaaacccatcatttagcagcttagcattgcgtggaagaaaaagatagaacttgggaaagatttgttccaaacaaagcctaggtctctaagttaattgtgtcatagtagagtgatgagccaccaaccatattaaaatcttaatgctcgtgattacacacagacggatgagtgttcaataggaatttaatgaggtctaaggatttatcattggattgccaatttgccatctcttgagcgtgtgagggcgaagtactacaagcctctacatgtatataggattatacgatgaggtgaaggagagaagttaggagaaagagaatgagccacatctcgtgcaaggggcaacctccacacaatctctaagaaaagtgaaagaagatgtgagagtaaattaatattggggtttgggtattagttgtgatatattgtacactactacgaaaaccatctttcgtggtggccattttgggttttcgttagcggaatttggagacaccacaaagcaaaggcaagtgaaaaacaagatcttcgctggcggttatcgactgctagcgataattcaatttcactagtagccgtcttaagccatccgccagcaaggcagcaaagatccattttcactggcggatgtcttacaccgactgccagcgataattcatttttgctggcggcatcaaccgccagcgaaaatctattttgggccaagaaaaaaagacccaatgcagctgccctagccaccagcaaagaggaaatttgaaatacaaatcatttacacagatcaaacatcatttacacaaatcaaacatgaaatacaaatcacaacataggcatcatctggaacaacatgcacaaaaaaaatcacatctagcaatggaaccctagccaccatcggccccgtcccctcccgcgacatagccaccgccaccatcggccccgtcaccgcggtcgcggtcatcgtcgtcagctccaccgccgcccgcctgccatcggtgccgcgggggccaccaccccctccattcggctagatctgggagaaggagagggaggggagggaaggggaggcgagaagccgccagatccggcagcgtcgtcgtcgtcagctccgccgctgcccgcctgccgtcgccgccgcggcggccgctgcccctccctccggctagatctaggagagggagaggaaagggaggggaggggatgggaggagctgctagatccggcagcgtcgtcgtcagctccattgctgccgcggcggccgccaacccctctgtcacgcccagaaattcccgaataggattccaagcagaatgtgcattaaaacccccgtccaggaccggccggggtacacaaacgacaaaattgacatacagatccacgtcttacaaacatcataaagccttacataaatgcaacggaaaattaaaagataactggagctaagccatgacttggaccgcagcgggatcaccactccacaagcatccttgacggcacggacgaagcctactcctcggagaagccaccatctaacgcatactcaaactctggggtttggggaaaatagagcaagactgagtactacccactgtactcagcaagtcataccggaataggggtatgatgcagggaattatcaagggatagttatagaggttcatttgcataaagcgagcatttataaacagtagttggaagcagtaaaacaattataataattaatcaatattaatcatccactgtccaacgctataccatgttgcaacaggcccaaccatccacctatactattcaattccattagactagactagggtgaatctaatcacggtgaatctggttgaccgcccataaccgcgggcacggctattcgaatagttttactcttatcagaggtgtacaactgtacacacaagacacagccccacgatacgttttcgtgcgccgacatgccaccacgacataccggatagaggccgtgataggacccttcgcataaccccctctaaccaagcacactacacctcaggtttcacccccactcctcgcaaggcagcgagcagtcccctctcgtgcctaggtgaatccggaagccgcataggccgtcgcagggcccatccaaactccatcacgcccacccttgcctggatgcgtcagctagaggaaagctacactacaagcccagccgttgcccacgctggcttgtggtaagtacgaggaattcttccagggtttcccgcgaactggtccttaagtgccatgggcgcgactagcaaaaccatgcacccacagcccaccatttaacatattttaatgaagcgacaccaggacggtggctctaacccaacatcaacactagaacctgaagtctatccattaatatgatttcccccattgtgtgctagttgaactaagcatggctaagcaatccctagtccaatatctaatcatgttatatcccaagctaacaaaggaacatggtacaaaatagcatggctataacagtaggtaaacatcccatggtaacagtataaaacaatgcagtatttgaaggaaaacaatggagcatttccaatataggatcaacatgttcaagtgacaagcatgacttgccttgctctgctactggaggaacctcggcgactatttcaaagtacaccggagcgtcgggagagccggaatctagacgacatagaaagcaaacaatacaaacaggctacaagactactgaaacagagaacaaaaccatttttaatggattctatacatttttcttgattactgagacttgaatgggcttaaacggagctcggatgaattagatatgattttagaagattcactgtatttttactataacagaaaaaaatccttaatttatttattgcgcaataaataaatcccgggagagagagagagaggcgacgccgacatgcgggccccacatggcagtggctgcgggcgctggtccatggtggatcgggtccatggaccggggaaaaggggcggtgcaccacgtggtgcacacgtggcgcgcacgtggcggcctcatggcagccacgcgggcgacgggatcggatggccccgatctaccgctcggtagatcagacggcggatgcggctcgcggccggcgtgcacgggcacggctcaagccagcccggcggccatggcccgcggcggcgcgaggcggcgaccggccgacggcagagggcggcggcgcagcgactaagcggtgcgggagagagggagaaaggggaggaggggcctcaccgacgacgatcgacgacggcgagcgacagagggtgatggcgacggcgagacgagctccgggaccacctaagggatcaaaagggatagtaatttgcccgtgctaccgctacggtgacatttaataacataattcaagcaacctgctaacgctatagtgacatttaataacacaattcaaacaaccaaaaatatatacaagactatattgcatagttataagatcaagcaaaaattaaaaaaactatcactatataaataagtcaatctgttctgtacaatctgttgtacgcacataaataagtccaaagtaggtagttctgtacaatatataaatactgtgcaggtaataactatcactatctttgaccagtagtgaaacacatattgtttgctacagatcaataacaaggcaacatattgcatacacaccatcacagttcgatcatcatcgatccattaaagcagtcatggtcagtgcaaggctagttttctgtaactcaagacattttgatcttcagaatatgtttgcacggcctcataaataaaggagaaggcatattcacaaatcttggaatacaaaggaggtaaacgaaatttaatttgttctatgacaataatctgaaatctataacactctaagtatgacatccaacaattatacgagaaggtagtcacaacttaaaccttgaagccggaacccttcattttgcttgtcatcgtccaatgatatgaagagattccttttgcttgtcatgttatcctgcgaaggaagtgaaaaacatgtttgctccattgtacccgatgcacagagaacaattttggatcatagcaactacagttatgtttgctccaagtttatccttgtcaatgcaaacatagtgtatttacttaccaacaaacattgtttcttctttgatttcatattgacaaacagatcccttgaaagcttgctatttgaagaggatatacgcctcggtccattcttaaacagtgaataaatcgtaagggtaacatatataaaaggctataaatttgtcataattttattcttttctctctatatgattcatgaatttgaagatatgattatccattgcactatccaatactctgtgaattgcatttgacgatccaatactcatgtgttcccagttgagtaaacacatgatagttctgtatatacaggcatgttaggcctcaatgcatggtaggtctgaaattagtataacggcagaaaaaatgacaaaacattagtttgacaattagcctataaatacgacttctctaacccaacaattaagagttactacaaagcttttgttgaggtaaatatcctctgcatgaaatgactgacaagtagtacttgcattatacacataacataatttgaacataattccgttcaacagccaagatgtggaggcggcatcaggctctccttcgccgcatctcaccgcttaagcatccagcgggctggcctgctagggggatcggatgctactacgccaccgagccggagggcaggaagccaaagacggctcctttgcaggtaatttctggaatatgttatctctaggctaggctcggtgcttgctatcatggcaaatccctcccttttgagtaatgaatgcaggtcattgccgaaatacgtgtctcttaccttgagagttttggcgacgagttgtatatttgtacgaaatatcagtcaggataaagacagtgagaacagtgagaacaacggactgaacacattatttaccactgcagctcaacagcataataagaatttctcataagcaagctatcgttttgtctgaattactactttcctacacacattccatagagatgctttgattttcagtggattttaacttttttttaatcgtcccaactacacttgtgggaaataacaaacttgcattatgtaaaagtttgacaatcggaatatactgaaaggcacccattctttggggtttcaagaaatccatgtcatcagacggatatagtaagaaacatccatactgaaatttgcagtcaaggggcatggtggataggttccatttgcgtgccaaaggtggtgatggcggcaatggctgcatcagtcttcctcgctccaggtcaggatcgccaaggcaagcctgatggtttaacgactcccctgctgcacagcccatggaattgtcacatggtgctagcagtaatctttttgtgtatttttttgtggtgtaataatgcctggtcgtgatcaacattagcctagatcttagtgaaaaggagtaagatctaggctaacttccttccccatctcacagattgttaattgcttacaaaataaaattcagcagcagcacctaagtagagtaaactatcagatgccctgtttttctacataatgcataacattaaatttatttctttctgaatagtctccagatcacaatgaatgcattggaaaatatgtcggtatttaatcaatctaaatattagttggccctaacacattgacctaacttaacacttacctatgatgagatcggataacgagtgattgacgacgacctgatggctgcgcggtggagacaggacggcgagcgatccgatggcggaacgcggtcagcgcgagggtgcgccggcggcatcaatctggaggcgggaatcgacggcggcgcaatggcgaccggatggagaacggacggcgatgggatcgagaaatccggatggacaacggacggcgatggagagaggggcggcacgcggcggggagagaggggcggctggggtcggcggcgacgtgaatcgcggcaggggcggcgtgatggtggagatcggtggcgggctggcgttgcatgagagggagagaagagagattagggctggggaggcgtgggctgggatgggggagggggcgcagttgagaggtgcgaggtggagaggatctgagcgttggattttacacagagatgatccgaaccgttccacgaggaatgaaagaatgagtgatgagtgataagtgaaaccatttgttcaactatagggtagaagatagatgagttagagagggagagggaaaccatggatgggtagggcggcgaccgaaggcgccggccatggcgaagctcaccggcgcgtggcacgggcggggttctagcggcggattactacggaggaggggtggacgggacggctcgcacgacggcgaacgcgacgacgtcgacggtgcggctcggcacggcggctagtggcgaccggagcggcggcggcagcggcggcggcggagaggaggacgacggcgctaaggcggtggagtgcacgggagcgggcgattgcaaaaataaaaagagagaggagggaacgtgtcacgcccagaaatttaacccaaatttccagactattttgcgtattaaatccctgtccaggaccagccagggtacacaaaacgacaagtaatatacagttccaaacgtaaataaagcgtaaaatacttacaaaagaggcacttagtcctcgcaccgaaacgaaagcagcagcagcggtaaaaggcgatcctagcggggcttcagctccactccacaggcaaaactcaactggggtctgagccttggtcctctaacttcgtcttcagctcaaaagcactacacttctgaaaaaaggggaataatagcaagactgagtacaaccaccgtactcagcaagccacaccaacgatgcagatgtgcaaggggatacaaggatggtttgtggctatttgcataaaggcggttgtaaaacattttattgagcaaaaccgtaaaactgttgagtaactaaagtaacattaaatctccactgatcaacgctacaccacgttgaacaggcccaaccaacccacctgtactacagtgcattgggtcgatttattaagatgggactaatcacggtgaatctggtcgatcgcccataaccgcgggcacggctattcgaatagttttactctggccagaggtgcacaactgtacccacaagacacaacccaccgacatgtcaccgcgtcatcatgtgcccatgatgcacacgtcaccatgtcgagtgattgtgacgagaccctccgcataaccctcccctaaccatccacaccacgctaaggtttcacccccacccctcaaaaggcagtgggcggtcccctcttgcgccgaggtgaatccggcaactggacaaccggacaccccggccgacccaactccatcacgcccaccctcgccaccgatgcctaggaaagggtcgagctatacttcagatcaagcagttacccactcccgcttgtggtaagcactgtaagtcttccagggtttcccgtgaaccggtccttaattgccatgggtgcgactcgcaaaaccatgcacccacagcccaccattcagtcacattttagttggataattacgaccatagaacttggccagatgtctcgagcacgcagctcaacaagatactagaatgtctaatactgcaattatcccatcgactgagctagtggtaattaagcatggctaagcatatagttctagctaggtcatcaaagtaacacaagctaggcgatttattacccacggttgacaaaggacagatatcaagtaaacatggcacaagcgagcagataggtaaaccctgatcccatgtaattagcaaaacatgcatatttatttgtaaccggtaaaacatttataaattgggatcaacatgctcaaggggaatgtgtgacttgccttgcttcttcaaaacaatcttccggactcttttcctcgcgactgcggacttccgaaacgacggattctacacgctagcacgcaaaacaaggaaaaactctaataaaaaccaaggaaacagtacataaaaagtaaacaaacatgtagagctcaattttagatgaattttgcaagttgaatggctcaattcggagtttgaatgaattagatatgaattttagaagttttgagacatttaaatgaatttctagaattattaacgaattatgacgcaattattatttatttttccaaaggaaaagagggttgctgacgtcatcaaaggggaggggcggctccggcaagcgggccccaccggtcagcggcacaagggcgccggtccaccgtggaccgggaccaccgaggcggtccaccgccggtccacgggaaccgacggtccggatcggcccaagccgatcaggctgccaggggcggcgcggctggggcacagcacggcacaaagtcggctggccaaacgacggcgcgcggcggcgcggccacccgcggcgacggccggcgacagctcccgcgggcgaaagcggcgcacgcgagagcagcggcgcggcgcggcaagggggaggcggcaaccgtctgcccggcaccaccggcaacggcgcgggcacggagcgcggagcgcggcggcagcgacccggtcggacggccaccgatggtggcagcgcgtcgcgaggacgacctggaggcggctgacgaaggggaggaaaagagagagggaggggagtgctcaccgagatgcacgacggcgaaggggcggccgacggcaaggaacggtggcggcggggctcctcaggaagacgacgcgacggagctccggcgacgggcgtcgctcgggatggggcggacgggctcggcctcgatcggcgaccgaggaaggaggagctctgtcacacccagaaattcccgaatagaattccaagcagaatgtgcattaaattccccgtccaggacaggtcggggtacacaaacgacaatgttgacattcaggtccacgtcttacaaacatcataaaagtcttacataaatgcagcggaaaaacggaagacaacaggagctaagccttgactagaactgcagcgggaacaccactccacaggcatcctcgacggcatggacgaagcctactcctcggagaaaccttcatctgacccatactcgtgctctggggttgggaaaaatagagcaagactgagtactacccactgtactcagcaagtcacaccggaataggggtatgatgcagggaattatcaaaggagagctagagtagttcatatgcataaagcgagcattaataaacagaagttgacagatttaaacagttgtaacaattaattactattaatcatctgctgtccaacgctatcccacgttgcgacaggcccaaccatccacctaaactatccaaattcaaaagattatactagggtgagactaatcacggtgaatctggttgaccgcccataaccgcgggcacggctattcgaatagttttactctgatcagaggtgtacaactgtacccacaagacatagccccacgacacgtttccgtgcgccgacatgtcaccacgacatttccaatataggatcaacatgttcaagtgacaagcatgacttgccttgctctgctgctggaggaacctcggcgactatttcgaagtacaccggagcgtcggaggaaccagaatctagcgacatacaaagcaaacattgcaaacaggctataagactactaaaacagggaacaaaaccatttttaatggattctacacatttttcttgatttactgagacttgaattggcttaaacggaactcggatgaattagttatgaattttagaagattcactgtgtttattactataacaaaaagtccttaaataatttattgcgcaataattcccagggctgacgtcatcaaggcggggcgcggcgccggcaaacgggccccaccggtcagtggctcgggagagggaggaaggggcggcctggctgggcctcggcctgcggccggcccagcagggaggagggggagaaaacggagagaatgggccggcggcccattcggaaggggaagggaaaaagaaaaagaaaaaaagaaaaggattttcctggaattaaaatattgcttgctcaattttaattggttaaaattatttctagggctctgaaaattccactaaaaatcctgttagtggatttcgacatgtagaactcaagaaaaaattccacatgccacttccgattattatttgcattgatttaaaagggtttactcttgctttgcactggtattttcttagggtcgcttataaattaaactttaggcttgggaggagaactttggggtgtgacaaacctatcccccttaaacggaatctcgaccccgagattcggaggagctggcgaagaggtgcggatgggcggctttcaactcatcttccctttcccaggttgcttcctcctctgaatggtgactccactgaactcggcaaaacctggtgaccttgtttctggttcttctttcgctggtatcaagtatacgaaccggcttctccacgtaggtcagatcctcctagagatcgatgtgctccgaaaaggcctgttcttcgggtacccttaagcacttctttaattgggacacgtggaacacgtcatggatgccgatcatattggatggaagttctagctgataagcaacttctccccttcgttccaagattttgtagggtcccacgaaacgtgctgccaacttgcctttggtttgaaaacggtgcactccccggagcggagtgacacgaagatacacgtaatcccctgcttcaaaagtgagctcccttcggcggttgtccgcgtagctcttctgtcgagactgggcaatcctcaacctttccctgataattctgactttctcttctgcttccgctaatacctctgtcccgaacagttgacgctcgcctgtctgatcccagaagagaggtgtgcggcacttccggccgtataatgcttcgaacggtgccatctgtagactggcctggtagctgttgttgtaagagaattccgcatatggcaagtttttgtcccaagctccaccaaaatcaagagcgcaagctctcaacatatcttccaagatttgattgactcgctcggtctgaccatcagtttgcgggtgataggccgtgctgaaatttaaacgggtccccaattcttcctgcagcttctgccaaaattttgaggtgaactgactccctcggtcagatacaatctttttgggtactccatgtagacacatgattctcgagaggtagagctctgccaaccttttgctcgtatacgtggtatgtactggtatgaagtgagcaaccttagtgagtcgatccacgactacccagattgaatcgtgacccgatgatgtccggggcaatcctgttataaagtccattccgatctcctcccatttccattccgggatttgaagaggttggagtaaacctgctggtctttggtgctctaccttcactcgttggcaaacatcgcagagtgcgacgaattcagctatttctctcctcatgctgacccaccaaaacttttctttgaggtcttaatacattttggtgctgcctggatgaatggagtactgggtctgatgagcctcggtgagtatcagatccttcagttccttgtcgtcaggtacacacaatctttctcccaaccagattgtgccgtgttcatcctcaaggaaatcccgagcctttccgactctcatgttctttttcagctctgctatttcggcatcattcacttgagcggctctaacttgatcgacgagcgtaggccgtgcttccagagcggctacgaacccgtgttcaacaattcccacgttgagacgctccaactcctgctgcaatttctcacacatgccctcgatgcatagggcagtgcagtaacttttcctgcttaatgcatctgccaccacattggctttacccgggtggtagtgaatgttcatgtcatagtctttgattagttccaaccatcttcgttgtcggagatttaggtccggttgggtgaagatgtatttcaaactcttatggtccgtatatacttcgcagcggttgccaatcagatagtgcctccagatcttcaaagcatgaaccactgctgccaattccaggtcatgggttggataattcccttcgtgtggacgcaactgccgcgaggcatacgcaaccactctgccctcttgcatcaggacacatccaagtccgtgacgggatgcatcgcaatagacttggaagtctttcatctggtcgggcagaatcaaaactggtgcggatactaatttcttcttgagctcctcaaaactcttatcgcactcagctgtccatttaaacttctcatctttcttaagcaactgagtcataggacgggcgatcctggagaagttttcaatgaatcggcggtaataacccgcaagtccaagaaaactccgaatctgcgacatggtcttaggtggggtccatttggtaactgactccacgttcgatggatcaactgccacaccctgagctgtaatgacatgccccagaaacttgacttccgtcaaccagaagtcacacttgctgaacttagcatatagctggtgctccttcaacttctcgagtaccagacggagatgttgctcatgttcttcttcggactttgaatagataagtatgtcgtcgatgaataccacaacaaacttgtccagaaattccatgaacactttgttcatcagattcatgaaaaatgcaggtgcgttggtaagtccgaaagacataaccgtgcactcatatagcccgtaccgagtggtgaaggccgtctttggaatatcctcttcccgaattctcaactggtggtagcctgatcgcaggtctatcttagaaaacactttagctcctttcagttgatcaaacaaatcatcgattcgcggcaaaggatatttgttcttgattgtgacttcgttgagtgcgcgataatcaacgcacatcctcttcgtcttatcctttttctccacaaaaatgaccggagcaccccaaggtgaagtacttggtcgaatgtaccctttctgcagctgctcatcaacctgcttcttgacctctgctagttcgttggccgccattctgtacggtctcttgtaaattggagcggttcccggtgccaagtcaatccggaattcaatctctctcttgggtggcatggtagtgaggtcttcggggaacacttctggatactcgcagactatggggatatcttccaatttcctcaaattcttttccacggtgaccactgggatttccgcttcaatctgattcaaggagaccccttgctttggtgagtctggtgatttgtacactactgtttctcccttctcgttggtcaaggtgactgtgcgattcgcacaatcaatgactcccttgaactgggttaaccaatccatcccaagaatgacatctaggtctttggatttgagaagaatgaggttggctagaaatggtgatctttggatttctattagcactgaagggctaaaactgactgaggttgaactatttcccggggcatgaaccctcattggtgtgctaagctcttctttccttaacccatgcatcccgacaaacttctttgaaatgaacaaatgcgttgcaccagaatcaaaaagtactgttgcagggattgagttaacaggaaacgtacccagtacaacctctggtgctgcttgtgcctcctccgcagatgcgtggttgacacgagcctggataaaccttggcccggcacgcctaggcttcgggcatttgtcagcgaagtggccaagctcgccacagttgaagcaggaccctggttttgctccagtctccttcttggcttgcgcggacaggcctgactgtgccggtgccgttggtgggcgtggagctgcaccgcggttgggctgacctccatggtggttctgactgccactggcgccctggggaaaattgctagggttgaacgggcggtactggcggacgatcatggtggtaggtccaccctgctgcccgggagcgaagcgcggcctctggtgacttccctgaggtgccctgaactgagcggccttcctcttcctgtccatcttgttgcgttgatcctcctgacggattgccttgtccaccagcctttcgaaattggcgtaatctccagatatcaactggttggttagctcatcatccagacctgctaggaatttttcctgcttctcggcgtcagtacggacatcctccggtgcatatcgcgcgaggcgattgaactcatggagatactccgtcacagtcatgttaccctgatggagtgctcggaattctctcttcttttgtgccacgaccccgtctggcacctacgccttcctgaagctacgacagaactctgcccaagtgacttcagtgcctggcgggcgggtggccatgtgattgtcccaccaagctgacgcaggaccttgaagctggtgtgtggcgaaagcaaccttctcctgatcattgcactgcaggagattcagcttcttctctatggcatggagccagtcattcgcctccatagggttggtggtgctggagaaggtgggtggcctgacacgtagaaactctggcaacttggactgagggggagggggaccaaacagctgatgctgctgttcagcgtgctgcagcatccgctggtgcatctgctggtgctgctgctgcatctgctgcatcatggctgccatcatctgagtctgatgtgccatcacttgggctagcgtcggattctcgggaagtggtggcggaccattgccggaattgctgttgggatgcacaccctcagtgcgctcttcgccgttgttgccctcgcctgttgcgcggctaccattcctggtgtagaccatcttgaggaagagcatacgggggaaaagaagaaaaacagatgctcaggaactaagctttattataaaggaatttaaactgcaattgttctgatctgaattaaaacacttaaaaagcaagcaaaaatccttattaagacagccatatcataggcacatgatatcgaccgtcgactgaccccaagcaagcaacctaaacacacaaactaacaagcagaagctagcaagtcgataaactaatggaaaacgggcctaatgctcggaacggctcctgcggtcggtggagtcgaaggcgtcctcctgctcgtcaccaggtccctctgagcgactcctggagcctggcagataagtctcgccgctgcccgactctgagccactggagctactgctgctgagatcgcggctgccactgggagtagcggacaaccaacctccgttgccactggctggacccctggcggctgatgctagagcgaaggagagagcggacgcgggagctgacacgtgaacgggagctggagctggtgctggagctgcaggaactgccggagctgcgggcggaactggaggtgcgggaactgcgggcggaggtgggttcctgggcgcaagctggatgcgcacgggtgcagtcgtcttcttgcggggcgtagtgcggatccggactcctcctggcgcgggaagaccctttaactgagcattctccctcttcaggcgcgctatcgcgtccttcagagcgacgatcctcatgagcttcccatcattcaaggccttggacgccttgtgcaggtccgagtgcatcctatccaatcccctcatcacagcacacatgtgaccaaaagtagtgtcgttctcgccggctgtcggacggaaagtactgacatcatcaccgctggctcgacgagggtgaaatcggtacgccgtgtcgtggaagatgtagttgtggcgctcccgtagtctggccatcatcaggtatgctgcctcctgacaggcgtgatctgctgtgcctccggatgcctcaaccaccatattagctaggcaggtacccacgtagccgtggacctccaggcgaacacggtgaggaagctcgccactgagcggtggaacagtcgtgtactctggcgcgttggggtagcccaccaccagcgtcatacgtgccaactctgccacaaagtcaatcatgccttctccgcggtggttgggtgggtggccggccatctagagaagacaaaggagtagggtcaatgcatgctcaaatccaaatttaaataaagcaataaaagactcaaataagagaatcgaataagagcgaaattttatgcatagatcattttgcatgagagcgaataaagaagacagactcacataatgataaaataaatgggaaattagatacatactaataataacaataagagcataaataccttgcaacccatgttcctgagctaggacctaatgcatttcacccatcaaatcccaactgactgacgaataaatctcaatagttttactaaaaccctagactgacttgttttgacaaatctcacttaaacgagcgaccaagatttttccccttgaaccacaagaacagatcccaattttcccagaacaaatccaattgcaaagaacatatgcaatgaaaaggattcagagggctcttaggtttttccatttggcttgtcctacggtcaaggtcggctctgataccaacttgtcacgcccagaaattcccgaatagaattccaagcagaatgtgcattaaattccccgtccaggaccggccggggtacacaaacgacaatgttgacattcaggtccacgtcttacaaacatcataaaagtcttacataaatgcagcggaaaaacggaagacaacaggagctaagccttgactagaactgcagcgggaacaccactccacaggcatcctcgacggcacggacgaagcctactcctcagagaaaccttcatctgacccatactcgtgctctggggttgggaaaaatagagcaagactgagtactacccactgtactcagcaagtcacaccggaataggggtatgatgtagggaattatcaaaggagagctagagtggttcatttgcataaagcgagcattaataaacagaagttgacagatttaaacagttgtaacaattaattactattaatcatccgctgtccaacgctatcccacgttgtgacaggcccaaccatccacctaaactatccaaattcaaaagattacactagggtgagactaatcacggtgaatctggttgaccgcccataaccgcgggcacggctattcgaatagttttactctgatcagaggtgtacaactgtacccacaagacacagccccacgacacgtttccgtgcgccgacatgtcaccacgacataccggaaagaggccgtgacaggacccttcgcataaccccctctaaccaagcacaccacacctcaggtttcacccccactcctcgcaaggcagcgggcagtcccctctcgtgcctaggtgaatccggaagccgcataggccgtcgcagggcccatccaaactccatcacgcccacccttgcctggatgcgtcggctagaggaaagctacgctacaagcccagccgttgcccacgctggcttgtggtaagtacgctaagttcttccagggcatcccgcgaaccggtccttaactgccatgggtgcgaccagcaaaaccatgcacccacagcccaccatgtgatttattttaattaaccaacaccaaagcggtggcactaatccaacaataccattagaaccaacagtctaaacattaataggattttccccattgtgcactagttgaactaagcatggctaagcaatccctagtccaatctctagtcatgttataacccccaagctgacaaagggacatggtacaacaatagcatggctatgacaattggtaaacaccccatagtaacattataaaaccatgcaatatttgaagaaaaacaatagagcatttgcaatataggttcaacatgttcaagtgacaagcatgacttgccttgctctgctgctggaggaacctcggcgactatttcgaagtacaccggagcgtcggaggaaccggaatctagcgacatacaaagcaaacattgcaacggcgcgggtcggcgtcgaccgaagcggcggcgcgacgcggctggagtcggcggcggcggcggagagaggtggttcgcgtggctacggcgctacggaggtggaggggggaaatggagcggtggccgagcttgcccggccggtggcaaagctggcggtggcggcggagcagtgtggcggcgaccctagtgacgggaaacggcggccggagttcgccgaagtgtggcggcgcgcgggagcggcgtggggagagcgagggagagagtgccgggttcgggaaacaaggggaaatggacgaggggagcacgggggtgctttttatgggctcgggaaggcgggatcgaggccggacgtggcggaatcggccggcgaagtggggcgccgacgtggggtggtggaggggttaaccggcgccgattttcgcggggagagtggggggaaaggtggaggaggtgaaggggatcgttttcacgcactcatggggcggggtggggcgcgggagccgcggcgtcgtggggcgaatccggcggccatggcggcggttggggcgacgggaggttggggaagaagatgacaggtggggcctcgggtcccacctgtcggggagagagagaggggaaaacgggcgagggaggtaaagcagacttgagggagagagagagccgagcgggccgagggagaaggccggcccgagagggagagaaaagggggattgggctgaaaggggcccaaagagaggaaggaggattttatttgtttttctttttttattttaattgatgtaatgatctttgtgctattaaaactatttctcgagctccgaaaattcacggaaaattccggagagtacattagggcacaaagaatattacaaaatattcccgaccaatgatttttaaaggaaaatttcaaattctcccattattttacttgattaaattgatttaacttttatttaatttctagaaaatgtattattaaatgattttaaaacccgaacgaaaatcggggcgttacagaacggtggtgctttatatagacccacgagggtcgatcgtggccaggagaccgcgatttcgttggcggagtggggagaggtggggaggagagagaggcgggattcaaaaattgaatcccggccgtctcgagcgcgggcgcgggcgggagagagggggagtgggcgcgggggacgcgggcgcgagggcgacgtggcccggaagtcacgggagcggggcgcggcggcggttgcggggcacggcggcgccggctggaggtgggagacgggcccgacaggtgggccccagggctcgggcggctggctgggccgtggccttcggccagcctagcggggagggggagagaagagagaatgggccggcggcccattcgaaagagaagaagggaaaaagaaaaaaaagaaggaaatgaattttcctgggattaaatattgcttgtgctcaattttaattggttaaaattatttctagagctctaaaaattccactaaaaatctatgaccagaccactaaaaattatttctcgtaagggtctggtcataaagatttgagagaacttttaaaattctgaccattaataatttctcaaatacttagttttaatacaaaggaaatcaaatttggcttgaaaagttctatatatcacgatatcatcaattcgttagatatatttcataaacttttctaaaacaaaattgttattcggaagggtcaattgcatatttgccactggattgaacaggtatcgtggatctgcaactaaaaaaactataattgtaaatttgccataaaaaacagtttgaacataatgtaactgacactgaactcaagcttagactaacaccgttatatggctggttttcatgaaaattaggacaagaatgcccttcctcaataaaacaccatttaaggcaacaagcaagaacatagtcaacaagcatcattttccttgtacagaatctagagtgagcgcagccaatttacaaatggtgttgatctgaggatgatattaatgaagacgaacttttcctgtataaaatctagagtgagcagccaattcacaaatgaaaagaaaaaaaaaggatgacaagtaccttttgctagctataggtcctccctgacatgtctttgcaaagtggccaccatagccaccatgccgcttgaagcagtcgacgctgacagccgtcgcagcggcgtgccgcggcctgacgccgcccgacggagacgcccactacagctgttgccccaggccgccgcaagtgctgcagtagacgtcgacacccgctgcagtcgcgcgctgcaaacctgacgccgcccgctgcagccatcgcccaaagccgccacttgccttgcctaatcgccgaaataaatctgcacctcttctattggcatctaatactctaaagtaacatattgttggttgatttgctcctgatttgaaagaaggatgagaggatctgaggtttagggtttgtcgtgggagaggagaggaggagttcgagtggatgtttctgatgtggtagacttcgggaagaacagggataaggttgaatctggcatgggcaacatggtattatcgcgttgcctttttttaaaattcaatttcatgaattttttttatctgtgaattggaacggcgatggcatacggaatctgcgcacactgttttcagtggtaaatttgtaattcgtgactttataatggttatttagagttaaggggtgaaagtagtggcaaatatgcaattctccctattcggaaacttataactttctatgaatcatgccatatatgtcaaatatctagataaacatataaaaatgcatcttgtttaatctagtaaacaaaaaacaaaatttacactgatttataccaaaattgcagtttttcgtattgtgcaagtttagcatattcattgttcaagtttagtcgattgatgggtaagaaaaaaaatcaagtgactgataaataccaacaatttctattgatacacactcgttgcccttgataaaataactcttgataatagaaacgtgtatacttatgtgtttgcatgtgttatctcctgtggggggataccactcagagtgacctcgagcttatcggcggcagctacgacaatgacggatgacctcgatcagtgacgagtgatcgaagccgatcagcggccgcatctactacggcggcggcatcctcatcagcgagtggcaacgactacaacattatcgactgcaacgagatgaactcggcgggcgtagatgacaagcacatctgtggcggcacgtgttggaattaatagataggccttagccaattcaaagattaattctttagaaaatcataaaagcccacttcataggatggtagacatggggactttagtaccactttatctatttcaggagatagatacctcattataaggtgggatgctctcctagccacttgaggcatatgacgtagagagaacaggggggcatagcccttttgcagttttgttttgctgcgggaaattcggatttgtttgttttggaaacactccgaataatccggtgcgtgaaacggcatggagtctggataagttacgcatgacttgtccggttctcggttttgtagctttgttttgctgtggaaaatttggatttgtttgttttggaaacactccgaataatccggtgcatgaaatggcatggagtccggataagttacgcgtgacttatccggttctcgattatgcggagcggagatcgtgcaggcgtcctgatcaagcatcctgatatctctatataagttgagtcgccacctccacgtaacatacgtaaaatcaatctagggtttgcctcctcctcctctgtactgcgccttcgcttgtagtctactccatcccactcgtcagcgtgcaccggtgatcgggagaataggtttccggaacattcgcctttaacgtcctgcagtgggagaaggcggcaaataaggtttttggaacgtcgcacgactgctccctgttcgaccacaacggctcgtcttcctcttcgctcgcgtgctgcgcatcgtcgtcaacccccgcaatcgcgagtacttcctgctgtgcaactggttttccggtaccctcggtacgtattcagcatgttgtgcatattcgatctgttcatattttattatcagtttacatgtgtagatcttatgatacatttatgttagtttacatatgcagtgtcaggatttatttatgaaataaattaaatcattatctgcttataaaccctcgccgtagatgatggagtggtcggcgagccaccgatcgaattcgtctacaagctcgggccttggccggcagcccagtgagctcatcaaccctatgcgaaggcacgacgagctcatcagccccatccaaaggcagtgctggcttagccacctctccacagttcatagaccggtgttgaatgcacgatttgcgccaaggctgtctaaccgggtgaaccagccatttggagttcattttttttaaaaaaaagaaaatgctgggacatttcattctcgaaggacaatttcatcaatgggaattgagcatctgaaattggttacttttgatattggtacggtaagaactgataatgatgggttgctatcatgtggtgttgatcttgtttaaattggggctgaaccaaatcaattcatgtgcaagctacaattcaccaaccgataaatatggttcacacaatcaatctctcatcttgtcatgtactttaagaataactagtaatcgtgcacatacaaggtacgttcttcacaatacatattctaagatagccatatgtcagcctcgatcctccttttttttttcaaagtccccgagtccctccaaattgctgaagccaaaagtccaatgcagtgcagatacaagttcagcccgccactttgttgcattctaactgcgatgcccatagcacctgattgttacaatagctggtgagaaaggaaaatgattgaggccgagtatagtttcaaactttttcttcaaactttcaacttttctatcacatcaaaactttcctacacacataaactttcaacttttccatcacaccgttccaatttcaaccaaacttccaattttggcgtgagctaaacacaccctgaattatacctcaccatcggcatctagctaaaaaatcacaatcaacaggtcgttattagtggatgacattcacgtttgcacaatttaatttctgaatttaaattattctccactggacatgaaaatgtccagactatatatcaaaaagtgccaacttaagttgtgatcactatttgctcctaaaatttgtgaaaatagaataattccaattataagatgtaaatgaataagtagagcatgctcacctttcctagaaaacaaagagcccatgcgatacctcaagccctcaacatgcagaagaaagaatagaaataacagtgaacggatcttctaacttttgtaaaaggatcttctaacttttgtaaaagggaaatgctattgtcttgcaaaaccaatgaacagtgtaaaatgttagcaaatattattaattcagtaagctgcaagctgaaccagaggaatggaatgtgctgatcataataccctgctttgcgctaaatctagtgtatccatagctttatgctgatgtaaagttaatctactgaatcattttatcaagcatttgttgaatacaataatcaagtggaacttcgctcctcattccaatgagcatggatatttatcagtggatgagactctactaatgtttatgcaatttaatttctaaagtttaattgcagctcataggttccctaaattcgtgcgtatttatagaatcaggttaggaagcaaactatagacataccttttgcttgctctaccacttcaaaattgtagtttcttttcctttcccacattacaaaccagatattacccaaaaaaaaaaagaaacccatgccaaaaaaaatacagggacattagttgagattaactgcataaaaaaatcaagattagaatataaaaaacattaagactattttaagtttcaccacgttgctcatggataccatgtttttatctacataaatctttgacaaagttgtaaaagtacgacatgtgtttttcagtaaccataaggtattacaaggtcatgtactaagacactgaataattctaggaaagccgaattatgtaaagatgaaagttaccccacacagccatctatttttattcaagaaacagtttcaatgtatcttcagcatttcagcaatcaacaaaggtccttgttggactcaaaatccttgtcatcagtcattagcgtaggcaaaaaatcttgatgaaaataatgccctgagatgctgagaaaaaaaaataaagttggctgttgcagatgtaatttcctaagaatcatatacatgttcatcaggtattttagttgatgcattgacacatggaacatctattactcaccaagatatatgcatatacggcctgaaaagtagtagagcaaaagattagtttaggattctcctaaatatatggtttttctcttcaagaagttgggtattctctagggatcaaagacaaatgttatatatttctcagtaactacttacaagaatagtaggatggcttcatagtgattagtggtaatcatctggattacaagcaaatttaaatcctccagtgatctcaaaacatcacattacctccaaacaacgaaaaataataatagaaccagccaaaattttcctcctataataggctttgatttgacaacttttgccgctgcaaaattaagtcatttggaagctgaaattatataagtctgctagattaaagattttccgtaaaacacgaatccttgttgtgtactttacgcaatccttgttgtaaaatgggatctaaaatctaagaaaccacctgagtgtgatgtgataatacctgaggtgcagtactcaacttctcatatgtaagcataattttatctgctcctaaccaagagatgagcagactaaaacaagataattatactgctgacaccagccacgctgtcggctgaacatgacatgaaatcagcattagtaaagttcggaagaaagaatggatgcaaatcaattgataggggctgcacagtttcaatagacatacctcaagtcctcaacatacagcgctggtatatattatctcgactcacttagccccaaaacatgcttcctcgtttaacctctcctatccttagctttggtaaattgaccatgttgttctagacaaatggccctccaataattgttttattccgtagcaattatggtactaaactatgtgccatgttagaagtctaaacctggacatcacatttgtctggtgacaatgtacttgaaattgtaaccttgaatgtttacttaaagaaaaatgaagttacatactgcgattttttttggcagagatagttgttttgctgcgaactttaggaccaagaataatatccatatccaatcaaagaatatattttttttgcctatcttgttgagcgacaaatcaacttcttctagattactaaaagcatgaacgcacctgatgtggattgagaagagacaagggcacaacaattgtgaagatatagaagaccatctgcgcgaaaaaacaaattggagcagcatcaccaattaaaacaacaagcatgactattagatcagcacacagccatggtacctgagctgcctcgtcctgctctccacctcggaaatccctattttgcgaacaaaagaacagaatgggagcacctcacgtcctcaccaacacggcatctctgaaattgtgcaaggaaactactgatgagagatcgattgttgcttcagatttaatttaatttggcacatgatccttctatggcagcgcttgccagtatttcctctcgagtagctcatgtgtttcgctcgtcagcatgtaattcaggtcatccaaccatatgatcatgcaattaaatcatgcagacatgaaacaatgcattatgaactaagggacataaagaaattcagtcttatgaaacaaagacattaatggtgatgtgaaacaacaaaaaccttgccttactcaagctctaagatggtctctgaagaaggcatcatcacctgcacgtagtatcttcaggatctcgattagggtctccgtgggctgaaattgaagctccctgggagagtaaataaataatttacttccatagtagtcacattttgaagatttcatttgcaacagcagcatcatacatttgcttccatagtaaataaataatttacagcaaccgttgttagaaattttattcaaaagttcacaaaagaagatcacctcaatgtaatgtaattatttgattgttcactaaattcaacaaaaaaggaaaatcatggtcacttgttttcagatcgtgttttcaatgttttcaactaccaaatgctacaggccaatgctcaaggaagaagattaaaatttccacacgtatggagaagattagggattagggaaagagacaggatttgagggacttacttgattacttgatgaggggccgatgcctgctccggtggcggctccaagtgagagtccgacggatctccggcagacttctggcagagctccggcgaggatgcggccaacgggacacgatgatttacatggaaaacctcattgatgtgaggagtaaaaaaccatgggactaacggtccactccaaacttccactataatcagcaaataggtacaaatggagtcttctctagaacatctagaggcacatcacaacatcagctataacatcaagttacacacttggtatcacaacatcaaccatcaaaactaacaagaggtatatcaataaacaattagagaaatagtatatttttgtcctctttggttctcagacgagatatcccaaaccatgtatgcaaattgtatgaggcagaaacgatggtctatgagtcccttccaagctgtccaaaaacagcccatttggacaccgtttgacccctcgaactgacattctactaaatgttgtacaaactgtaactgcagtaactcgacctgataaactactattcaaatctggtgctcttctcaaccaatcctcacataaactaactagattgaagtgctcaaagtgaggaaccaatccaaccacatatgaacctccaatcgctaatttaatgaagatcgggtaagagccaccaagcttaacaaactgcaaatcttcttctccactctcctctcatttctcttgtgtttttctagtttcttctcctcctcaatagccgctactctctactctttcaatggaggctcacatttgttggacttttgggttgcaatgggctgagagcaaaagctccatgtggagaaaaatttagcccaacagttcattcgtttgagagaggacgcatcaactagattattttttcccgtatggacgaaaatccgacggaatttatttcgttggtaattttggtaaccgaaaaatacggtttgcttgcttttagacactaaatttcgctgtaattttggtaaccgaaaaataaggtttgcttgcttttagacactacgtgatatctcatctcctcttggacactaaaatcgtaccattattcatgttctagttagcagcaaatcaacatgcttactcaatctggcactaattccgagattatggaaaaaaagttttatcctctgccagcaatcagcaattcaagaggttcatccttgctcaaatacaaggttcatcttgctcggttgcaccggtaaaggttgagcagttgcacgtgtaaaggattttggcctggtttagtccctaatttttttttaaaaacatcacatcaaatctttagacatatccatggagcattaaatatagattaaaaaaaacaaattgtacagttaaagggaaaatcgcgagatgaatcttttgagcctaattagtccatgattagacataaatgctatagtaacccgcatatattaatgacgaattaattatgctcaaaagattcatctcgtggtttacatagctataatgatcgaatatgctagtaagaaattaaagaggatggaggggatatcccaattaagctaacgctggattctactcccatactgacaggtggacccccacaggggctaatttggtaggcgtctacctaccattaacggcgggaagtcaaacctacgccatcacgtagctgaccgccccgaccacttgctcactgacaggtgggcccgggtgggtacaggattgcgcaaacacaccgggaaacagcacacccccgtgagggacaccgtgggcccaccctgtccctcccctgtctcgtgcgcgtctctcggcggtcaaagcgcacgtcagggcaacccaggcacacgacgagcgagctgtaccaatcctacccacccaatgacatgtggggccccagtaaaatcgttcccacatgtctgtgacgccacggaaaataaatcgaagcaacgcgcaccgacctgacgcgcgcaacatctctaacgccgctgacagatggaccccacgccgtctcgccgacccccctggccctctcatcccgtgggcccgcgaacagcacggccccacctgtcattggccgcgggtactcgaagagtcacgtagaaacgggacgagatgagcaaatgcagtgcacccacgagaaccccgccacgtatcactgatacgtgggcccagtaaccggatggccccacctgtcggcggtcagatccgcccgcgatacaaaagggccgcgccttcccatttccacggcccgaacagtctctctcttctctctctctctctcttctccccgagagctcgcgaggcgaagccgcggccaccggcgctcgcgcagcgcgcagatccgcgcagcccgcgcggccgttggcgagagcggctgtacggacgcggagagcctccccgcgcctcgcgcgctgagccggaggcgggcgccctctacccccacgcgcgcgcggagccgccccgattcggacaaatccggtggaaattcggcggcaatcgggggatttcggtcggtggtgagtggcggcgtggtgtggtggggtggggtggggtggggtgg

SEQ ID NO: 7589 - DNA, 20585 bp, Oryza sativa
tcaagatcaataatccattatacaacaaggagttacaaagtagtcaagaatacaatcacatagaaaatgtagctaactactcaccccattttcttttatatgacgttggttaatttaaaattaaataaacatagggagtaatttgaattcagagtcgttaaaacaattgaatgtactaagaatatttatagataaagaaagaagggaaatcgtctgtcataatataatttgtgcaattgtacaagctttgtcaatagtatggattagaatcttgaagataaaataaatttgtttccacatttgcctaaaagattttcttctaatcttgtgactattcgcttgattatcttcatctcaaaagttctgatatgctaacctactaaatgaaactctaatgaacataatatgtcattctccatatatttgttcctaacacaatatatacaattgttatacttagagactaaataaatttagaagcaatcatgtgtaagcaaacacaatgtgctaaggagtaagggctttaaattgaaaatcaatttattccatacattagcccaaacatctagtttcaaaacacctattccactagcaacacttcatctaacaaatctaacattcaaaaacatatggctccaccatttgagatctatgtatttgcaagcatttcataacatttgccataagaaagaattgcacaagaaagaatagacaagaatatttgaataaaagaccataaattctgcaatccacatggttggaaagatatttatattagcattagagtatgaacaaacttccatatattttatgatgaatataaccatagattgaacaccttatgatatgttgaaatagtccttgtagacaccaagaagtttatggtcataacaaccaaaacaaaatccatgaattaaaattagatcccattagatgcaccaagatactcaaacaagaatatttgttcaccctaggtacttgcaggagcaaagtccacaaaaaatagaaagatcagaaagaaatagaaacctatgagaggaatggatatccccttgttcttcttgaaatccttctgtcggtccgcctccttcgttgtctcctatggctgcaagatcatcatcttcttatagataaagccaggtgtgtgtggtattggttcatgcaatgtttatgacacaaaatgacaaaagaggttagcaacagatagatcatcccacatcagtttccttgagtcatctgggttgtaaaatcgtgtcttgggttgcatcattagctgccctttttttggttttagtgaaggacttcaaatacaaccctaacataattgttatttatatagtcattttaatacaccctccgtactcgtaaaggaagtcgtttaggacaatgtttaagtcaaaccatgggaatataaatcatgaataactctcaagttgttgagtttgaaaatgtaaaaattatatgaatagatttgtcttgaaaaatactttcataaaagtatacatatatcactttttaataaatatttttatagaaataagaagtcaaagttgtgttttggagaccgtgtcgctgtcctaaacgacttcctttacgagtacggagggagtatgacactatgtattacagtttttgcttcaggctttgggaatgggaatcattattgacatatgtgttttcttagaatggagtatgttattgtgttcagtgcattattaacaatggagtgccgtatgtgctcttttacaatgaacgagtacgtgtattattttttacaaggatgcacaatgattaaacaaagcctactatggctaaagatgctacaagaacttgagatcagtgatgatgtgtctatagtcaacttgtacattattgcatccgaacacttcccaatgttagtttaaatcagtgaaaatagagcaaaattgtgtatcccatgagttaacataaatagcgaagtgtcctaaccattgtgttgtgtggtgtgcatcttttccttcttgtgttgagcatattataattcatttttccctacgttcatgtctacaatgtttgaacatcgaaacattgagatttgtgctaacatgactctaaaaaataattggatgatctaataattatataagaaatgttcagtgtccttttcctaaagagaaaaggttgcagtagcaaccagcacatagagaaaaatccaaattcaaaacatgcaacagacatctacatttgtctagttgttcttattggaacgctccagctaatcggtcgagtggacatgcaacgtgtaaagttagtgtgtgaatcattttatttatttccttcttggttgtactaccttttctaccacacattgtaggggacgattgcacaagtcacgaatactcacattatagcttaggggacaactgcacaagtcacgaatgctcgtgcgagttagaaatatttcgttgatgcaagtgcctatccgaaaagtagatttcaagagataaaacaccatatctttaaaagcaagaatgacttcgtgatccaattaaagcagcatgttccatttgaccagatcaatagacgatgaacaactaacgaaatatattttttttgtttcatttggtcaatcacaaaaaaaaaatagtgatcatacttcaaaatattttattcaaatgttgttaataaactagtagaggttcatggagtgacgtcgcaaaataatttcattctacgcctaattgacatccatttcaaaaatatatggacaaatgtgccataggatttaatttcatctgtaactagcaatctgtaatatttttcatattgagccgatagaactttatgtaatgatatgacttgacagatcggactcgtaccagtggaacattgtgttgaaattataagcacgtaataatttaatatattcatgaacagatcaaatatacgcaacatgtcgaacatgtatcgaggttgcggaaagaccagttgctcagcaggaattactcgcggttgcaggcgtcgatgaaggcgcgcatcacgcaagcggagaggaagacgagccatcatggacgaacaaggagcagtcgcgcaaagcgcttcccaaaaaccttattgccgccttctcccagtgcaggacgtcgaaggtagaggttccggagacctactctcccgatcgccggtgcacgccggcgagcgggatggagtagtctacgaggtacggcgcagcatagagtaggaggcaaatgattgatttcgcgtgtgttgcgtgaaggcggcggctcggtttatgtagagataggtcgcttgatcagggcgtccgcacgatctccactccacgtaaccaaaccggataagtcgcgcataatttatccggacttcacgccattttcacgcaccggatttttcggaatgtttccaaaacgaaacaaaaccgaatttcccgcagcaaaacaaaactgcgaggcgagcacatgcatgtgttccccccacttctctccaccacacatgcttcaagtggctaggagggcatcctcccttttaaggaggtccccctctcctagaataagtaaggtggtactaaaatctccaagcatgccatctcatgaagtgggcttttgtgattttccaaataattaatcttcaaatgaggtaaggcccatctattaattccaacacattgttatattacaccaagcatagttgcattatcatctcaaaactccagctgttacaatcccatagttcgaaagttacaactaaaactttttaagaccatcatcagtacaaactttacaattctttagtaagatgagggatcgctttatctccaaagctcaataagtctaggaattttccggtatcattaatagaaaaatgatttttcacaacacctaggattgacttattttttcaagcggactataaaattcacgcttaaaaaacaactagaggcaccatagttctagccccgccagtggaaaaagaattttacaggcgacatcctatatgtaccgcttgtggtaacagcggaccaacgtgacacagttgataaccataaaatattctaaacccgatacgagccatccccctatcactcattcaattttatcctccccctttccctctcctcgccctatcggtggcgcggaagtaggactgtcaacgagccgagctcgaacgagctcgtctgcttaaagctcgagctcgagccaagcctataaaatattcgagctaagtaaaacaatatatatttcaaatataatctttaaaaaacaattaatttctagttcatcatattaatataagagaaaaaaagaataaaataaatatatgatgttaatataaggcatacaaataatatattttatcttctaatttattaaataacaacaaaaatcatatattactagactcgttggaagctcgagctcggctcgacaaagctcgcgagcttagggagaggctcgggctcggctcgtctagagctcgagacgagctcgaatcgagcctaggacgagccgagctcgagcagctcgcaagcctcgagcttttttgacagccctgcgcggaagcctatattggtgatgggggaggggcagtgatggctcggcgaaagagcgacggcaggcttgatggtgaccgtggcgagggcaggagctcgggaaggcaacagcaagggcgactgctcaggggctgcagatcggtggcacggccccagatccgcgggtggaccccgttgatttttatttttatccttgtcattgacatgtgggtcccacaagctgactcagttagttaacagggtcaaagatgccacgtgggacaatctgcctccaaaaccgctcggggagtcaatttgtaacagttttgggagttggagggtggttttacccggttttgcagttgggggatgcgattcagccagggtcaagagttgagggataacaaataaacttattccatccaaacagctaccgtgatcagattacgttggcccagtattaaaatttatatgggcttttcggggctgtaaatgaattaggcccaaaattagaattgacacaaaccggataagactcccatctcagcgtccgtgagctaagctacctactaatgccacgtggcggccgtcaagcgggcacctaatcctcatctcgtataaataaattcatttacccccctcgggatccgagaaatttccctcctctttccacttgtcaccgccgttcgccttcccaaccacgagacgaccctgccctcgccggagatgctgccgtcggcgaccggggacatcgccggcgacgtccactcggcgcgagagatgctccatcccatcctcctttgacttcttgccgccgcgggagcttgactggatctgagctagctggattggtgggtgggcgcgtcaagaaggggatgagctttggcgccgttgacgtcgacgatggcggcgccgcggcgacggcggcggcgagtgggggtgaggaggtgagagctatgccggccgaggtgagctgggagatgcttgacaagtcgcggttctttctgctcggcgccgcgctcttctccggcgtctcggcggcgctgtacccggcggtggtcctcaagacgcacctccaggtctcgccgccgcctgcggcggcggcgtctaccacggcggcggcgatcctccgccgtcacggtcctcggggattctaccgcggcttcggcgcgtccctcgccgggacggtgcccgcgcgcgccgtctacatggccgcgctcgaggccaccaagagcgccgtgggctccgccgcgtccgcctcggcgtcgcggagccggccgcgtccgccgcggcctcggccgcgggcggcgtgtccgccgccgtcgcggcgcaggtcgtgtggacccccgtcgacgtcgtcagccagcgcctgatggtccagaccgccgccgccggccccccgtaccgcggcggcgccgacgcgctccgcaggatcctccgcgccgacggcgtgcgcggcctgtaccgcggcttcggcgtctccgtcctcacctacgcgccctccagcgccgcgtggtgggcgtcctacgccacggcgcagcgcctcatctggcgcgccctcggccccgcccaccacgacagccgcgcgtccgtggtcgccgtgcagggcgccagcgccgcggcggcgggcggcgccgccgcgctggtgaccatgccgctcgacaccgtcaagacgcggctccaggtcatggacggcggcggcgcgtcgctggcgtccgaggcgcgcgcgctggtgcgggagggcgggtggggcgcctgctaccgcggcctggggccgaggtgggcgtccatgtcgctctccgcggccaccatggtcaccgcctacgagttcttgaagcggctctcgaccaaggacacctcactctgatagaggcatcgtagctgtaaccagagcaaaccagcttgtgatttgtaaactgatagtaaatcgtatgcacatgtacatatctaaagcatctgcgtttcacattgatctcctctacgacattaggatgcaaaggctagattttgttggatttttgaagctctctttgtaagttgtgacgatgatgatgaaaaagtttggtgaaacgaagaacatgtatatttgcatttgatcaaaatgttatttggtggtttatgtgattcaactggatgattgttgcatgaccaaatgctgctgtgtccatcactgttggggattgcaatgttacagttaggcgtcactactgggacagctgattgttgcaccttgagattttattttatttttttacgatgaaaaatttgatgaaacgaagaacatacatatttgcatctgataaaaaatgttgttggtggtttatgtgatacaactggaagattgtttgcatgatcaaatgctgctgtgtccatcactaattcactgttaggtcattcacaatgctcctatgtggcgttcggcctggacaaagaaaaccgaatattcggtggcacatcctcaaccagcggtgcaaagccaagaacgtgtagccaaactttgccaccctttctgtttttgggaccacactagtactccgtgccgccaagaaagagaaagggagagagatgtgtcgtcgtcgtcgtggtgctccacaccgccgagctcgtcacccaaggaaggaggacgatcgggcgccgtcctcgtcggagaagcttgtcggctcgatggggaaagcgacagagaaggagaggccacggccgaggtcgatcagtgaaaggggacggccgcggtggaggtcgatatggcccccggagctcgatccgccgctcgacccggctccacgaggaagtcgaggtccgcatcgaccgccgccgaggagctcaacgtgacggcagcccctcactctgttcttgtccgccgacaatgcccgacgccagatccggtgaggtcaaggtcgaggctgcgctcttggtcgatccgcggcaccggaggaggaggaggaggaggagtggtgtgctggcgagcgccaggccccaccgccgttgccgctccgcccgctcggctcgacgccgtctctagccggctctctgtggtggggattggggaaaactgggaaaggaagaggggagagagagagagggggaaggggaaaagtgaaaagtaaagtagtactggtgggacctactatgagtggtttgcgccgtggaactcacatgttcttagtctaagtggcatacgaggtacaccaaaactttgtaattgcaatgttacagttagacgtcactactggaaatttgggaactgaaagtgcattgtgtgtgccaaatttgtcacggtgttgcttgtaggagcaagacactgacgaaacagttgatatgtccgaaattctgggagtagaatcgttgctgccctgctggaaaggcagcttgagatattttccacatgatgaccgtaattttcgttgaaaccgaacacttctactactcctgaagtcctgatgtcttactaagtccgagtttagttccaaaatttttctttaaacttttaacttttccatcacatcaaaatttttctacacacacaaacttccaattttttcgtcacatcgttccaatttcaaccaaactttcaattttagcgtgaactaaacacaccctaaagacagcaattttttttttacactaggtaggcagagagaagaagatttgatcaggtatatatgactctgcaacttgactcaaaacagtattgtgataagataagccagctagctaccggttgaaattctaataactgagttaatcaaaccactaaacacagtatcgtcatcagaagataaggcgagaaagtaaaccctatcgctttcctgccgtgtgggcccataccgatgtgcagtctgaggcgtcgtccgagtcatcaattcatcgtatcccttccgggtttaggctggtggttggacgcatctcatcatctacttcgccgacctcgacctctcaacaatggcgatccgggaccggggagacagttggtgaacaccaacccctgccgttaccaaggcaacaaacttcgcattcctccattaatctcttcatcgatctagttcgttttgctttgtttgcggattcaaagaaaccggtcttattgctacgagtctacgactagttgaactagtgtgcataagttttttgacaatgaacaaatttgatgtttgctcgtagttggggagtaaggataagcttagctccctagataacttatttcaaattaattacagggcaaacttttgaaaaattggaaggtaaagattaaattatgtgatttaagtttcagaagcatcaatgttctttatcaaattattggaaactacagatttacaattttgtatataaaattgtagatttttcgcttaagtagccgcaaaactatgggttttttaatctccaccgtagccttaaacactatttgacaagtaggtcccacctgtaattctttaaaaaaaatgtaggattttattgcagtacatgtttttgcatgtgggatccattagtcaagtaaatctgcatgcgaaaatggagcctaaagtttgtagttttcaataacgtaagcgtataatttgtaattctcaatacaaactttaaattcgtagtatcaccatgatttatgtgaagtatatgtagctttccaaaaaaaaaaaaaaagcgccagccccgttctaggctttcccattcgtaatgttcattgcctgaaagattggtcttaggaggggacggtttgagcaaaaacaatttcttctttttttcagaagtaaaaagatatcggaacaaccaatttggagcgattcatctgggactttatccatcaaaacatacatatcatcatctactagtaggactcaaataaattgttaatcatatcaagaaaatgatgacacatttggcctgagatcccaatgcttcgtgcagctactatgcaggggtgccgtcgttggttccaatgcgctgccggctatgaacacagccggcaaaacagtttcacctcatccttctgggttttggcacacacgaaatgcaaagcttgtaaggtgagcgtaactcaattggttactccgtttatttatattcaagttttagatgtgatatggatatatccgtattgtattaactttttattagtggtagacaacttacctgtcggtaccgatgtgcctcaatcgtacttacagagatagtgggatagggtgctggttcatttaggtgagtgcttgagtgcttcgtctttgctgtctttcaaaaaaaagattatatatagattttttttcttattgaactcttactaacaacatttagattttttttataccttctgttaatttaaatcaaacggttgagctcattagtaagaaaatattagtacgtgatgaagtagtgccctttgaaaaataatgcaaagctctgtcatctaaaaacaaatgcaatgcgttgatctgcaggcaggaacggcccatcagaacaagcacttgggctacgggcttatggcccactttgcgatgaacctgttggcctgtaagctgggcccactcgtccacagataagcgcagcagcaaagccacccggacaggttggcgacgcgacggcgacggcggcggcggccatcgctggcgctggccgccgatccgatgcgatccggcacggaactcggcgagcacccgctgcttttggttggatcgatggatggatggatcggcgacgaggaaaggcgagcgcccaccccgcgcgcgggagttcccaaatattccccctcctcctcctttcttcttttgatccgccgtgatcggctatctcgggatcgccgccggcgctgccgccgtcgcgcttttccttccccccaatcgatcgatcgatcgatcaggcgtgtggattctccaagaaagagagagagagggagggagcgaaagaaaggcgaaaacgcgaggccgagtctttgttggctttcgtcttttgtcacattctcccctaacctttcgctttccggtctttcgagatgaaaacaaatttgaaattactacatccgtcccaaaataagtaacgtccgtcttattaaaaaattttatgaaaaattttaaaaaaagttagtcacacataaagtattattcatattttatcatctaatatcaataaaaatagtaatcataaaaaaaatttaaataaaataaatggttaaatgttgaacatgaatagtgtaaaactgcacttatattgggacgaagggagtactacgcaacggatgcagcccggccaggcagccagccatcgacctgtccattcgcagtcgcaggctcgcagcttaccattgcagtcactaaattcagtgttactactaccaactaattacctcctcttgtactaatccgctcttcgagttgacatgttttttttcataatgaaattcattctcacctttactaaaccaactacaatcaattattatagatttatagggtttgctccctcaaaaaaaatattataaaattaaaaactactcaaaatatcatttcggagacaaagatggataatttccaccaatagttggcgtcttggtgagacgtaaccattatttctttttagggcctattcggtttgaagaaatttcatggaatgtttgaacaaattaaactatatccttgtaaaaattatgtgaaattcctacatttcgacattttgaagaagcccttaatggcttacatgtagagcatccccaggagttacaccatctagtactccatctgaaatatggcgcatgtgagcaaaaaagggcctccaacagatatgtcatcgagccatccataaatagcgcatgccaaaatgaagatagaaatgccacatatagagcatctctctcatcgtatcatatcacaacagccacagatcccgccaccttctgaagttccgcgacctcccccccctccccctcatcggcggtcggaaggagagggaggaaaggggaggcaccgccacaccggtcaccgccaccgtctccgtctcctcctccgcgcctgccgcccgtcgcccctgcaaagaaaataatagagaatagtctgggtggaatagagaagagcctagaaaagctatagttgttcaacacatcaaattgataaaaatggttcactcatttcaaatatagcaattaaaaaatttcctattacaaatatacccatttcaaaagattatcacaataaataacaccgttaattttagtcgtcgaaaatatagcccgtaaaaaatataaatgtatgattatttggaagatattactaaaatatagaagtgtgtgacataaagaatgtatggatgaaccgttgaggtggaaagggatatgaaggagaaatcttttttggatggttattcatatggtaatgggtatatgaaggatcgaatttggatgagctgttggggatagtcttatatatagtttttgtctttatcaagcaggagcataatcttcgaattaaatccatagccgatcattataccgatcgaatttcacatatatcatcagccacaactgacgacgaacaaataggtagataatggcagagagtaactaggatgaaactggtacggatatttttttccattcagacattttttgggatcggataggtttggttggatattttcggatttgtcggagatacagacccggggtatgcgaagtgagaggaatttaccttcccatcctgccgcgtgaccctacagtctggccctacccccgcaccccgcagatcgcaggagcggctggggggcctcggggtgccacgtcatacccctcgggctctcgcaccgctttgccccgaggccctcgcccagccgccatctggcgggggagcaagcggggaggggggccaggctgaaccacctttaatgcgcgcagtgccccaactgccccctgccgcattcaacgcagtaggggcagacgtgcggcgtgctcgactggcacgcgacggtcaggaatgaccgatctgtgaccagcctgtcgccggtcacatctgactggatggacggtcgtgcccccacatcgtatctgcctccggcggagtggaggtaggtgtgacccgtcccatcggaggggtcattcgaagttctccccacgagagggcggccaccacaagtcttcacccattaattggggaatgacagggttgtcccccttgtcaggcgagggacggtgctgggccccactcaaggacaaactgtggcttagcttccaggcgaaggcacgggtcgagacccggtcaaggtagggtgggcccccatccgagagaagagtaggtagaggcggtacatgtggtattcccttgaggtataaaatgaggaccttgcccactaagaaaggggacgactctcataaaacctgagctctaggagaaaggaagcaagagcgctctccggatcttagggacctttgtaactctcagcctaaatcccatacacaggagtagggtattatgctttatagtggcccgaacctttataattttgttgtgtacacactagctagtagccttgggggcggatacgtgattttcagaggcgggccttttcccccggccaaactcacgaaagggggatcccacgatctcctgctagagaggatcactcctcgacaggattcgaaaacgaattcagatatttttttctcgaaaatagaaaccagtacagtataagggcactatccattagaatcggagaacggtcggaaactatctgggatttttttatgatttccgcaaacaatgattaatttttttaaaaaaaacacgtatttatacataaatttttcatacggagtcaaatgaaatttaactttatatcaaaattatagagctcgatgagatctataactgtgttgctaataattttattatttgagatcatttaaggctctaaatattcattataaaatatcatatatgtttttacaaaatttcatatctacaattcaagcaacatccgacggagatgcgtgctctatatcaaaattgtagaactcaatgggatctaccactatgtagtttatgacatttgtgtttgaaaatattaaaagtataaaacaaattttacaaaaattgaagatgtgaaataaaataaatagcatcttcaatctatacaacaagaacataatattccatccgtcctaaaatataagaacctaggaccggatgggacatttcctattactacgaatctgaacaggcagcctatccagattcatagtactaggaaatgtcccatcctatctaagcttcttatattttgggacggatggagtaagtgatatgttaagtaagctacctccgtcacatattacttgtcgctttgactttttgtttgcaacatttgactattcgttttatttaaaaaattagtgtaaatataaaaaatgataagttatacttaaagtacttttgataataaaacaagtcacaaacaaaataaatagtaattcatattttttctgaataagacgaatgatcaaacattacaaataaaaactcaaagcgacaaataatatgggacggatgtagtatacatgaagtaggcgatcttgggactagaaagtggataatcatatttacatacggatctcttagaaaacggccatgaaaattgatttttcacatacggttatgggatcgcctacaaaattgacaatataaattttagagatattgacctaaaataacaagcgatatctcttgcttgattaacgaagctcaatttgagaggcttttatatcccggcaaatatacgttactgtattcattctgtttcatattccctctgtatctatattcgttaatattcgattctattttcgtatccaagttttcgattttgaaaaaaaaaagaatacgatagaacagtttccgtccattttgtatctgttttcatccacaggagtaactcggcttcaaatagttacccgtccaaatcctgccactagctccaaaggcaacatcggaaacgcaaaggcaaccatatgtttcagatgttcttgtttttttttccttttctttttcccctcattcttaataaagagaaagaagagatcaaaagagccatgattcgcaggcaggcaacggcggcatcatttcgcttcgttcccaagctgtcagctgccacggcgcgtagcatggacatgccatgattcgtcgattccttcttcgccctgatgatgatgatgatttctcgtgcggaagcaccagcaagccaagcaagcaagcaagaagacagagcgtgtgcatcgcctgtcaaatctctccctctcaacccctccatcgcttttggctttccttcctttttagggaaagaaacgctaatggttttctccctgtggtgtctgctgataatcctgctaggcgatgcgtcagcttttcgctttgtggtacggttgcttgccaatgtggttgagtttttgtgttaaaatttcatattactatctctatcccaaaatatattccatccgttctaaaatatagcatatattcgagatttatttttaaaatataataaatctcaaccaacaatctcttcccaatatcttcacttctaaatcaattacaaccttctcctatttaattctacatactttcttaatactatgcacgaccctagaaatgcttatagtctaggataagtagtaaggataagtagtaagaatttctagagtcagtcacagttattaagaaagtatgcataatttaacgggcaaaggttgtgattgcctgaaaagtaaaggtcggtgaggaaattgaatggtggagaattgtgattggttaggtagataatgttggtggaaaagttgttatttttaaggcaaattctgaacctaaaagttgttatatttaagaacgtagggagtaccagatacaacaatgttgaagtttgaagatcggtgtagttttatgagaaagaaacttacattagtcgtaagtttttttccccttatggtcttgattgctccaagattcatacatcttcggatagcatcatctcaagttctcaacaacaaggcctcctttgaaatggaaaattttcataaaaagattgagaaaaaaagttaatcaattcctatgaaaatttagaaaaactaaatgtttcgaaggattcctgagatgggaaactccttcctttatcgaatagatgtattgtgtgactaaaaacaaccaacacattactaaagaaatctatacaaaagaatgacccacaattattttacaaatggatttagtgagatcatgcaggtggactttgaaaagaaatttagtgagattagtgatatgtccactgattttcttctcttagagtgtggtgttttatgtgtagtgtgtgcacgcaaatgtgtatatgtcgtgtaaacgttaaaagaaatgcattggcatgcttataaaaagacctacaaattgattgtgttaacacagagtacaaagtaccaattatatagctacaattacatgtacacacctcctcaaaaccttggaaaagggaatgaaaaggaacaccatagtactattactatcggactatttttacagtgagccccctcagcttctaccaaattactagacagccctactccagctccgacaaggagcatggccgtacggacggcggcggccaatgtcgcggcggatcccaactccggtggtcccgtacaccggcagctcgtccccgtaggagccgtcgcgaccacccgccggagcaatggccgcgaggctgtcgagctcgaacaggtccgagctcgcgtcgctgctctcctcacctccgtcgtcggtgtcggcctccacctccatgaccggaattcggcggcagccggcgacggccgcggccaccgcgaccttgccgtcgatgtccaggaaccggacggtcctgctccggctcggccgcgccctcgccgtggtggtggtggtggggggggtgcgcggcgtcttggcgtggcaggggcggcgcgcgtacgacgacgacgacgacggtggcgccgtcgagcacgcgggctccgggtagtccggcgaacacgccgggcgctgcgcggatggacgcttgccggagaagatggagttgagcaagctggcgagccgcgcgccgggcgacgccggcctgcggcacgcgcgggccgaggcggagcccggcttcgtcttcgccgtcttctccacatccggctgctcatgccgctgcttccgcgcgaccgccgcgccgtctcccgcgccaccggcggcggaggtgcggatggggcggagccggcgaagcgagtactccacctcggacgacgagaagtagcccctcccggggcaatccgccgtggaacccagcgccggcgccgccctgtagctggcggccagcgacggcttgtagcagtagtagtagtggtagctgttcgccgcctcctgcctcttcttggccgccgcactcgccgcgtttcttgtccggccgtcctcgccgccctcgtccatggagtcgcagatggcgtcgagcagcgtcgacgagaacgacggctggtcaggcgcccgccgcctcgccctccccctccccctcgccgccggcgccggcgccgcccacctcatctccatgtcgcgcatggcgcagaaacagagcagaacgcaatggcgatggcgatggcaatggcaatggcgcgcgtgattcgattcgatggtggagtggagtggagtggagagtggagtggcgggcgggcgtgcgggggtgggaggggggatcttgttgccggggggcggggggcggggcccgcgccatctcggtgtcgcgcgcgcgatcgctgtctgtccgttcttccgttccacgcctcgtgctccttccatctctccacctcgccgtctcactctcactcactcggcggccgctttatttgttagctttttgctttgtcggcgccggcacgaggatggccgtacctgtgtcccctgccgctctcacgtctcactgttgctgcttacttgcctcgccgtttttagtttttaccgccatgggcgccggcgggatgatcatgggctgctgcctaacgggttgggctgtttcggacgtgggtgatgttgggttggggctttgttctttgtgtttaggaaaaagtacaccgaagttccctcaacttgtcaccgagataaaaaaacgtcctcgaactgcaaaaccagatatcgagggtcccttaacttactaaaaccggtcgcaagtggtcccaaggcagtatttcacatggttttatcctacgtggcgctggttttgtccaccgtggcgctttgaccttggtcttcgttgctgagtcaccagcgccacgcgaagctggtgggacggagtggggcagcgatgagcggacgcgtgggcagagtggcggcacccgaagccggcggggcggtgaaaccaagcggaggacgccagcctcatcgtcgtcatctttcggcttagggaggaggcgcgggagctggagcctgaggaggggctccgctagaagccgctgctgtagaaccgggagcgcatcatctcgagctccagctccgacgccgcctcggccgcgtcagtttcgccgcgcccccactccgccgccgacgccaccttgtcgtccatcatatcgaacgttgacgcggccgcgatcatcgccttggcgctccccgacagcgactcgtctggggcggccctcctgcagccccaccgccccctgcggcggcctcggctcttgcgccgccgcttcatgacccgccgcatgacaccagcggggagcctgacgatgacgagcagcaggatcgccgctcccttcctcctcctcctcctcctcttctctctctctcttgtctgggcagggcggccagcagcggtccacttcgtcctcgacctcgccggcggcggtgagctgttctccttgccagcggtggcaggggcaggagcgagagatgacgagctcgaggaggatggagaaggcagtggagcggcaccgcccgggccgctgcttcccccgccgccggcgcccgcccgcgcgccgctcctccccccgccgcttgcacccgccgaccgtcccccgtgcagctgcttcccccgcctgcgcacgccagcaaccacctccgcctccggcactgaagccgccattgtcgtcgtctacttgtcttcatccacccccaaaccgtcgtcgcgcctagacgtgcgccgccgtgtagccacccctttcccctcgggcgctgatcgccgcgccgcgccgatgcgcccgaccatcgcccaagcggagccgacgccgccgcttgcgccccctccaattggccccctgaccttctccttccggcaccactcccttccctccctccctcctctgcccggcgccgccctgattcctcccctctgcgccgcctcccggtcgccctaccaagacgccgcgccgcgcaacctttctcctcctgcgcgcggctcctgcacgcaaccgcgccgccaccaggctctctctccctgccgccaagctctcccccttccgccggccccctcttccccaccgccgccggccatcacctgcgtcgtcggcgcccatcctttgctgcgcgcgcgtgacggcgtgcgtgaggagggaaaaaaggcagagagagaaagagaacggcgaagagaagaaaccgtgagaaagagacaaaattaaaagagaaagaaaagaaaaaggaagtgggaccccctgactcctcctccccgtgaagccataaagggagagagatgtgacgtggcaacctgacacgtggggcccacgctaactcagctgcgacgtagcataaaaccgggctcaaaaccaccgaatgacctattgtgaccggttttggtaagttaagggaccctcgatatctggttttgcggttcgaggacgtttttttatctcggtgacaagttgagggaccttctgtgtactttttccttgtgtttatttgtgggtcataatggctcagtaatgtccaatacgagttgtttgcaaatggaataagtttgatttaggtccatgatattgacgtcgggtttgaattacatccttcaacaaaaataccagatataacgtggctctcaacttgtaaaaccggtgtacctcgaggtcccaaagtagtatagtgcccggttttaactgacgtggcaagttgactccaatcaaacctggttgagttggcatggcccccacatgtcaccaagcctcctctattcctcctctctccccctctcccccactctcctctcttcccccatctctctaccagctaggaggcctacagtgggtgccgcccaactagaagaggagcaacggccatggcggagcttgtcaacgagacgcaacatctccatctccttattgaactcctcctacacaatatcggtcttccgccacccttctactccgttgcggccgctatccctctcctcgtcgggttggatgtactccaaacttgccgaactacaggaaccattcagagacttcctcatgtgtacacgggtgagcatgtccgggtaggaatacaacgcagacataggccaacaaagggaggatatggacatgtcctgtgtcacgaagaggaatcccccaagctcctcatcttcggtgtgcgctttgctcgcccgcgtgcactcgtcgagcatgcacactagcatgtttggtggtgagcgacggctcaccctccctcgggaccctcgctgaggccgccgatgccgaagcagacaacaacacccctcacgtgcctctgtcaccgacatcttcatcgccacctcgctgctaagcacatctgcctctaatgattgcatcgtttcgctggtgccgcttccctagctcccgccatagggctggattcggtgctccgaggaagctcgacttgcaccttggaggctaattagccatcgctaccaccacctagtggtcggcgggcatggaggtgcccctgtacacctctgcatccacactcaccaccgcggccatgctcccactggtggagaaaccgtctttggtcggtcgcccgaaatccacaatagtctcggttccactaaaaaccgggactaaaaatgatctttagtcccggttggtggctacagcgggtatatttgatctttagtc

SEQ ID NO: 7590 - DNA, 6941 bp, Oryza sativa
caagggcacggtggtggcgagggaatgaacgagagggagatggggtggctcagtttactagatggcaatgtcggtttagggaggaagaaccgacattggcagtcaaggagagcgagctggcggtcatcgacgcgtgcagccaaggcggcgacaggtgatgatgccggcagtgtcgggcaaaagtggaaaaggaggggaaaaaagtgagctcttctctttgccgagttggggagggagagggatgggagcgggagctcggcctcacggttttagcaggacacgcgtggagcggctcgggcacgcgctgcagagctcgcggcaggcagcggggccgagcggcagcgtagcgcaggcgctgacggtggcggcgaccgggcggtcggtcacgagtgtgtgcgcgcgcgcgggaacgagcggcacagccgaaaatcgaatggcggcagcgggaaattggcgatggcggcagcgctggcgtgggagagagagatcgaacgagagagagagacagcgagagagaggaagaggacgagagagcgagagaacgtccaagagagggaagggagagagagacagcgctctctctctcggtggtcacgtgcagcgcacgtggagatggagggagctgaggagagatgggccagcggcaggtttcggcccaaatcatcacgagagagataaaatagactttttctggaacttcctattaaggaatttgaggggcatttgagttgggatttgaccaaggtggggctttaaagcgggaattttggtatttttgggatagatttatatttggcggcacgaaggattatttcagaggatttcaaaaagggaagatcattattcaaaaatggaacaagggagatagcggtagaatgccatagatagatagatagatagaaagataggttgataggtagagggacggatagacagatggataggtcgagactcagagagagatgggatggaagagaaggaagaggaggaccggtaaaaggatgaaggaatccaacctatgagggaggttaaatagactttcacagagagatttaattaggaggttttagggttggagtctggattcgaatttcgaggttgatactcggtctcgggagaataggaaggagtcaaggaagggaacaatattcggagacgagtcaaagggtgatggataatttagagaaagagagtgtaacttgggagtttgagtttgactactcaacgagatatgtgggtaaggattttggagagaagtctgaatagaagggttcggacttcgagattattttggaacggaaatcatttcggggagaactcaaggcgaaagggattgaatcttggggtttagagttcaagggtggaagcgatctcgatttgcatattcagacttgggtccgaagttcgagaaataaaacaagggtagattgacgaaccgataaagagagaaagatagatgaatcaaaacctgagaggttgaattcgaatttgagaatcggtttgaaggaaccaaggagagagtttatgacgcgaaggtgaatccctggacggagttagggttcgggcattcgacaaagttcacggatggggttccaggagggaattccgaatagaaggaatcgagcttcgggactatattgggatggaaattttgaggagacgaactttgataacagggtatcgagacaagggagggatttaaattgagatctttggcacaacttagactcaacactcaaagaacgaaaattttcgcaattaggattttgccgaattagtttttaacgtcacgcaaaaagcggagcgttacatccgccgtcgccgcctccaccgccggcggacggatctggaggaagggagggagaggattggagcgtcgcctccatcggctcctcttccattcggatctaggagggagggaaggggcggggccggcaccgtcttcggtggacgcctccgccgtatctgggaggaagagagggagggagcgtcgtcaccgtcagctcctcttcccttctcactgagccgtcgccactcctcttggccgctcctccgtcgctcctcgccgagtcggacagctgtcacctcctccttgcatgcgccgatggccgtcggctcctcctcttctgacaccgacgccgccgccgccacctccttgcgcgcgctgagccgcctacggccgctagctcctcctcacggtagagaccactcatccaaatttcaaaaatcgtaggagagggagagggagagggagaggtagagatagaggtagagagggggagaggataaggatgggtgggtaggtgggtggttgttgggaaaggaaacatataagattttttttagtgagtggtcctattttcccaggcgggcctcttatgtggtccgtctgcaaaaatttggaccactttagaggtcatcctctgaaaataaaagtatttttacagacggatctcttaagggatacgcctataaaaaaatgattttcgtaggcggacgacggtctcacccccggttgccattttcgtaggcagttgtttggttctgaggaccaacccgcctggaaaaaaaaagatcacgtctgcgaaaatattttttctattagtgtagactatcaattcagaattttattttattttgtaaaatttaaaatccaaaactactactctatccttcccataatatagcaacatagtaccagataggacacttaatagtacaacgaatctggacatgcttcaagttcaaacatggtcctccatgagggtgtgcaagtggtcagccgaaccgggcccctgattttccttactctaatgtatttaaaatcatttcgctctctttttttaaaaaaaagatcactcttacttttaaattttttttgttagaatagttttttttagctttgataagtgtttgatggtaatcatgaccaccttagagaactatgactcatgacaccgatatgaacatatgtttcagacaataaagattctatttttttcgcttaataaaaaaataaatgactacatcaagggaaaaaactagctaaatactcatgctttgcattccttttccattccctcaatcactttgggaatggacagtttgcacgtgttactgtttagtgaccctatgtaccaacttcatagtcgcacatgtcaattggtgggtggtgacagattcaccattcatcaccaccactaaaatcttttaaaaggagtatagattatttttctgacttaggtagagctcaccgctaattcattctcttatttcttggcattttctaaacataagacatcaatttgtgtttcacaatggagtctcagattgttaagtacggcctaatgacaaatggaggccctttgcagatgtatacgttttcaaggatagttttatagatatttttattaagacgaataatcaataatttcatatattaaaaagctaacgtagtataaatttcacgtgcctagtactaaggatactcatagtggtaaattcaaaaggaatgaaacaattataaataatttatgggtaaaacttctatatctgtgttttagtgatttagaagttgatgtaaaaaaaataaactatattccaataagaaaacctcaaaatctattacaaatttaagtttttggtcgtacctcatgagccaacaaacaatgaatctgctgtgagcaatggcgcgctccactactctgcctgcacgaggctgacaataactttcaaacggcaaatctacaattgtcgtctagcgctagcagccaagtacaggcaaattcaacgtactagacatctggaattttccaaatacaggcgaattcatcatacacctctggaatttcgggtttattcatacgtttctgcggctgcatctgtgattatgtgaatcagttctgagtaaagggtgtgtttattttacgctaaaattaaaagtttggttaaaattggaacgatgtaacgaaaaagttggaagtttgtgtgtagaaaagtttggatgtgatagaaaaattaaatgtttgaagaaaaagtttgcaactaaactcggccaaaagcatctccagcgacggcttgagcaatgaacagtagtgtttcgtatatcaaggccaagatacgatcatcaacatggatattttcttggtgtctcgtcctgctcgtacgatcgaatggtcgcacacgtttcacatgggataacttttgtaagctcaatgctggggcctgtggggtggtgatctgtctgctgtcttctgtgcaagaagggaagggaactgttctttcttttgtagtcggagcaatggcctagctatttgaatctcctacttcaacttgtttaccttttcagtgacatgcgaaaacgagataaaccgttagcacattaataattaaatattaattattacaaactttaaaaatacatttatttgggttgttaaaggattttttttatatatataaagtttttttttggagaagacaccattaacaatttgaaaagatactcatggaaaataagaaagctgtaatttgaagttgaagaaaataatggaacctaaatcggtatgccaggaacttcaaatacttccttcattttgaaataaccgacaagttattgtctcatgtttgaccaccaattactcttaaatggttgaactgtgataaattttgtgcttgtatttttaagatgccatacatttaataatacgatatcctttttaacatttggaaaaaaatctacataaaaagtgagtgctgaaagtttagaaataaatagtgtccgatgccaattatttaaaaacagaggaaatattaaactactatgctaagggcgtccctcctacttccataatggaagatgaattggagcttagctatgaaaattatctgacagcaaaaatgaatgaattaggttccttattgtagaattagctcagttaagattaagttctagatttggtacaaatgaccatatttatgactaattactttttcaatagtagaggtgtacatatctacatcgagacgtttctgatggctttgtgaatctcaggatatatatatataatgatccagtctatacaaatcgatctagtctatacaaggatcttgtaagttctagtgtgtgtctatgtatttgtaaaggcgagtgtatgtacatgtatgtgagcgtctgtgtttgtaccatgtttttagaagtattaaaaaagttgttagatttacatcaaagattttgtaagaaatgttgaaagttcccgcaaaaatccacataacataagctaccaaagattgcactacgataatactacatccgtttaaaaaaaactcaacataggtaagatgtgacctatcctagggcacatcctatcttatattgagttttttttaaatggagggagtataggccgagtttagttccaaaatttttcttcaaacttccaacttccaacttttccatcacatcattctaatttcaactaaacttacaattttggcgtgaactaaacacacccatagtttaatttaaatgatgtgtcgaagatagcagtagtacacaccaaattaatgggagtagcagcctcatcggctgcccacatttcctaaacggcttattagggaataaaaattaatttatacataaaacgtttgtaaatatactcttagtgacttaaaaaacaatataaaaaactatgttaaaaaatcttaaacttagcttcaaaattaagtttaaaaaaataaattttggctttgactttggcttattaggtcaatcgatggaaccctagaacataagctgctaagaattgtagtcctatgccagctcaaagcaaaacaacccaaaatcatgaataaatgtgatgaggatatcattgactcggatataactatgcttctattacatatcaacaagctaaatgtgcatttgttcaatattaggtttactcattatatatttgaacaaatattactacaccagttttgtatattcacatttgcagaactacttgtgtgtgcaaaagaaaggagagcaaactcacgaagtgtatggatgatcaaataagttgactagggatcagagtttatcacctacgtcatttctcaagctaaaatgtttgacatttctcaagtctactcatacatcaacacaatacttttggtttatataaggcaaaagattaaagtctccacatgttggattcggatttgggtatcctagcaatatcaacttcaaatggaactagtagataatctaaaagaaatctctaggcttatgagtacttgttgtaaagcttatgggtctactttcatatggttttggtcccacattaaatttactcattagttgttaggaatcgacaaaacaaaccacgtacctcatacaatccaagtttgatttgggtcctagacgttgtaattatatcgttggctaagcccaagagggcatacgccctagggcttatgtttttcaattcatatgcagggattagtcttctaggcgaggtcaatcggacaacgtatggttgataaccagagtagaagtggtattacgattgcagggttcggatcatattgatcggaagccagaagccagaagccagatcgtgagtgtcaaattttcaccaaatcaatctaatcaatacctatcgaaagtttgctcatcagtacgtcattctcgatcggccggcggaaaggaaaaaaaagtaagaccaacttgctggaagcatacaaaacgaaccaccgtacggcaccgagttatcgccgccaggtcagttggtttagtgtttgtccttccgtgctagactgctactccctccgttttataatgtaaaactttctagcattatctatatacatatagattttaatgaatttaaacatatacatatgtttagattcattaatatttaaatgaatgtggataatattagaaatttttacat

SEQ ID NO: 7591 - DNA, 9331 bp, Oryza sativa
ctaggcgaggtcaatcggacaacgtatggttgataaccagagtagaagtggtattacgattgcagggttcggatcatattgatcggaagccagaagccagaagccagatcgtgagtgtcaaattttcaccaaatcaatctaatcaatacctatcgaaagtttgctcatcagtacgtcattctcgatcggccggcggaaaggaaaaaaaagtaagaccaacttgctggaagcatacaaaacgaaccaccgtacggcaccgagttatcgccgccaggtcagttggtttagtgtttgtccttccgtgctagactgctactccctccgttttataatgtaaaactttctagcattatctatatacatatagattttaatgaatttaaacatatacatatgtttagattcattaatatttaaatgaatgtggataatattagaaatttttacattgtaaaagggagaaagtagtagtcaaacactccaaacctaaattgcccaatcacaagatatctaccactgtaggctgtagcatggcatgcggttcacgattccatccacatacttctgcccattcggaacccactaggctatctatcgatctgtataaaacgagagacgcatcgacgacgtaaaatctaaaaggagcacatctcactcaggctggccggccgaaatcgatcggcagcaaaggccaaccaaactaagccaagagcgagctagctaagctggttttctgcttgtgccatgggagaagatggcggcgtgaactcttcttccaactctccggcggccgccgttggtctcgtgctggtggtggcgatctgcacgtacctggccgtcgtcgccacccgcaagcagaagcggcggcggcggcggcggccgccggtggtcggcacggcattccaccagctgtaccacgtccggcgggtgcacgactaccacacggcgctgtcccgcgagcacatgaccttccggctgctggtgccggccggccgcgagcagatatacacgtgcgaccccgccgtcgtggagcacatcctccggaccaacttcgccaactacggcaaggtacgcagcgccactctttattactgcatgctcttgtgattctgtaaactgctttactactcctatacggctatactttagtccccgttctctctccctttgtccaattggagagatatttcccgtgaacctaaaatgagaaaagttattagcacataattaattaagtattaactattataaggttgaaaaatagatttacttgattttttaaacaatttctatgtaaaaactttttgtcaaaaagtatcatttaacagtttaaaaaatatgctaacggaaaacgtgaaaactgaagtttggagttgagaaaaaagaactaggcccagtcttttcttcaacttactcgtttttattagcacgttttccaaacggttaaatattgtgtattttgcaaaaggtttccatatagaagttattttaaaaattaaataaatttattttctaagttttaataattaatacttaattaaatatatactaatgagtgcacagaaaatctctctccaaacggatagaaccaacagtcttattactgctactagcataaccctatgtagtcaaaaaggatatttctctagtcaatttgacgcgtacggccccatctaatatgggccacacgtgcgccgcgaacatgttccagcccaacttgtacgtatcgtcacaatcctattcatcctatttattgtggaccatacgttagtcattgagttctcaataaaaaaagaaacgttagttattgtctttgatctaacacaactatcatgggcccaaatggattatcctaaaaatctactcgggtggaagaaagaggttgtgggcttgtggccacacaggccgcgacgttgacaacagcagcatagtgtggcggaggagagaaccgggacttccgggtacttgcacacgagtacttccgggtgtttgcacaccatgcacgaagagataaaaagagaggtgaagagccgaaggagaatgatgggagtagaggagaggaggaaaacgctataagttatggtacccggcaacccgatcaaataagtgggtaatctattggtcaatccatttaatttatttataaatagatttacgggttgatccattcatacctttttaattgtaggcagctcgatatctagctaggtaacagcgacgatatacatacccggttagtcagttacgagcgtgacactcgaaaggaaataggcaaaatttgttacaggatcctcaaaaactgtgtaatttgctggtatatatcataaaaacgtgccacggcttaaagacacttaaaaaaactcgtaatttgtccacggacacttttggcttaattgaagagagattcttcgaaaagacaagaatgcccctagggtcaaaaagcttttgagctgagattggagcaaagatgaaatataatatacactagtgatatacttagggtgatgacaaacttaaagttgcataattataaatgtttactgtaacatcatgtttgtagcatttggtactagaggcattcatgttgatcccaaaccagtcagctttgcaagcagccatttgaggctgctagctaggccggtgcggttcatgtttgtggatttgttgctgccctgacacgtatggtttctgtgaaaaatactaaggggtcgtttaaccacgggaacatgagcgacctgttcggggatggcatcttcgccgtcgacggcgacaagtggaagcagcagaggaagatcgccagctacgacttcaccaccagggccctccgcgacttcagcggcgacgtcttcaagaggaacgccgccaagctcgccggcgtcgtctccagccacgccgcgtcaaaccaatccatggacttccaggtaatcaaccgatcgtaactatcgatggcgccagtggtgtgttgtgtttgtatcgccattgaggacgtttgttcggttgtttcttcagggtttcttgatgagagcaacgatggactccatcttcaccatcgcgttcggccaagacctcaacacgctggacggctccggcgaggggcgccgcttcgccgcggcgttcgacgacgccagcgagttcaccatgctccgctacctcaacccgttctggaagctgtcgaggctcctcaacgtcggcgccgaggcgatgctcaaggagaggatcaaggtcgtcgacgggttcgtgtacaagctcatccgtgacaggtccgacgagctctccaacaccaaggcacacgacactgtaagcactacctgatatgtccaattgtccatccattttgtgagtgatcaaacacttgaaattaaggtgaactttttgtgtgcaataggattcgaggcaggatatcctgacaagattcatccaggcaacgactagcgattctgggacggttgattacaagtacctgagagacatcatattgaacattgtcatagccggcaaggacaccacagccgggtcgcttgcttggttcctgtacatgatgtgcaaacacccggaagtacaggagaagatctgccacgaagccatggaggccaccaacgccggcgaggccgcttccatcgacgagttctcgcagagcctgaccgacgaggcactgaacaagatgcactatctgcacgctgcactgacggagacgctcaggctataccctgcagttccactggtaattaattacgatcacaaagttaatcaaacgaaattaattctcttgcccaatgccaaatgaatcgaagtatagtaacaaacgtagtgtcactttgtttctgacgatgtttcaggataacaagcagtgcttctcagacgatgtattgcccaacggattcaacgtcagcaagggggacatcgtgttctacatcccctacgcgatgggccggatggagagcttgtggggcaaagacgctgaatccttccggcctgaacgttggctcgatgagaacggcgtctttcagcaggagagcccgttcaaatttacagctttccaggtgaaatttactgaactccaagaatctttctgagttccggttacccacttctgaaagttttctgaactttgtgatgagacaattctgaattctgatcacctgctccttctgtaggccggcccaagaatctgcctcgggaaggatttcgcgtacaggcagatgaagatcttcgcggccgtgctgctccgtttcttcgtgctcaagctgcgggacgagaaggagatcatcagctaccggaccatgattacactctccgtcgatcagggtctccatctgacggctatggcgagatgagggcacacactacagtctgggcacgcacagcagctggctcctgtactcatgcaagtgatagctccttgtgcataccaaaacgaacgagatctgcaaaccttaattatgtctgatcgtgaataacccgcattgcaccctagaataataagtgcatctgaactgcagtcagggtcagagtaacttattggagtgaactggtgttgtagggaacttcaattgtacaacttggagggcgcaatacaaatgaatggattaaatagtagaaagttgattttaaaagggctttcaacaaatgctgatgatttttttacaaaattgtaatgtttttatgagcttggaaaaggtaagtttggaaaaataaaaaaagataactcaaaactcatggcatcagcttgcattgagctcggcttagttcggctcgaactcataatcaactactttggttgcgttcggcactgcttgttaccatcctctactctctcgtttttcatacacatgttttccaaactgcttaacggcgtattttttgcaaaaaaaaaatctatagaaaagttgttttcaaaaattatactaacccattttttaagtttttttagctaatatttaatttttcgtgcaataattcatcgctccgtttttcgtgcagaaaatgagggctgccaaccctcactcaagaactctgccttagtttggctcggagtaataataataagtcaagctgatgtgggatttcaagtcgtgagcataacaagccagctcatgagctacttgtttagttatcttcgaatacttagttctttcagttacaataaatcaaagttttgtcatcggcaaaaactcaaatatatttataataaatctataacccaagttgacaagaaataaggtgattctcatttttagtctggtcttatgaatgtcaaaagtactttcttaaatatgggtttttggattgtcaataatgggaaacaaattagattttggaaagataaatgaattggtaacttggcttttaaagataaatatccatctttgtatgcaattgttcggaggaaaacatcttctattgccaccgttatgggatcgatctgttccgcttaatgtttctttcaggagagctttagatggtcataatcttgtttgttggcatgagttgtgtgcctctatagtacatattcaattgaatgattcgtatgatagttttagatggaatttcaatcagaatggcttgttctcggtgagatctatgtaccaagctttaattaataatggctatatcgagagaaacaattgtatttggaagcttaaattgccacttaagattaaaattttcatgtggtacttgcttaaaggggttgtgttaaataaggataatttggcaaggcgtaactggaatggcagcttaaagtgttctttttgtttaaagaatgagtctattcaacatctctttatggattgtcattttgcgaagttcctatggagagcagttcagttctcttttggttttattcttccagttagcatatctcatatttttaatgggtgacttttgggagttgataagaaaatgagtaaactgatacttgttggagcttctgccatttgttgggcaatatggctgagtaggaacgatatggtttttgacaaatcaccatcattttcctatatgtaggttattttcagggcaactcattggctccggttttaggcacaactacaaaggtgtgatgaagatgaagagtttctgaaagttgtatgccgaaagttggagaccacggttgtcgaggagtgatcctctctagcgggagatcgtgagaacccccccccccctcatgagttcagccgggggaagaagctcgcctctagaaatcgcatatccgtccccaaggctcctagctagctcgcacacaaccaaattatacaggttcgggccgctatgaagcgtaataccctactcctgtgtatgggatttagactgagagttacaagggttcctaagctcgggagaacactcttacttccctcctccacaagctcagattttctgagagtcgtcccctttctcggtgggcaaggtccaccttttatacctcaaggggataccacatgcaccacctctacctactcttctttcgggtggggacccaccctatcttgactggaactcgaccagtgccttcgcctggaagctaaaccacagcttgtccttgagcggggcccagcgccgtccctcgcctgacacgggggacagccctgttattccctcattaataggtgaagacttgtggtggccgccgtccgaatgaccccctgatgggacgggtcatacctacctccactccgccggaagcagatgcgacgtgggaacacggttgtccgtccagtcatacgtgaccggcgtcaggccggtcacagaccggtcattcttgaccatcgtgcatcagtttagcacgccacacgtctgccccactgcattaaatacgacagggggcagttggggcgctgcgcgcattaaagtaagtttagcctgggccccctcctcgcttgcttcccccgccaaacagcggctaggcgagggcctaggggcaaagcagtgcaagggcccgaggggcataacgtggcaccccgaggccccgaccccccggccgctcctgcggttcacggaatgcggggacaggaccaggctgtagggacacgtggcaggatgggaaggtagattcccctcacttcgcataccctcgggcccatatctccgacaacggttatgcaactttttgctaattatggtttgagattttcaaatagacttcaataattgtgatctccttacgttaggctggtttctttgtttttcttttcggtgtgttctattcatttagatttatactatattattgaaagctactatgtaataattggttgtagttcttttgagtaaaggccggaatattatattccattatgtaaaaaaaactcaaattctaagtgttgccattaatgaggacatgtttcagtaaataccatcctataaacgattttatccaacaaatgacatcgccatcaactttctagtagcaaacatctgttatgatgttgtgcaaaggccattttaccccccacgtataacacgtactccctccgtcccaaaatgtagctatttctagcacagtgtcttgtcccaaaataaatctatttcttcacctacctcctcctctcaaccaatcacaaccattcttcttcacctactttctcttctcaaccaatcacacacttcctccaatcattctcacctactttcttaatacccgtgccaacctcaaaaatggcttcattttgggacggaggaagtagttaccttattactacaaggcccagatctgctgctacattgcctcgtccggcatccctgccatcgtctcgaagcctagaagcattgtgccactgctacctcgaagagccagcccaacaccactcagacagccacactgtccccacctaggctgtgtttagatccaaagtttggatccaaacttcagtcctttttcatcacatcaacatgtcatacacacataacttttcagtcacatcattttcaatttcaaccaaaatccaaactttgcgctaaactaaacacaaccctagattcatcctgctactgcttggaagttggaaatgccacgccaccatcttcctcgcctggatcaactgcactgctgccggatgcaaggacctcgcgacccttgccatcctagggtctctgccatgtcaccattactgtgaacaatgcaccgacgccgagcccacctccactgtttcactcatcgcctctgccgacaccttcctctgcattgccgtccatccctattaatgggatccggatctggtttttatcaatcctgccccgctgtccgccattggttaattatttttgtgttccattttacctagatatgccaatgccaaaaacacctatgcaccttgggacatgggtcgtggcccaagtagcaatggactgccttttgtataactagaaatttcgacataggaaaaagtacaccgaaggtccctcaacttgtcatcgagttacaaaatcatcccccaatcccaaaaccagatatccggcatccattaaccaatcaaaaccgattacaataggtcctttggtggttttggacccagttttgtcctacgtggcggcagagtcagcgtgggacctttatgtgggccccacgtgtcagatgccacgtcaatctcttttccttcctcctctctctttctctctctcactcttctcttctcgttcgacgccgtgaggagggcatggcggccggcggcggagaagcacacgctcttggcgatgccactgccgccgaggaggaggaggtgaggcggcagcccggcggcggcggcggtcacatcgtccttgccgaactgggtgctcttgtcatcggagtggtggcgcttgcgaggggatgcgccggcggtggtggtgaaggaggcgaagcgatgtactccagcaggcgaagcggcggcgtcgacgggcgagcgcggtggcggagtggcggcgtcggtgggcgagcacggctgcggagaggcggcgtcagcgggcgagagcggcggcggcggcgggcgagcgccgctgcggatggggatgcatcagccttgtcgtcgtcgacggctccaggcgaatgcggcggccgcttggattgtggcggcacgggcgccacgccgccggcgacgctgttcgaggtcacgctggggaagggcggcggcggcggcggcgccggtgacctggactactacgacgtgagcctcgtcgacgggtacagcctgcccatcgtcgccgtcccgcaggccggcggcggctgcgccaccaccggctgcacggccgacctcaaccgctgtacgtaacgtgtcacacatccatgcgtcatgcatgcatgtcgtacatggcgaacgtgtttgtgctgcatgagcatatgtgcagcgtgtccgaa

SEQ ID NO: 7592 - DNA, 4278 bp, Oryza sativa
gctgtacgtaacgtgtcacacatccatgcgtcatgcatgcatgtcgtacatggcgaacgtgtttgtgctgcatgagcatatgtgcagcgtgtccgaaggagttgcaggtggacggcggcggcgggacggtggcgtgccggagtgcgtgcgaggcgttcggggaggaggagtactgctgcagcggcgcgtatgcgacgccggcgacgtgccggccgacggcgtactcggccatcttcaacgagctacgcctacgacgacggcatgagcaccttcacctgcaacgccgccgcctacaccatcgcctacacgagcaccttcacctgcaacgccgccgcctacaccatcgcctacaaaacagcgtcaccggcggcatggcgcccgtgccgccgcactccaagtggccgatgcagtcgccggtctggcgcttgtttcatcagcatggagacagagacaaccatatacaaatggatgaccaccactcagcactcagcaggaccagcgcgagtacagaacgaacagcaaaatactccgtactagtagtatattacatctacagtaatcgaagtgcggcttgcgagccacgaatcacgaacagatgcaggacgctactatctcaagcatcgatcacaaaaggagcaagcgggacatttgatttctccgaagctgcacagatgctgcaaataaatcgagggcttcgaaacccgacaccccggaggagtctatcgatgccttccttccgcgatgcagaaaagaacaggcagtgcagagtgcgggttacctgctggggcgcattgtggtcgggcggggcacagaagacgtcggcgtcgagcggcatgtcgacggcggagccgagctggcgccggtactcgctggtctccccggcgaagcacgcggtcgcgccaccaccgccgaccagcctgcccagggagatgagagagagagaggggaagggagaggagggaaagagaacatgatgacgtggcgtgctgatatgtgaggcccacgctaactcacccgccacgtcagacaaaaccgagttcaaaaccatcgaaggatgtaaagtgaactgttttgtaagttaagggatgttatatatctagttttgcggttgacggacgattttgtaattcgatgacaagttgagggaccttcggtgtactttttcctttcgacataccaacgttcggcccgagcccaataaagactaaaccctggttcctccctactagtactacggtctcaccggatgtgagaacaagacaaggggcatagtgccgccgatgccgatgcctcctaacacaactgtctccctgctcgacgcttgctccaggcgcctcccgcccagcggcctaggcccggccggttgccgccgcgcttccaacaacctgccaatccacaaggcgcctgccgcccctacccggcaaccccgacttgctggtaggcggcgatgccttatcagctcaactccttggctcgccggtgccgtcacaacattaagcaaggaggcagaaggccaggagcagccggcccgagcatatcaagaccagcccctttaggaccttgatcaacgaccagagatcactgagtttttcggtatctcttattattctcaaagagcaattttacgggacttgaggagatatcatgaggtactatttttttctattgtaaatttggtacctcttgatatttaggtattatgaggtaccaaattttacactaagttttggtacctcatggtatttcctcaaggaccgtagaattactctaaaaaaattgagtaattcattttggtatataagtgtattttgtaggttagttacttacacccttacctctcgttagtggtattttaaattcttcttccgaaattttcttaactaccatatgtactaattcatgtctttgatatgcatttttttttctctctataggatcaagatccataactacaattgaagagctaaggacagtataatattatgcttagaggaagctaacctataacaaggtatttgtatttatgtaacaaaccacaattaaatttgtattgtatctttttatcatgcattaaggaatatcctgtgtcgctgctactactcccttcattttatagtgtagggcacaactattttttttataatgtttcataatacaatacgtgtatgcttataagcaacttattgggttgatccaaacaaggaaatgattatatttttttcttaatctatacgttaatagtagttgcataaaatattttacaatggagggaatattaattatctacttcagtactgattgtgttactactcccatttcaattactgttctgccattatataatttacccttttttgttttggtgctaacaatgaatcagtgttgtgatttctgaattcagtggtgcgctctgagatttgataagtccagaagcagcatcagatctaccctgtttttgcttgcttgttttatcagccaagtgcgtttctggaagatagggttcttctttccggtggattgatcgttgtttgggggcaattctctatttgccattgctaatctttcatgatgattgttgatcacttctggattttagtattttgcggttaataatttaatactataccccctctggttctatattaattaacgttttggacaatgttgaggttaaacttttataactttgaccatcaataacttaaaaaatatttagtttaaagaaactagaaaaacatatatagatttatctttcaaaacactataataaaagtaaaacatgcattatttattgtatatattataatagaaaaataaggtcaaaggtatattttgtagagcgtgtcattgtccaaagcgtcaattaaaatgaaaccggagggagtatatagtttatctcatccatttctgcgtgttcaagtagacaatgtagtgttcttgcgtgcgacaatgaccaatgaccagctagatagggttacccatcgatttgatcttgtttagattagtgctgaaattgtgaagtccaaatggcaatttggacattgaagaagaattgacccttatgcagctgaatggacggaacccattaatgtattccatggatgggggctgttcgatcaggcatttatacaaaatttgactgggcaaacggaagtcaaccaatagaaacgtgacagcggtggcaaataaaaaagggacattgacatttgtacgatgatgtcttctagaaggaaaaaaaatgtctcaattatcttcataaactattatagtccaaattatctcctcaatcaaaacaacttcatattttttttcatttgactcttcaaatcagacgaataaacctcgtatcctaatacaaccagttttgatagggcgtgccatataatggggcaataaaatctagttttcatcctacattgcaacagtgctcacgtgacatcctctatctttccatccacatcttctccatgtgctgcatcatactatccacattcgcatctccatatccgtcggatttctaaaagcacgtaccatatcctcgtttcggacagatttggattggatattatcttattcgttttcacccctacccccccccccccccaaaaaaaaaaatcttcctccatttttaaaaatagttgacagtggtattttttattttcaaactttgatctctcattttctataaaagaattacaaataaaaattatatagtataatcaatgtattgtactatagtgatatacttttgttcgtcatattctaaccatttagagcatgtttggtacagctccaactcctaaatttagcttcaggagttgggtctggagtagagttgtggagctgcctaaacccagctccacaactatagttcattttgtgagagagttccacccagctccactcccagttttagtggagttgaaactgtttggttagaactgtgccaaacaggcccttaggagtatttttgataactcaaaaactttatttccgtttcagaaacatagaactactacattatttaccgtacagttggttgcactaaaatggtctttcaaagctctagcgtaacaacaattgctaggattttttttgacagttataaactggagaacttagttgctgcattctagcatcttttactagtttatcggctatcgattaacttctcctatgatccacgtaacctgcatcatggtctgaggaatatttgcttgcattcgactaatcaaaggttggcctggtttttcctcaaagttttttctcctttatagt

SEQ ID NO: 7593 - DNA, 13478 bp, Oryza sativa
aaaaactgcgaaaatatcaaagcacacgataatcaaatatagttgcgctcaaacttcaatataccgccgcctgtgcctgtgcctgcctcatcttctcgagctcgaccagcctgccgatgtccggcatggcctccttggcggcgtcgagctcgtcgaagcgctccaaccacgccgccaggagcggcgtcttggcggcgtcgaactggttcaagccgaacacctcttcgatggcgtgcacccacgcgacgaagcctccgagcacgacgtcgacgtagccgacggtgtcgccgccgaagaagggcttccccttgcagcactcgctcagtgctccctccagtttctccgccaccgcgaacgtttgcttcaccccctccgccttctcctcctccgtcttgcctctgaacaccggaatccacgcaccgaacagctgcaaacgcacagaacacgtatacaccaatcaatcacacaaatgccaagagaaaatcaagtactccctctgtattttaatgtatggcgctgttgactttttaacaaacgtttgacttttcgtcttattcaaaaaacttatgtaattatcatttattttattgtgacttgatttatcattaaatgttctttaagcgtgacataagtattttttatttgcataaaaaatttgaataaaacgaatggtcaaacattggttaaaatgtcaacggcgtcatacattaaaatacgaagggagtaataatcaacagaagagtactctactagtacatgatcatcgtaacaaccttttcgtcgatgtaggaggcccagaagcgagcgacggcgcgatcgtgggggtcggcggggaggagggtgacgccggcgtcggggaacacctcgtcgatgtactgtacgatgacctgcgactcgcagatgggcttgccgttgtggatgagcacgggaaccttcttgtgcaccgggttggagctgaggagcagctcgctcttgttcttgaagtcctcctcgacgtagtcgtagctcaggcccttgaagctgagcgcgagcttcgctcgcagcgcgaacgggctcgcccacatccccagcagcttcagctcatctcctcctccggccatggcgatcgagtgttctacgcacgtttcgaagattggagcttttggcttctcttctgctcgatcggctcgctctctttgggaagaagtatcgaggacgcagtcacacggtatatatatatagtcggtgcctcggcctgcagtgtttttcgtgcatgtcacctaaatagtcataaaaatatgaaaaaaattagcaacatagattaatttgaaatatatcactccacaaacatacaagtttaaactgaacttctacaagttgtaacaaaaataacaaatatagttgcgaatgtgccataactattttcagtttaatttattatttttgttgcaacttataggagttgaatttggtcttgcatgtttgtggagtgatatatttcgtattaatttatgttgtcaatttttttcaatttttttgataactatttagatgacatgcaaacaacaaggggatgtcccctcgagggatgaaaatccacatccgtgttttttcagataaaacagagtaaagcagagagtatatcatcctgtgcttgcgtagtcctacttggctcagctgctggtaaaacattttgcgtcgatgatctgatcagtgacgcgtaccttgtgccttcttttctcccaaaagaaagtagaagctagcaacacgtgctaatgacccagcaaagatatttctctgggttcaccggcattgatgtggtttttcggaacgtccaaccttcgctgggttcagctttgagaaaatgccaagacgagatcaagttttgggctgtgcgtttcaacgctgaagacagggtcataatcccggtctggaaacatgtaatttcttcctccctacaatcacttgatctgttgtaacctctacgctttgtcttcccaaactgttggttttgggacttgtctaaaaaaacacgtgctaatgacgggcacctactgcgttccttgaatccttcgctccaaactgagccagattttcagcgcatgtcaaaacagaaagctgattagcacacaactaattaagtattaactattttaaacttgaaaaaaatatatttatttgattttcttaacaacttctgtatagaaaacttttgaaataaatacaccatttaataagttaaaaaaatacgctaacgaaaaatgagcaagttaaagtttagaattgaattaaagaatcaggctttaaatttatttcatcaccaagtcaaactcaaaaatattacctccgttctaaaatgtattggattaacatcaccaacaactatgaacctgaactagatttgacgtaacctagcactacgaagctgaacatgttgtttagattcgcagatgatgtcaaatctaatcctacatagctacttcctccgtccaaaatattgtgacctaagatcgggccgtcatacagcgatcaatctgtccgtctgccataccactggcgagtctgtccatccgccccattgccggtgtcgctactcagtgctgccattaccatgctggtgtccgagtccgtgccattggggatcgaagagcagaggaagagggtgcaggcacgggcatttaccaggaggagaggaaaaggataaggagcacacaagcgcgcgcgtgtgccatcggggtatagcgcacgctgcaggagaaacctgtctggagaccgcggccattgcctggacgacgaggagcagcgtcagtgctgcctctcgttcatctccggcctcacctaataatgatggagaaggtggccagcggcgcggacatagcaatcgcttgagggtgtgaaatagtggccatggagattgtgttccatcgctacaaccacagaaaatccccttcacatgacgaaagagaacacatcaagagacacatcagcccactgctagactgctaattaaccagtccgctccaagcgtgacaaacaccaagataaaccatagtgccatactatgacgcacgcaacgacgtacgtcaaagcagctttcaatagtacaacctccgcctcattataagtacaatcataggttttcacgtcaaattttaatcgtttgtcttatttgaaaaatctttataattagtatttttattgttatgagatgataaaatataaatagtattttactcgtgacttatgtttttaaatttttttaaaaaaaattttcaaataagacggacggttaaagttaggcgcgaaaaaccataactgcacttataatggaacggaggtagtaagaaaaaagcggtccatataaactaaactagtgcacaactacacatcagcttcagtctgctcactgaactcgagtaaaccagcagcttctgtttcttggccacatcgagtaaaaatgtcctcgtcgtcgacgagcggttcagccgagcccgcggcggcggtgcgcgtgctcggcagttggacgagcccgttcgtgatgcgcgtcgtggtagcgctgaagctgaagggcgtggaggagtacgagctgttgcaggagacgagggggaagaagagcgagctgctgctccggtccaacccggtccacaagaagatccccgtgctgctccaccacggcaagcccctcgccgagtctctcatcatcgtcgagtacatcgacgaggtctggccggcctccgatggcgccccggccatactgccccgtgacccatactgccgcgccgtcgagcggttctgggcacagtacatcgacgacaaggtaagggcatgtcttgcgtaatttttttttgtctctgaacattttcttctttttaatcctttttagccggatgattttgctcttgctttgatgatatttttgcagattctaccagggcttcgggttttgagaggatcggtggccggagacaaggaccaaaccgcaggtgaaatgtccacgactctacagcgtctggaggaagcatttgtcaagtgcagccaagggaaggaatacttcggcggcgacagcatcggctacctggatatcgctctgggttcgttcctcggatggatcaaggcggtggagaagatcgccggcgtcgagctcctcaacgaaaccaagcttccgatcctggctgtttgggcggatcgcttctgcgcgcacccagccgtggtggacgtcgtgcctgacgctgataaattggttgagttcaccgttcaatatggttctgtgctgaatactgtgaatgttcttcccaagtgatggatggtatgctgctttgtgcctgacgataaattggtttgagttcaccgtgcaacgtgcttcgtgttgccatttagtatggtcactagtgaaagatgatggtcatttacgttgttttgtttcgtttcttcggaactgtagtttccctttccgtctgagtctgtaattttgcttgtaagacttctctctgagtcttttattactacttctctcagtcttttattactactactactactgatgatgatgatgatattctaatgaccatcagccattcgctaccgtatttagtgtcagatggggataggctagctaccagctagcgacgcgtaaagatgaaggttgcacgggagaacggggtcatcgtcagagttggtttgaagtttagataagataaagagatcaaattagagatttattaaagtttgttactagctagatgcagtatataatctgagacttgcgggattgtttttcacgttaactaagatgttaaccagccgaaaacaattgtcaccagcccatagcattatgtaactctggttttatccatatattaggctcaaagtcttaacagatcaccaacccaggtacgagtgctccaaaaggctccaaagttctcaccgccctgcgaatttttattgatttttaagccattttttttaaaaaaatttatttttaaatctgaacctcttagctgcgccatatgcagtggatgtgctagtattgtcttgtcacgtcagtctaaataacgtggctaacaatttcacttttgaaaataagttctttttgagaaaaataaaaaacgccctgcaacacaagagatctggacagacgaggcatcccggcgtcatgtgcagccaagggaagcgatactttggcggcggcgacatcggcttcctgaacgccgttctgtggtctcacattggtcattggccgttcaaggagtcgatcggagaagatccccggcgtcaacggcctcgacgaagccaagttggccctgtagctgacccatgctgtgagcagcgtcatgcctgacgcggacaggctcgtgtcgagttcagtctccattgctaccattgaaggattccaacttccaagtgatcgaaacatcacaaaatcatatcttgtcgctttctcaatcaacaatttgcgttaactttagacgagtaacagcttgtgaaatgtagtaatatgcttttgttatgaaacaaagttgcctccgcatccgcagcctgtagggaccgtctgactatggtagtgcagtgtagggctggagccgcccacatgtggtggaatgcaattatgcaaatgggaaaaagccgcgaattttggctagaatttctcaaaggcatttcaaactacaaatctacagtggtctcagactagccgccgccctaccagaagttgcaaattcatcgtaggcttcttgaatttcaggtgcaccgtgcacgtactcgtaaatcattgccggcggaaactttattagtggagttatagtccaacactcaaacgatcaccaatggtgtgtgattattcaatccattgttttttactttgcgttcacaaccatttttcagtaactcgccaaaaccattttctttctggaactccagttcaaaacagtttttgtttcgactttccaggaggctgaaaaccatatttgtagctcttcacgcgggtataaatagacgcctacattatcactaagcaagatatataagcctataaggcctgcatctgtggtgtgcatgcagcagcaagcatatcgcgcacacgacgagcttccatatatgggaatggacggcgattcttcatactcaccggcattggccgccgtcgccggcgccgtcgcgctggtggcgttctgctcctactacctggccgtcacccgcgccaccggcgacggcgaggcgaggcggcggcggcggcggcacccgccggtggtcggcacggtgttccaccagctgtaccacgtccggcggctgcacgactactacacggcgctgtgccgggagcacacgacattccgactgctcgcgacgcccggccgccggaacatatacacgtgcgatccggccgtcgtcgagcacatcctccggaccaacttccccagctacggaaaggtaagctgagtaaccgggcctcgcatgaatcgcgcacccattccggcccaactacttatgggccgcacgtgagttaaaagcctgttagggcccaattgtattgcgctcatcttacgaatttttttatttatacatttttttattaaaatatttacaaaaatatttttttgtttcaaaaatttacaaatctaatcgcctgccgccctttgggagatcgcccttccagagggcagcaagggacctaaatgcaaattttccagcacaacttgttagctctatgattttacaatttaaaattatattatataaagttagatgaaataaaactttatatcaaaattgtagatctccaggagatctgcaactttgtagttaacaactttttcatttaagatgttttacatatccaaatattcgttacaaaatataaaacacatttaaaaaaatctcatatctacatttcaaacgacattggatggagataaactttatataaaagttgtagatcttgatgagatctataactttgtagtttatcactttttcatttaaaatcatttggagtatcgaataagcattattagtttttaagcaattaaaaccggtggaaagggtttgaacacaaataaaaattttgtatttaggtcccttgccgctctctgggagggagatttttgaaaatatcccttcctaagggcggcaggcgattagatttgtaaattttcgaaacaaaaaattatttttataaatattttaataaaaaaatgtataaataaaaaaaattccttatcttactaacggcatgggaaatttcaaggagataaataaaaaagcgttctaatacaaggtgctttcgttgataaccctagtgacgaaaatctgggagaaggctaaaacctaaaccctagcaggagctaaacgactctcaaagattatcccttagatttctttttcttctatatactccctccgtcctaaaatataaatatttttagacttcgacatagttttcgagttactactttgatcaaccatatctacaaaagtaagatgttttaaataaaaagagttgcactcccttcgtttcaggttataatacgttttgactttggtcaaagtcaaactgctttaagtttgaccaagtttgtagaaaaaatagtaccattttcaacccaagacaaatttactatgaaaatatattcaattattgatttgatgaaactaatttagtattataaatattattatatttgtcaataaacttaaataaaacttgaaacagtttgattttaaccaaagttaaaatgtcttataaccataaatggagggagtgtattatgatagcttgtttaatgataaatctagtaacatcaaatgtacatgattaatctttttttctattaataattaaaattttaaaagtttgatttgatatattctaaaaatacttatattttgggacggatggatagagtagttgtttcttacttgtaaaatactagcttttaacttagcacactcgtttttttaaaaacaaatgtattgtgctgacatgtgccatgtatggtttaagggcccgttgaactccgagatcctgaatgacctgttcggggaaggtatcttcgccgtcgacggcgagaagtggaagacgcagaggaagatcgccagctacgacttcaccacgagggccctccgcgacttcagcagcgacgtcttcaagaggaacgccgcgaagctcgccggcgtcgtctccaaccacgcggcgtcaaaccaatccatggacttcaaggtaagtgcatgcatgccatatcaataccaagctcacgtactgacgtatactacatcgatcgttttcttgatgtccaaatgttcgtttcttcaggggttgttgacgagagcaacgatggactccatcttcaccatcgccttcgggcaagacctcaacacgctggatggctccggcgaggggcgccacttcgccaaggcgttcgacgacgccggcgagtacctcctgctccgctacctcaacccgttctggaagctggccaggctgctcaacgtcggcgccgaggcgacgctcaaggagaggatcaaggtcgtcgacgagttcgtgtacaagctcatccgtgccaggtccgacgagctctccaacaccatggcacaagatcatgtaagcaatacctcacatcagtggcatgttggtacatcaatttgtgagtgaccagacgcttgaaactgagctgaatttcgtaactgaaacagcgttccagggatgatctcctgtcaagattcatccaggcaacgaccagcgattctgggacggttgattacaagtacctgagagacattgttctgaacattgtcatagccgccaaggactcgacatcggggtcgcttgcttggttcctgtacatggcgtgcaagcgcccggaagtccaggagaagattttcgacgaagtcatggagaccaccaacgccggggactgcgcttccatcgacgagttcttgacgagccttaccgaccaagcactgaacaagatgcactacctgcacgctgcactgacggagacgctcaggctgtacccttcagttccactggtgatcactgatcagtcaatcaattgaccaatgaacagtatgatcaggaagttataatgagagtatatatcaaacttaccgttgcttgtttgtcttgatgatttaggagaacaagcagtgcttttcggacgacgtgttgcccaacggttttagcgtcagcaagggggacggggtattctacatgccctacgcgatggggaggatggagttcttgtggggtaaagacgctgaagctttccgacctgaacgttggctcgacgagcacggcgtgtttcagcaggaaagcccattcaagtttacagctttccaggtgaaattttactgaactcaccatcatcgtgatcgaattttctgaacttggtgatgagacagtcctgaattctgactacctgagtgaatcttgtgtaggccggcccaagaatctgcatcgggaaggatttcgcgtacaggcagatgaagatcttcgcggccgtgctgatccgttccttcgtgttcaaacttcgcgacaagaaggacaacgtcagttacaggacagcgattacgcttgccatcgatcaggatctccatctgactgctacggcaagatgagtgtacagtgtacactatacactatacagtgacagtggcacgtagggcagctgactctactcacgctagtgacagctccttgtgaaaacataataataatatctctcgaaaataatatagctgcaaacttaattgtgtctgattgcaaatattccgtctagcttgctggaataaattactatttcccgtgcatctaaaatttatttaaaattatacccatcctaacactactagaaaaatagtttttccaggcggcaaaaacagttttgtaagcaaaggcctgcgatgcccgcctacgaaaatcaggcggcatctccattattgtaggtgttagattccacctgcccgtgaaaatcatcaatgcgcacaaaaataaaaacagccgtcaccacccctacccgccggcgccaccattggcctcctcggccccctcccaaaacagccgtcaccacccctacccgccggcgccgccaccggcctcctcggccccctccccctccggcagacggctctccacctccgtccaaggggagtgccacttccgtaggccagctctcctcttccatccagacatgggaggggaagggcctgcgttgtctgcgccgccgctgccatccgctcctccgctgtcacaccccaatctggcaccgccgtacaacggcacctgacaggagcgtgtcgtgggaaaaagggcacgaaccgcttcctacgaaactgcgatctcagtaccagtcccaggacatagcgctggtacccacggtgacaaatatgaatcattgcaatccttaaaagaaatagaggacttatttaccttaacttaggttgcagctcagaacagcccgagattgcaaccgacgacgcggacgaggaaacaccaacaacagcggcagcagcggaaccaacggactaacacccaacaccacaggcgacggctgggaaccaggacgaaaccctaatcttcactttacgtcatcttcaacttccgggcggaggaactatatatatttatatagagcaagggtgagtactttcgtactcagcaagtcacgggaatttaggtgtttaatgcaagcttagaagagaggcaaggttgttttgcaaatcttttatttgaagacattttgaaatcactaagtgatttatttctttctaagtttggggcgaaaagagacttgcgtctcgattcgactttaagagatgtttttcaacagctcaattggtaatgtactgacctcccgggtcagatcattacttcttggctcccagagccattccacttgattaatcggctcccagagcctttttcattttctcggactcccagagtccagctgcccagcagcacaacaatccgcttccactcgggaagcctagtctatgatgcccgtagacatcccgaatcacacagattcgtttcttgaccactcaggtcatccatctgccacataggctgataatggtaacgattccccaccagaacaacttttcacaaagcacaggcaaacaaatctacgctacaggaaacacctcacatccgcccatgaccgcgggcacggctgtttgaacagttagttaatctctgcagagggggtatactttacccacacgacattactaacccggatcacccagcccgtgagatcagccacgtcgggagaccttaaggctttcatgacaaggcatttcgaaagccaacacaggttcaccatatgccaacgagaggggtcccagaccaacaccagattaggtcccagaccatactgtgccaggaagcccgagggttcttcccgacaccaccccgttgaatccacatgtctcttggcatcatggctccccccgattagctaattactcagccaggggcgtcccattgcacccgtgtggtcgcacttgttatatgctcggatgaatttcccacaggaatcagtccttatatgcgaatacgggacagtgccacacaggcacaacccccgcatcgcgagttttcacaatccattttattttcaaacacactgacgccacatgtcgggttttcaaggcttctcaaacccatttcccaagttttcgacaaacaatggtgtatgtgggatatttggtatacgcgctcagagagcacggataccgaggttccacaaaggtggagtgacaaggaaatcagggtagtacaacctacaggaattagtgcgagtgtgcgactactgggtaggtccgtcggtttggcacgcataccgagaccaagcaagttgagtgtgtgattctaataatgcaagttgcaaacaaaataataatgattttccaattataggagcaattggtcaaagggtgacttgccttgctcaaggtcttcacgaagcttcacgaatcttcgagaaaacccgcgatcgacgaaaatccggtaaccgcaactatacgcaaacaattgaaaacctaaacaaaagaccaaaagaaagatcctatttagactaattagtagtgacattaaatagatctcaattttatggaaatactggaagttgaacggagtcaatcagagctacggattgagagatatgaattttggaagtttaattggaatttctgggcaaaggaagatatttgtggaacaagaggaaattgatttatgaaatttatagaaataatattctcaagaatattattgaccgtcactgacgtgcgggaccaaggaaatgatttatggaattttgggaataaggaattgatttatggaataggggaaaaagggtttattaaatcccttgaaaaaagaaaggagggatgccatatagacttcctcgggcggcttaggcgcggcccgaggggtttatgcggcttggccggacctaatgggccggcgcgagcgcgggaggggcggcccaagagagggggcgcggggagagagaggccgacgcgggtggacgcggtccaccacgcgggacccacatggcggtggttgggttcacggtggggagggcgcacgcgggggcgggcgctagggtttcgggggcgcgtggtttgggcgcggcgcaccgggtggacggatggtggcgggcccacgtgcagccgcacggcttgccgtggaccgtgcacacgggagggaagacggagggagggggcggctgaccggcttggcccggtcaaggccgaggtggcaccgagatggcgcctacgtggcagccacgcgggccggcgggccgagatggacggcggacggcggccgagttcaccggagctcgtcgtgacgattcgagagagagggagtacacctgaacgatgggacggacgagagggagtgagccaccggatcggattcgccggagggaggccggcgacgacgaatcgcggcggcgcttgccggcggcggcaaaagagggaaacgacgacgacgcgatgagagctcgattcctagggacttgagcatctacgcgacctctggagttcatttctagagtcggattgggtgaggctacaccgaggaaggccggcgacgagcggctactactgagtttgggcagcgacggcggcgagcctacggcgagcagcggcggcggtcggggcggcgccagcttgctactggaaggctactcgcactactgcccagagctaaggagaggagagggagcgaggagggagaacgggagatgcactattgagccgagacggacgctgtgacgagcggccgacgacgcgggagcgagctctccggcctcgggccggggaaggggaaggagacggcgcctggagtcccgcgtcagctcctcgcgcgcacgccggcttcaccagcacgcgcgatggaggagggaggcgaggacggcggtagcaaggcggcaagggcacggtggtggcgagggaatgaacgagagggagatggggtggctcagtttactaga

SEQ ID NO: 7594 - DNA, 20982 bp, Oryza sativa
gaaaactgtgctaagacatcttactccctccgtctctaaatataagggaatttgtttgttcgtgtagtaggatgtatcacatccaatcaaaatcttttatactccctccaacctaaaatataggccgtgtttatattcaaacttttttcttcaaacttattacttttctgtcacatcaaatgttcggacatatgcatggagcattaaatatggacgaaaaaaatcaattgcacagtttgcatgtaaatcgcgagacgaatcttttgagcctaattacgtcatgatttgataatatggtgctacagtaaatatttgctaatgacggattaattagacttaatagattcatctcacagtttacaggtggaatttgtaatttgtttagttattagtatatgtttaatacttcaaatgtgtgtccgtatacttaaaaaaattttgtcacacgaactaaacacagccatcataacttttgggtggatgggacatattctagtatagtactattatatgtctcattcaccctaaaattgttatattttaggacggagggagtatattataggagagagggaggaccagctgaaagaaaaacaatcaagatacagaagtcattctcagccattaaaagaaagaacgacaacttgttggaagcataataaataaacctgagtaaggtaatgcggtgctcgtccaatgctccagcctactccctccgtcccataaaaaaataacctagtaccgaatatgatacatcctagtatttcgattatggacatacatacgtctagattcatagtagtagaatatgtctggttctagattcgttttttatgggacggatggagtatcgacgaatgacaatcccatcattaattatatcctgcctatttggaacctacccggctataactaaagagatgcattatacagaatgacaaagatatcccatcactaattcgcgcaaaatacagaagggcgcatcactcagcgcggcaatccacaactaaagccaatctaactaaatatggaaaaactaagaaatgttattgataaacactcaaatataagaaatatcatcaacaagtgagagttacctaaaatactatcatacatgtgattttatcctagaaatatcattgttgttaagtttccattaatcggatccatatgccattataacttctttgattttgaaaaatatcataattatttgtttatttgaagatatgttattacaatttgaccgaaattagtaatatgccactagtaccatttcaatgtaattataaaaaagatttggactaaattacccctcctcctctctccttttttgttcaggatccaatgaagtcatgccaccggcaatggagctaacggtggagtggtcgggtagtctaggtggtgggggcgagtcctcaatgcttggtaggaatcagagcttctcatgttggctatgttgtggtgttgtggacgacgagagtggagaacagagggagtgcctatccggtgagttgggtggggattgccggatcggacttgtggaagagatgacaaatagtgagagggagaaggaagaagggggtgaagggaggaggaggggggcatttgtccaattttttaattgtgttgaaggggtacgtaatggcatatttctaatttacatcaaattgtaatggcatgtctcttaatatacgaatagtaagaacatcctgccgctgtggatctccattctctcgtccccgcttagtctgctgtaattggatttttttttctctctccttagtctgttgtttctctcctcccttcctctgttgtcggttgatgtaagtaacctttgttaatttaattcacgtggggacttctcccccagtgttttcagttaaaaaaaattatacgaatagtaatggtatgttttgaaatcgaagaaattacaacaatatggattcaattaacccataaataattgctcatggaactattcatgttcaacccttgacctcccatatttttcaaaacaaaatacaaatatttaaaaagagattatataatccaagtatattgtatcttaattgcaatcataagataaaacttcctactatttaagagtaactaattgtcaaattgtatgtgtagtagtcaacgctaaagtatattttaaaacgtaaggaccgccaaacaaaaccaaaaaaaatgtcaggaacaaatgtcattctctatcggacatattatatactgtatatataaaaaagaagaaaggcgaacgtgttgggaagcttttcttcttctttttttttatatacatatagtagatgaagtaatctgggagcataataaacactaaagaaacctgaggaccacgccaagtcattgccgtcgggccagttgattagtgttgtactgctgtcatgctgggctagtcgaacactaatgacgtatgacaggatatcttccgcttctgattgacagatatcccatatctccctgcccccttaaaaaaataatcgatagcgaaactattcgttctcattgtcaaactttgatctcttgttttattttgaaaatgttacgaagaattaaaacgatatgacaccatccaaagtatattgtgtcttaaatttcacgtattttaaccattcatgaggaattaatgatacagctataattgcaagtaaaaaaagatttggagggagagacgtctcacaaaaaaattaagaagaaattgtgaatatattgtggattgaacacgagactttaagattgaaaacaacaccccttgctactgcagtatcaaatgcatctctataatatgtcttgtctaaaggtaaagcctgatacagaatattaattagacaatacacattttatttagagactattcccttaaatttttgaaataataaatactctaatcattaattaaaaagttttttattactattattttatattttattctcatgcagccaagttctattttataaaaactaagagttgttattcatgagttgtcaatagtaacggcaatgttttatctctcttctctctgtttttccgtgtcagcaaatattcttaattagtaatataacagccattgtacatataaccggactagtgaatgttgatcgacatttaaaaaacggagggaggactaaactcattgcaaaaaccaaaaataaggaaataataatatataaatgtcattgtcagccattaaaataaataaagacaacttgctggtggaagagtcaagagtggaagcatgataattaaacaaatctgagaatagtgtagtgctgtgctagtccaacactccaaacatgtttacatgtcgacggctgacaagatatcttccactattttatcatgcagtccacatggagtaccccataagcccatcgctaattatatcctgccaatttggaaccttctcctatctataaattaaagagatgcattcgcgccaaatacaaaaggggaaaacactctcagtcgcgcgtccagcaatcggcagctagctaatcccatctcgttgttgcttgtagccatgggagcggaacgcggcggggactcttgctactctccggcggcggtaatggccaccgccggcgccctcgctctggtggcgatctgctcgtacctggccgtcaccagcaacaagcagaagcggcggcggcggccgccggtggtcggcacggtgttccaccagctgtacaacgtccggcgcatacacgactaccacacggcgctgtcccgcgagcacacgaccttccggatgctcgtgccggccggcggcgaccagatatacacctgcgaccccgccgtcgtcgagcacatcctcaagaccaacttcgccaactacggcaaggtttatctcctctcttcttttctttctttttttttttggaatttcacttagataggtatgattttttaaaaaaagaaactaagaagatggattgacgttatattttttagtttaaatttaacgtctacaagttgtaaaaaatatatatggttgtcaatatatgtatggtaaccaaagtttaaatatttgttttcttttgttgtaacttttggaatttcacttagataggtatgttttttttaaaaaaaaataaattaagaagatggattgacgttatatttaagtttaagtttaacatctacaagttgttaaaaatatatatatggttgtgaatatatgtatactaaataaagtttaatttgttttcttatattgtaacttgtaaaaaaaataagatttggagagagagacgtaccttcaaatattttttaagagaaaattgtgagtgtattggaaattgaatacataactttagagttgaaaccacacaccccttatcactgtataatcaagtgcatcttttttttttaatataacttgtagaaattgaaattggatttaaatgtttaaagattgtttgtaaactgctacagtatacgtagcttctagttaagttaaccctatatgtaaacctagttgaatattattccctccgttgaaaattataggacacataatatttcggaaagtcaaattttgtgtgtttgaccaatgattaatcaaattataagtatatttagtgcataaaacttatatcttttaaaaaaatttcccaagacattagttctacagataacaagaatatattttataggtggtcagtggtcaaatcttgtcttaagtacttgttccaaataaaatatgccctatggctataatctgctacggagggagtaacttctactatatgaaaaccacaattctacgcaatcatgtttggagttcgccaccaagcactgagagtcagtgtgttacatctacatgaggtttaaatatgatgcttaaaaatgacgtttaatagtttaaatgttttctggaacaaatagtcacaagatttctcttttattatgggccggacataagcctcagatgcattccggccttccacggacgccgtgctcgtctgataggcccattaattatcagcctcggtcgtaatcccgttccgacccaactatcaagggcccaaacagatcatcataaaccagaaatggaataagtacatgttaggtacttaggtcccttatcttaacattgggtttgaatcatttcattgaacatcaatatcagatataacacgtccctcaacttacgtctctcaacttgtaaaactgatgtacccaaaatcccaggacagtataatgccgatttcagctaaagtatcggctaagtcagcgtgagacccacatatcaaacgtctcactttaccatctctcattaggccaggaggtagacaatgagcaacgtggacaggggtagcgaccgatggggagaggaggggagaagacgaagaaagagtgttctgactctgactaaaataccctgacatgtgggtccaacactgacttagctgtcacctcaatcaaaaccaggaacgatactgttctaggacttctggtacaccagttttgtaaaaatgaggggcgtatgtatatctggttttgcattttaagaagacgattcaaacacgacgttaagatgagagacctaaaataaacttatccactcagaaaatcacaatagttcgaacatcccataggtaggcccatcggctttgcgcaagcagctatttcatgtttgtgccagtgtcgtggaagtcggccggcacagccgtttaatcgtccgtcaaaacggaaacggtagccagaccgtaccgtatcatcaagtcggagcaacattactatttcagagtaattatacagttgtatggcatgattagtcggttatttatcgataaatcagatgtctgtttatgaaactaacataaacttgcaacttgcagcccagctgcactattttgactaacaagcccaatactattgcgctactaaccatcagtattgatatctattgaactaataaatggtattttcataatatagttagagatttatacaaatattttttattaagatgatgcattttgtctccaccgttgccattaacatcaattatgtacatcttagtgcgaacgccaaaaatccgtataattccgtttaatcatccgtattacgattaatcgcttgacggcacctcgtccgtccgccacccgtatttcgttttccacgacactggtttgtgctgacacgtactgtacgaaacaaaggggccgtttaaccacgggaacgccaaggacctgttcggggacggcatcttcgccatcgacggcgagaagtggaagcagcagaggaagatcgccagctacgacttctccaccagggccctccgcgacttcagctgcgccgtcttcaagaggaacgccgccaagctcgccggcatcgtctccaaccacgccgcgtcaaaccaatccatggacttccaggtaaattaagcgatcgtaactaccaaatggctaataatgcacggcgccggtgagacggtgagtgacgtacggtttgtgtcgaacgtttgttcagggtttgatgctgagagcaacgatggactccatcttcaccatcgcattcggcacagacctcaacacgctggacggctccggcgaggggagccgcttcgccgcggcgttcgacgacgccagtgagttcaccatgctccgctacatcagcccgctctggaagctggcaaggctcctcaacgtcggcgtcgaggccatgctcaaggagaggatcaaggtcgtcgacgaattcgtgtacaggctcatccgtgccaggtccgacgagctctccaactcacacgactccgtaagcaacccctgaaactaagcagctcactacactccggtttgactgacatatatatgatagatccatttctggatgtgtaactaagctgaattttgtatctgtacagggttcgaggcaggatatcctatcaagatttctccaggcaacgaccagcgattctgtggtcgattacaagtacctgcgagacatcatactgaacattgtcatagccggcaaggacaccacagctggggcgcttgcttggttcctgtacatggtgtgcaagcacccggaagtccaggagaagatctgccacgaagccatggtggccaccagcgccggggacaccgcttccgtcgacgagttcttgcagagcttgactgaccaagcgctgaacaacatgcactacctgcacgccgcactgacggagacgctccggctttacccttcagttccaatggtgattaattatgatcagtttcatactaccatcgagctaattaatcaaacgacatttctctcatcgagtgcgtaacaaacgtctcttgttgatgatgatccttttctttttcaggaaaacaagcagtgcttttcagacgatgtattgcccaacggttttaacgtcagcaagggggacatcgtgttcttcatcccctacgcgatgggccggatggagagcttgtggggcaaagacgctgaatacttccggcctgaacgttggctcgacgaaaacggcgtctttcagcaggaaagcccgttcaagtttacagcatttcaggtgaagtttaccgaactcagcacacaatcatcaatttctctgaagaagttggtgactagatttctgaattctgtttacctgcttcttccgtaggccgggccaagaatctgcctcgggaaggagttcgcgtacaggcagatgaagatcttcgcggccgtgctgctccgtttcttcgtgctcaaacttcgcgacgagaaggagatcgttagctacaggaccacgcttacactcgccatcgaccagggtctccatctgacggctacggcgagatgagtgcatgtcacactacacagcctgggcacatactgcagctgtcacctgtacactgtactcaatgcaagtgacagctcttgtgtgccaaatcgaatgatatctgtagaccttaataacgtctgatcgcgaatgatccgtattgcactctggaaataataaagctgccggtgcatgtacctaaatagcagtcagcgtcagagaaacggtgcccgacgaactatacattcggttttcagttcagatggcacacgttttggcttttgggcgttggtgttcatggcagatgcaacgcattcatcagtcatcactgtgccgcgaaatgtatcatggacgatcagacgatcacatcgtgtcaattaaagctacagcgccatgctgactgctgatgttaatcttgatctggacatggatcgagtagacatgccgatcaagctcaggaagacgcgtagaaaatgcaccgaaaaatgaatgaatcgaggaattggagtacagtgaatcagtggccatggcgtcagaatcaatggatcagcgtgtgaccatcctagtggttatagaattagttaggccattagttaaagtgacagtctacaacacacatcaatccagttcgactgcaataatgcaatgtgattgataaactaatccgtcgcgaccatattaatttccgcttcaaatatgcatggttgccgtgtcaggcaggacgcgggcagggcttatccgagccgtcgccatccatatcatagatgcggtggattggtggaacaataaactagaacaacaaggaaaacctaaacagaaggtggccatgcatggaacaagctgatttgcccaggccttgacttggtacttataattttagtactagcaacagtagctattagttagatcaagctagaaacatgtgcgggaaggagtatgtagggggtcatctttaggtggtgatgttcatttttttttaaaaaaataaagataaggatgaaattaggttatgcaaaacaagaatgtcattattttagttgagttttaattattataaatttaatagtggattttcgtttatattttaaaacaacttctatattgttgttttgtaaaacacaccgtttaatagtttaaaaatattaatgaaaatggaggtaaaattttacttcctctgtcaaaagtattatgaacatgagacacagtactagaatatgttatattacatattaaattaatttattttaaaatttaggaagtactttctttaaccaaaagatttaaattttaggaaagaatcaagacacgtagggagtactatcttaatagcacaagaacaccgcctttctcagcgagagaaatgggtacccgtgcgtctctgacatgcatcatgcatgagcaaaagtgtccgatacatataaaatggcgggaggagctagagtacgttcgagcctaccaaccagacacgacggccgtgctggtgcggtgcaggcacgtactacagtactaccatccatccgttcgtcacgttggattcttggatacttgtgccacgggctaaacatactcctcctccatacacaccgtcaccgagcaacctgtcctggatagcctaatgcagtacaacccacttagcttaatcatcaaacaaacatcgccacaggaactatggttaactggagagtggtagtttaatcctcgggaaccgggctgattaaaaagagagagaaagattaatcttctcgagagccgtggttgcaaagtttgcaagctcgtgggcagcaaatgtgtctgcatcctacaagacgatgtgctcgtgtacgtacgtttgctcgccgaggaggagagagatgcgagctagctagcgtggggttgggttgggttgtggtggagtggctacccaaaaaaagagcagtggatcgagtaggatgatggactgatgtccagtagcgccgcgtttgcctttggacgcgagcgagtgaccggccgaatctggtttggggatggatgtccgggttttgtctcatctccttcattcctcggtctcttccccgccatggcaagttcaaaatgcggctttgctccggggcaaattcaaacgcatgacgggtattacgtgcaatttgtgatgaattgcggtttcgcatgatggatggtgattggtgatccatacgccccctgtgcaccggcgggcggcggtggctctcgtcaaagcgtcctgagttgttgacgcggcttcacacgtccgtcgtcaaaaccccggggccccaaaccggtcaaccgaccattgaccaccaccacctcggcacctcctccatatacaatggccgaatggcgccgtcccgccttgtctcactccactacacacctccaccgccgctagctttcaaaaaaaaatggacgccaatccgcctcaccggctcaccaccactccagccactgacaggtgagcccccactcgaaaatatctccgtccgatccacccagcgcagtcgcagcggcacacgggcacgtacgcacgcacgcccgccggaatagggaggaaccccgatcccgaccggtccagctatcgccagtccacatgagagtacgtacgccacaggagccatccgggccccggtacgcgcgctacgcatctttcgaacccaaacccccccgcgacgacgccacgccactgccctccagctcactgccagtgctcccccatcactccactctccccccacgtctcgcctcgccgcaacagagaagcttttcagcttactccctgtggcaccctataaaacctcgcgctgcctctcctcgccggcattgtattgtacacacgatggagtggtcgtcgatgcggtggtggtgcctcgccgtggtgctcctcctgtccacgccgctgctcgccgcgggttacctgcaggagaggaagaactacatcgtgcacctcgagccgagggacgaggccgccgccgccgctggcgacgcctccgtcgaggagtggcaccgctcgttcctgccgcaggtggccaagctcgattccgactccgacggcgccgacggaggcccgcgcattgtgtactcctacagcgacgtgttcaccgggttcgccgcgcggctcacggacgaggaggccgaggcggtgagggccacggcggggtgcctcaggctgtaccccgaggagttcctgccgctggcgacgacgcgctcgccggggttccttgggctccacctcgggaacgaggcgttctggagccactcggggtttggccgcggcgtcgtgattgggatcttggacaccgggatcctgcccagccacccgtcgttcggcgacgacggcctccagccgccgcccaagaactggaagggcacgtgtgagttcaaggcgatcgccggcggcggatgcaacaacaagatcatcggcgcccgcgcgttcgggagcgccgcggtgaactcgtcggcgccgccggtggacgacgcggggcacggcacgcacacggccagcacggccgcgggcaacttcgtggagaacgccaatgtccggggcaacgccgacggcacggcctccgggatggcgccgcacgcgcacctcgcgatatacaaggtgtgcacccgcagccgctgctccatcatggacatcatcgccgggctggacgccgccgtgaaggacggcgtcgacgtgctgtcattctccatcggcgcgtcctccggcacgcagttcaactacgaccccatcgccatcgccgggttcaaggccatggagcgtggcatcgtcgtcagctgcgccgcgggcaactccggcccggaccccggcacggtcggcaacggcgcgccgtggatgctcaccgtcgcggccggcaccatggaccgcgcgatacgcaccaccgtgaggctcggtaacggcgacgaattcgacggcgagtcactgttccagccggggaacaactccgccgcgaacccgctcccgctcgtgtaccccggcgcagacggctccgacacaagccgcgactgcagcgtgctccgcgacgccgaggtgaccggcaaggtggtgctctgcgagagcagaggcctgaacggccgcatcgaggccggccagaccgtggcggcgtacggcggcgccggcatcatcgtgatgaacagagcagccgaggggtacaccaccttcgccgacgcgcacgtgctcccggcgtcgcacgtcagcttcgacgccgggaccaaaatcgcggcgtacgtgaactccacggacaacccgacggcgagcatcgcgttcaaggggacggtgattggctcgtccccgtcgccggccgtcaccttcttctcgtcgcgtgggccaagcaaggccagcccgggcatcctgaagccggacatcaccgggcccggcatgaacatcctcgccgcgtgggcgccgagcgagtcgcacacggagttctccgacggcgtcggcctctccttcttcgtcgagtccggcacgtccatgtcgacgcctcacctgagcggcattgccgctctcctcaagagcctccacccggactggtcccccgcggcgatcaagtcggcgatcatgacgacgtcggacgccgtggaccgcaccggcgtccccatcaaggacgagcaataccgccacgccaccttctacgccatgggcgccggctacgtcaacccggcgctcgcgttcgaccccggcctagtctacgacctccacgccgacgactacatcccctacctctgcgggctggggatcggagacgacggcgtgaaggagatagcccaccggccggtcacctgctccgacgtcaagaccatcaccgaggcagagctcaactacccatccctcgtcgtcaacctgctcgcgcagccgatcacggtgaaccggacggtgaccaacgtcgggaagcccagttccgtgtacacggccgtcgtcgacatgcccaaggacgtgtccgtgatcgtgcagccgccgatgcttcggttcacggagctgaaggagatgcagagcttcaccgtgacggtgcggtgggccggccagccgaacgtcgccggcgccgagggcaacctgaagtgggtctcggacgaacacatcgtgaggagccccatcatcatcccagccacggccgcgtagtaattttttgcaacttcagcatgtacagtatgtcagtaaatagctaagatcaataaagatccatcaccttggtttgacctgtgttctgttggtcaagatgtgaagaatgtagcactccttgactagttggccgatcctgtcaactttgacagctactactggagtactactaattaatttccatcttattcatcagaaactatacatcagagattatcattaatagatgagtcaatgctcattcatactctctccgtctaaaaaaaagacaaatctggtttccgtacccaatgtttaacaattataaaaaaaattaaaaaaacaagccacgcacaaaatattaatcatgttttatcatctaataccaataaaaatacgaattataaaaaaatttcatataagacggacagtcaaagttagacacgtaaatttagggtttgcctttttttttttttggacggagggagtattcaaagaaacaggtggttagatgcttcagggagtacagtttgctctgctttgcttacagaagaactgcttttgtttggtagtaggaggacaaacctattgcacatccatttccagcctgttaacaattgttgcgtcttgacgaaaggtcaggctaaacagtagtagtcagcattaaagtatgtacatgtagtaccaaatgtatcatctgctttttgtttgcctttgcacatgccctctgcaaacctgtcttgcgcttgctgtcacgcttactcagtacttagatctgaagttcatgtaccgtaattacgagcagttcccatctaaaattactggtcattgtgctgtattatgctgtactgtaatcttcaaaactgcacatgttcatgccattcactcacctcatgactgtacttttgtgaagacatgaatttttatccgacttcaaaagaaggcaaccgttgtttcaaccaccctactttcaaatgaaaattatcctagttcgtctgcagcaagcaatgccatggtggatcttcattgttcagaagatgggagatgtcactaccgaaacaggaatggcttgcaaacgtgtcagttgagacaatcaaattactgtttctgaaggtaccagagcagtcaatttgctgggacctccaagtcccctgagaccacacaaatattcagagaccacaagaaaaagatcaaagtcttcgggaagaatcaactcacattgatccgtctctgtggtcatgaactgatctgcataactgtgaatggctgatgtaaccagatcctgaatattgcaagtgaaaccaggaggcacgatgaaaacaaatgaccacttctaaaaaaaaaaaacaaatgaccacatcaaactgttgttttttcagcaatgaatttgatgcagtccttgtttttttcagcaatcaaactgcacacggtaaggtttggtcccgtttactttttaaaatgggacaccatcttaatataaaacatcggcaacggtctaactgttcgaaaaaaaaattgatgcagtccttgttttgcaacagaactaatgagaacatcgaacatggtggcctcacaaaagcagcagatatttttccatccgctactattcggatcttcaagaattccagatggagtacatgtctagctgaaagcaagcaacacacatcagcaaaagagattgataaactgaaaaggggaaggatcagattccagatcgtagtacttcctgctactatcctacagtactatcttctacaagcaaggatcatggagaaaagcttgatgaaagcattcaggcaaagcaaccttcggatgctgatgacagatgccaaaatgccatcaattatactgaccggggaccccagatccagcttgccgattcggcggctatcgcaagctatcatcgtgtgcaccgtgcagtgcagacaaattgttccaggtcgcattgatcaacagagggaggtcatcaaaccgagtggaaagggttatcagtggaagggagatcgctcgccgcgcagtcgctgacggctcgccggagattggccggcaccaccgatttgatccgcttcgtgggggagattgggagaagggaaactatatggtttgggttggggctctgaagccatcgtatgtattgggccggtatgctgatgtggctgaaaagtgggcccaatatagtactaaggtttgttgggccgaactaggccgttccgccaccttggcccaatggtactctgtctgactattgcttttgaaaggaagaagtcagtcaggtatggatccttgagtacgatccaagcaaaagatgagaacgagaagattcagatataccaatcgtcctaatcttctgtcattgcagatactactacgcggtttcagtgtatatatatgtgaatccatctgccaaaaacggagacagaatcatagataccagtataataattccacgggattcaattagccatccacagatcgaactcgaaactcgaacgtttgttcctttctgaacccagagagacagcgaatgcgatcgtttcccacccatgagaccacgatcatgtggctgatggcgtgatcaagaaatgagttttgcgcgtgtgcgtggcaaaaacggttggctctggtcagggcgtcaggccgttgggcatcagtgcagcaccctgatctgatcatcagcggattcagaaagtttcagttatcatactgatccgaggaaccttagcggcatggcatggcactcgtgatgcttagcctgtaagaaatggtgagacgtcagctattcaaagatgcattaaaatatttgcccttgtcaatgtataattggtatagtaaccattcaccctatccaataatggggagaaactagcagtttgcacgaaatggtgtctgtgtctctagcagtttttgtgaagaaaaaaaatattctatcaatatggttttggacaatgttccaagctgagattataactttgaatgtttatatatttttattttaaaatgtttaaattggatcaatggaaaccatatatgcatattcgactcgaaaatgtgtattatactagattagttttaaattgttctgcagtaggaattaacggtcaagtagcatcttgaaatcgtattagatgtccaatgtggcatattcttttgatgtcgggaaggaagtagtccaccaaaaagtaaaaattacaattgaaagctcaaaacacatattagactcgagcattgaaaaaaaagccatggagaccttttcgtacgtgacactgaccccacctacggaatgtatgagaaaagacaaaaaaagaagatttacttttttcagtataatatttacactccttccgtttcagttttatatgataagtctttcaacaatttcctagccaaactaagtttataaaaaaaattatcaacatataaaatatcaaattagtttcattgaatatattttgataatatgtttgttttatattgaaattattatgtatttttctataaatttgattaaattttaaaaaaagttgattagataaaaagtcaaacgatttaaaatataaattgaatagagtacattatgagttgcggtctttcaaaaagaaaaagagagagaaaaaataaataatttcctgctaagcaaatactgtccgtcacgaaatctccaatcgcgtcatcagctataccaacgcaacgcgcgttctcctcccccacccccctctccccagtgacgatgacacgtgggccccacacgacgttaggaacgaggcggtccgctcgcggaactataaaccggtcagcgtccgcacggcaccaaccttccttccttgtgcagttgtgcgggttggccggcccgcccgtggatcgtcttccaaccgggcgcgagtcggagtcgcgaccgcgaccgcgacctcacccaccgtttctcgatcgtttctctccctcctcctcccgcgatccggtcttcttcctcctccccgtcgtgctcgccgcccacgactcctcctcctcctccaccaccacccctccacgacgcggcgggcggcgagcgcgcgcctcgtctcaccctcacgcctcccacgccttggaacccaattggagatagaagaggggagcgcgaggtcaaaccaggggaatcggaatcggaatcggaatccgcgacgagacgaccctacccccgcgctccggcgaccgaccggcggcgatggagggcggaaaccacggtgggggagggtacccctacccgccgccgcagcagtatccttacccgtacgggcagtacccataccagtatcctccaccgcagcagcagccgccgccgccctccgcctacctctcgccgtcccgttcgttccacggttacccctccgcgccgccgccgcagccgcagccgcagccgtacgcgcaccattccgccccgctccagccttacccgccgccgccgcagcaccatgcctacccgccgccgcagccgcatccgccctcgccgtacgtctacgacccttaccacgcgcccgccgcggcgtacccttcctacccgagccccaaccccagcccgtccatctccccgagctccagcttccaccaccaccctgaaccgccatcgccatcgccctccgcgccgtcgtacccctccattgcggatgggctcgccaacatgcacgtctccgaccgccacgactacccgccgccgccgtcgccggcggccgtgcccgcggcgtcgtccccctccgtgctcccgccttccgcgtcgttccccggcggcgggagcagccacggcggtggcgggatgcagatggtgccgtacggccctcctgccggagggtcgcagcacggtgggatgcagatggtggcgtacggctcgccggccggagggtcgcagcacggcagcgtgaggccatccctgaaggtggtgctgctccacggcaccctcgacgtctgggtgtacgacgctcggaacctcccgaacaaggatctcttctccaagagggtcggcgacctcctcggtccgcgcctcatcggcgccgtcggcagcaaaatgtccagcgccaacatgaccagcgacccctatgttaccatccaggtctcctatgccaccgtcgcgcgcacctacgtcgttcccaacaatgagaaccccgtttggacgcagaatttccttgtccctgttgggcatgatgccgccgaggtcgagttcgttgtcaaggacaatgatgtcttcggtgctcagctcataggcacagtgtcgattcctgctgagaagctcctttttggagaaaggattaacggcatctacgatgtgcttgagtccaatgggaagccatgcgctcaaggtgctgtgttgcggctgtccatacagtacatcccggtggctcagctcaaaatgtatcaccatggtgtcattgccggcccagatagcctgggagttcctaatacttacttcccgatgcggcgtggcaatagagtgacactgtatcaggacgcacatgtgcctgatggttgtctcccggatttctgtcttgatcacggaatgcgctatcagcacgggcagtgttggcgtgatatctacgatgctatatgccaagcacggcggttgatttacattgtgggatggtcagtgttccacacaatccacctcatcagggaaggagttgagaagatgccatcacttggggaactgttgaagatgaagtcacaggaaggggtgagggtgttgcttcttgtgtgggacgatccaacatcaaggagtattcttggaattaagacggtatgagttattcattgagttcaaaattgctttgttcatgacttttacaccgcacacgagaacatgattttgtgtccaaactccaaactgcaaatttataaattgaagtgctgcaatgtttatggaaaaattgggaaacattggcacttgaagattgtctaatcctcaatacacaaatacaaaaaggcatcagaaagggcatttttacaactgctgttatcacattaaagaatttacaaaacatccggttgcatcaatataacattgagaggatcttcatcaagctcatctatttcctccaaatttttctgtaatagtttggtagcttgtcctttaggtgcatgtaccttatctttggtcccatgtttcatgatgctggaaagtttgaagtagattatgctgcttatccacttgtaggatggtttcatgggcacacgagatgaggagacccgcagatttttcaagcactcttcagttcaagtattgctttgcccacgatctgctgggaaacggcacagctgggtgaaacagcaggtattgtgatgccacacaaacttatccattatgatattccatttttgtttgtcacctaaattactacaattgattgcaccaagtgagtggtttcaaactttttatatgtctactcttcatgcttggaagttatgctgtacttcacaatcgctgttccttatacctgatcaggaagagaaatttgatattcacataatgcacacatatatttgttgttggattcttttgtataatggcatttatcaagcaatcttgtattgtattaattcttttagtaccatgtatttatcatatgatggtattgaaattcaggaaacaggaaccatttttactcatcatcagaaaacagttattttggatgctgatgctggcaatcataagaggaaaataattgcttttgttggtggcctcgatttatgcggtgggcgatatgatacacctagccatcctctatttaggtctcttcagactgtgcacaaggaggattattacaatccaaattttgctgtaagtgtttgattcctttaacatatacttgtatcttgatgtggtttctgatgtaaagctacaattaacttcttgcttttgagatgatgatagtaagaaacgtatctaatatttagttcctaaccatggaatatctttcgacagaaagctgttccatctttctcttatctttggttcctgaaagtttctttctctctctgcttttttttttctgcagacagttgatgctcgtggcccaagggaaccatggcacgacttgcattccaagattgatggtccagcggcatatgatgttttgcaaaattttcaggagcgttggttaaaggcatccaaacgccatgggattaaaaagttaggaaaatcatatgatgatgccctcctcagtattgaaagaatacctgattttataagcattaatgacgcaatatattttagtgacaatgatccagagacgtggcatgttcaggtatttatagtatcttgtagtcagtgtgtgtaagtttttccttgttttaactttctacttaaactttatttgctttgaaacctaggtgtttcgttctattgattcaaattctgccaaaggatttccaaaggatccacgggaagcaacccgcaaggtaattgagtactgtttgcatgtactaatattatattcattattatgtgcttttcgctaacaccttgctttgcctagcagaatcttgtttgtgggaagaatgtactgattgatatgagcatacatactgcatatgtcaatgctattcgtggagcgcagcacttcatttatattgagaaccagtatttcattggatcttcgtttaattgggattcaaacaaagatattggtaagcatatggtgtaaagttatttttttaattaatgtgcacccaccaataaaaaaaatccagaaacaaaatacagtgcacattacattttcttgatttgcaaaccatttcagcaattcagaacacagcaaatcccttatctgatcctaaattggtattcaaattgtgagttttcaggggctaataatttaataccaatcgaaattgctctcaaaattgcaaacaagataaaggcaaaagagagattctctgcatatatagtaattcccatgtggcctgagggtaatccaacaggtgctcctacacaaagaattctttactggcaggttagatcaacatgtctgctttgtgtcttgtttaatgtttatatagattatacccagttagttcatttgacatgatcgcatgttttttttgttgctcctgtagcacaagacaatgcaaatgatgt

SEQ ID NO: 7595 - DNA, 68693 bp, Oryza sativa
  unsure (1)..(68693): unsure at all n locations
acaaaaactttcaaattttggataaaaattctgaaatgtcagactttaagtttttggccaaatgttgaatatttacaatcttatgtttatgatatggtattttggaatttttgtccatattttggaagtttttagctcagggtattttggtcatttggataaaattgtacagtactaacgtagactaaccggacggcgatggtaaatcataggggttaaataaaagtcgatggcatattatagaacgcgataaagtcagtagcaaatcgtagagctgtgacaaactcagtggcatataatggattgtctctgtaatctccgaaccccatgacggcttgacctatttgattttgaactgttttctttggcagtgcgcgaatgattctattgtttgcatcactgtttacactgagcgcataatgggagagttgcagcttttttttaagtgaaagtgctgttacagtatcactagccgtttgcacagtactcctcctatactttttttttttttgaaaacttttgttcctgttcttgggccagataagcccatgcattgaacatggatgtgcaactagtgacataggagtatcggatatggagtatttatataatagatgtgcattttacacatggatgtttatgtcaacatctaatctcactaactattctgatcatgtagacctagcagctacaacatgtaaaacgagttgattctaaatcgaaattaagtagtaactcgaactttgtgaagtcatttggtcaattttaagaggtttgacaagtgtcagtacaggcgtacagaatctgttaagctcagcagcggaagtctaccaaccgaggatttgatgccaacgaggcaatgagctgtatagaagtgcaaatggcaaccattaactttggtttcatgacaccaaaattgggttttttgaactgtacctttgttcattcttctcatccaactttcctgcgaatttatttatttttcattttcgaaatgcaaactgtttcttggataagctgacaggagtcacaggaccttatattcttgcccatcacaccgaatcaggtatgtgcctcttgctaaaccggtgatggcgaccatatgaggtagactggcgattttattgataatctctcctacctgcaatggttacctgtttcttgcattgcaactttgcaactgatagtatcatgtatggtagtgtggcaacttgcatgatagagtgatttttactgtgtttgaggagtaaccaataattttttttattaatttgtggctcctcatctctactctaaagagagaatattatccaaacaaatctgcaaagatggtaatctgctatatgcgactaatcgttttgtgtggacctaaatgatagcaacatctatctcttttctgttgttgtggggcaaggtgtacgttctgccaaaagtatgaaggagacatgatatcgcttgaaaaaggataaaaagcaactgaatatttcagtacaacgctctgttttataaccagccggactcagcctttttcactctcagtattgtcactgtaataagtttattatatgattcagccgaatatttcctcctgaattttttctttccttctccctggagcgtgtggctcatccactacgtataaggtgacaaagaaaacaatatcatgctgaaaattctatcatgtattggagaggcatattagcatatactacatatcagaagcaaagttcaggaaattctgtcagatgcagcctgaaattttatctctctcataacaccaatatatacaactttcagcaagttctgaagtaagtctactacatctcaaagtctcaaactactatactgttcttattgtacaaaaaaggaaggatgaacagccgaatagtcaaaagagagaacaattttcacgaacagacgagttcttcagaacagttaagaatcagttcagctctgcaggagtacctgctgcctccagaacagttaagaatcagttcagctctgcagggagtacctgctgcctccaagtccttcacagcatcagggccatggagttgaagctggagaagcggctgagcatgtcggcggaggtgaagctcgggtgggtgatgctccggtggaactcctggagcctcttgaggaagaggacgatccgccggcaaggcacgaagacgagggtcagtgggatgagcagtatgcctagctccatcaccggcatggccacagccttcactggtcgatggctctattcaactctttggagtgtggtgtgcttctctctcttggtagtgatgtggtgtgcctcaagttgtttatatagaggaaagtgttgccattgccacccaccatgaacttgtttggacattactttcggttgtggggagctgaacattatgatatttttattccttgtcatgtatactgcctttatcccacatggatttactatttcctctgttcgtaaatacaaggaatgcacctagaaatgcttatatttatagattgagttagtaggatcataaattatgaggaattttacagtttttaaaaagtaccttgaggtatctaaattttacactaaaattttaatatcttgaggtacttaatagaggtaccaaattttacacttaaaaaatatggtacctctggtcctatagtacttcctcaagaatggtaaaaattactcatagcctatagcgcaactataactctaacacttcaacgttgttagaatcaaattgaaaggttcgaattggctcatgaatcatataggtagttatctataccacttaaaatgttagtagtggtggtgtctgttttcacacctatcactgatatttgggccccacaatatatactatcacaccaactttcaatgagtactcccctgtttaactgttagctctccccaaattttaaaaccaccttacttattcaataagaaaaaacatagtactatttgaactaaatgagtacttattcattgatttaataagctagagacttttttttcggttacaacgcacaagctcttggctagtatatatagacaaaatctcttattttttggagggggacattagtaatttaggttcctgcaattacggattaatcattttctctgctactgttaaagcggagtcgttgttgtcctcctctccctaaaagaacaccatgctgaaaaaacaacccacccaaaaagcaatgtatttgtacgaaaatcaacatgctacttgccagaaaaactgaatagataaaactaaatcctataatactattcgtctttatttctttcaatttcattgtaaagtacgtgcatagcactaatatcaggaaagtatggaggagtagtactaattgtaaactatccatatggatttttttggataatggaaatggattacatctccggcttctgtcataagacacacaaccataagtttaatagtaataaaaaggtaagataaaagtaaatcaaatgagaaataaggtgatgggacaaatccccaactcccatttattattgactagcgttaaaccatataaaatattttagctagcaattcttatggaactacgtcacctatagtagaataagagacccttggctaccgattctaaaagtgtagcaccattacacatagtatcatagtatcatgctctatccatatgaatttatcctacggtatgttcattacatgatggactcgtcagtgagcatctagctagtcactagtcagttgagatgtacattcagaaaggtacatgtcgatattttgcgaatcatctgacctaacagttgtccctaatcatgcttatattaacatgacgagctagcctgtcagtcttccctagaaatgatataaagtcagaaattagtaggcagtgttttgtccacagctagctttatagcttttcaccgttactagtagtattgtcttttctgttcgccgtagccattcagacattcaatgatgttattataccttctcattttgttcagactcactgtctttcttttgtgtttgccttgggtgaagttgttagttctagaagtattcttgcataaaaaccgttgtagcactaactgtgctgccaacagattgtgactgcttttgtatcttatttatcacagttaccagccaacagattgtgattggatcaatacaagcaaatacagtcacattctgatctctctattcattggttcttcttcagattacagctccactttgctgcggttcggttaagagtagtagtttgtttttataactgtgtttttgggttgcacctaaagctaaaatcttccatgttccaagttttttttttcgattactcaaaagatgcacgcgcacacacataccacagcacctactagtgagcctacacatgctcaaagacatactagaaataaaaacggagcggatacggacgaataatactcataccatatttgttatcacttttttttaccggatatgaaaacgaatacgaatacggatagctcgaatacggaaataaatacggattatctcgaatacgaataaaaatcgaatatgatcagacataaatacggaaacaaatttttctcagagtacgaaaaccaactcaacttctaatagaaacaaatatcaacttatataattagctcattttatataaaatgaagtataatttataaatatttttaaaaatttaaataatattaatagtatggactagtgttaagagataaactactattaaaatctataaagtcatattgaaggttatagagttagaaagaaatgggatatgtcttatggcttctgcggatatctgaatagcactgttcaccggatatccgaattattatccgtatctgacggaaaccccgataccatatccgggagaaaatatccgtattcgtatccatatccgaaaggtatccgtatcattttttgttcggagcggacggaaactatccattccgttttcatccctagagacgacgattaatcttttcaggtatacgcaaggagcctttttttttaattaagaggagtaaaaagtttgtacaacgaaaccaaagagcagcagaagacaggagaactggaagggggggactaaagcctaatctcgcgaagaaagactgtgacctaaaagctcctagcaactagaggcgaaacaccggtacagcagcgttggctaaccgccacaacgccgccttgtcgaccattcctctggctacctccacccaacttttgtgctgctgattgaagactcgattgtttcgttctttccaaataaaccaacgattaattactgcattaacttaatttctattgaaagcccttttgtgtgtactgtgcagtagccacataccacttttgtttatgtaccttttccctttttctttgcgtgtgtgacacttaatttgttaaatgctattagttggaaaagcctgtccaatattagccaaagcatatgtctctttctgcacattctgatccacctaaatctggatttgcacctctaacgatctcatcgattgttctctccatcttacatgcctacatcacatcacacagtatcatacaaagcttggcgcatcatttcggttacagacgatcaagcgtgaggaatcatttgcagatctggaggtggcgataacgtaatcccttttctgaagcttctgttgctgaaacaccaactcttgtaccgatctggaagctgcatgcatctggcattcatcctacgatctccatgcccatcgatcttggaagatagtgtgacatctgacgccgatatatgctaatatgcatatgcctctactccaattttgccccggcaatgatgcggctacctgtgaccgtttcagtcttgttacctgatggattcatgtgagaaaagaaaagttttgcgagaaacgcccagggatcttccggcttgcttcacaaggtggtgggctaaataacctgggttcgaaacatcactctttctaattatttgatacggatttgctatcctactgtcgacagtttttaggggtgaaaactgtcgaatttttaaccgtacgatatgctttgagatttgtgctgtgaaggaaaaaatggaaaaaaaaattaaccgtacgatatgctttgagatttgtgctgtgagggaaaaaatggaaaaaaaagtttttaggggtgaaaactgtcgaatttttaactgtacgatatgctttgagatttgtgctgtgaaggaaaaaatggaaaaataaattaaccgtacgatatactttgagatttgtgctgtgaaggaaaaatgatttgtgttgtgaaggaaaaaatggaaaaataaattaaccgtacgatatactttgagatttgtgctgtgaaggaaaaatggaaaaaaaacctgatgcttgtggccaggattgaaccagagacctgcagcttgcatgctcgttcaactaaccaattgctccatccaatttttcagagttatatatgagttacatattacttatattgtagttacatagtagttacaattacaattgaaagtttttcattaaaaaaatgtcgaatgttgtatagctactccctatttgatattaggtcattctctaatattcacgtctttttaaagaaaagttttgcagctgaaaactactgtcagcaatgtgaccaaggcaccaaaccgtgatgaattttcgttggaagtcggtgagtgatgttagtgtgaagtgtgcgtgaagtcacagtgatgagtgggtgagtgattggttaatacatagccttataggaagccatgttagggtgatggtatccgggggcaacgaacgtcctcctgtctggtgacacagtgtactgatcaggagtgagcgcgcatgtgcggcagcagatgaggcttactccttcagtcaaaaaaaaaaaaagaaactctgagtttccgtgtctaactttaactgtccgtcttatatgaattttttttataatttatattttcattgttgttagatgataaaacatgattaatattttatgcgtgacttgtctttttaatttttttttataaatttttcaaataagacggacggtcaaacgttggacacggaaatcagggtttgtcttttttaggacggagggagtagaactcaatcatgcagtacttaagtaactacttccactgctctagaaaaaaaacaatttttggttatgtatctatatggttttttccttaaaaaatattttctggttatggatctatatggttttttctgggttggaaggtgtagcttatgtgctgttcaaataagttcggcaagaatctgagttttaatgttacctgtttgacaaatgattatttagaaaaatctgtttaaattccaggattttatttctgtggatcttgcctgaccgtgggacctaactgatagcaacacaacatattttcttttgcaggataagattggcattccttgtcatagggcataaatactgtgaaatgatgtaggcttgcttgaaaaaaaggagaattggatgaggaactaatcatttcagcacaatcaatgttaaaattttcagaaaatccacattgtggacgattttgccctcgaaggagagagcagaagcacaatggaggtgatgccatgctgctcaatatagcattctgactttgaaatattacgaattcgagtataggatacataaatctagcttccccaaattgatccttagttctctcttgtgcatgctgaatttacaactggaatatttccttcctgtactttttcgatccatcgagccgacaaagaaaacaagaatcatgcaggaatttctctcaggtcaacgagaagatgaaaaattcagtaagttctgatgttcttgtacataagattaagtaagttcagaccacttgagctttgcttatggtacacaagatgaaaaatgcagtaagttcatgtacatctcagattactggagctagcttatggtacacagaaagatgaaaaattcagagagagaactcctttggatcttccaacgaacaaaaagagaaagagatgaagagctacagcacgagctgaattagcatcagcaataatccagcaccatggccaaaagccatctgagtttccgactagatcaaccaagaaaagcacccacatataccttcttcagactttctcagagcacgaagaccatgttgtcgttgagcccggagaatcggctgagcatgtcggcggaggcgcgccgccgcggccgcgtcatgctccggtggaacccctggagctgcttgaggaggagcacgatccgccggcacgggacgaagaagagggtgagcgggatgagccacacgcccagctccaccaccagcatggcagccaccctaagctccctcgagctcactcaaactgaaactgaaactgatggcactgcagctgttttgggttctggagtgtgctttcctctcgcttaattatgcttcactttgcttatatagttagataactaactagatagatgtcgctaaagcctttactctacctcgtgtttgacaaattgacagcatcagcagagattcaatcagggctatctgctggacccatttttactaacggttcttggaagaaactggagaacacagattcagagagttttttttaacagagccacagattcggagatttgctctaatggttttcttttacccagtggctttcatcctacatggatatgcttcgtgcttgtccatggtggtagtgagcttcagtgaacaagctatctttcggttgagacggacagaaacatctcgatctgatgcgtacgccatcagctgctgtcgtcttgtcgcatttgctaaaaaaaatattatgatcaagcatttcagcatgtggggtttccaaccacttgatatgagatcagaaatttgtgagtgccgttgagtgtcaacagctagtgtggctcttcacagtttttgggtagccctgacataacctccggtgtcttttctgttcgttttaaccattttactgattcggtaaccctgtaatcttgcattaaccctaataagtgtttctgtcatttcgtcctgattataaaccgtaacgcttatcagtgaaaaaaaaatgtatttttataaatatgttttagtgacttaaaaaccaacaacagaaaataaactacgatgaaaaaccatcgaaatcacctataaaattaagtttaaaatttacattttggttgcagtgataaactgaagagcaaacgattgtgcatttcttttgtcaaccttgttacgactgtttcgtatggtattgtgtacagattcttaggatgcttggataaagaagcaacctccaaaggtagcaacttctctcacagatcaagaactgcccatctcgtttgattggagcaagttgtgtgcattcatattctatcagaaaagggacaaaacaaagaagatcatgggtgttctttttcttcttattgtaatagaaaagtttgatagggaaggttactgataaacattaagatacatctcaatggattaatttaaaggtaaggctatttttttttcactttcacaggtcctgaacctttaatattccagcttaactacccattttcttatatttcatccggctttccccttgtgatttgagtgttgtatgatgtatcgcattgattaattgttgtttgtgcgctagggtggttgggagttcttgtccggattagctatgcacatgtcccctttggtcacaaatattgtactgtatttcttaaccccacgaaattggaatcttgtcaggtcgagttgtatgaatgtatcatgctcctacttgctactagtagtacaattccttcatttgactcatcctctcagttcagtggaatcattgcagatgaggcccctctgtgttgcgttgctgcacaccaactcttgtgaagttcaggaatttcgcacgcatatgctccaacttctaatacatcagctttgtctgcttgtgagttgagaggaacgggattttacagctgaaacaaccgtgagcttttgtgaccaaaaccatggcgagtttttcgattttccttgggaaactgatggctgatgcgagtgtgaactgtgaagtaacactgatgagtgatgtgtgggtgttgactctttgttcagacagcggccgtgcaaccaaaagtctcgtcctacactctggctgtgtttagttcacactgaagtttaaaagtttggttgaaattggaacgatgtgactgaaaagttgtgtgtatgaaaattttgatgtgatggaaagttgaaagtttggaaaaaaaaactttggaactaaacagggcctgagtctctcagaaaaaaaatcaactttcgctgatgaaactgaacaagtatttgtaatgaggtgatcgatcaggcgaggacacgccggagccggagggcgggttgtcgctggttggagctgaaacctgaactgattgacaaacagtatacctgaaattgtgcatggttgattcatgcttaccagtcttttccctggtaatctggaatgatggaacagaagcggagacactgagacaacggttagccaatttatgaatagtttgataaactgattgagtggaacggcagcggaacatcgatgagatatctgagatttctgtctcaaaattcgtctaggaaaaattgcacagtcggtttttatggcgggattacgggattagtaataacttgtatggggcttcgttcagttcatattgggcttataatgggactcgattcggccttctcactgctgggctcttttgttatgagaaatgggcccttatgggatatgctaagttaacgggctgactgtttctgttcgtagtgagattttaatgggcctcatctacagtgtattggccattttctgaggataaagagggaggagaaagttaactgacatgtgggcccaaaatttatttttattgttttactcactgacctgtgggtcccattaaggtttgtttcaattttagtgccacgtaagcgctgcgtcgatgtcacatgagatgaagaccaagtcagctcgccacgtaagtgccacgaagggcaaaacagctgagagagtcggtttgcaacggttttgaaagttagggaacaggttatgcccggttctgtggttgagagatgcgattcaaccagccgcaagagtttagggacgctaagtagacttattcctgttacgtttgaaactcgacccatagtcgagggatcttaagtagacttacgcccattggtcggcccatctaaacccagtccatcgatccaggcgctggacgcgggcagcagcagcagcaaagtcagcggcaaccagcaaccgcttctgtaggagaggcagcgccgcgggcagccggccggagatggccggcgccggcgccggcgagagcctggacctccccgtggtggacctagcgtcctccgacctcgccgccgccgccaaatccgtccgaaaggttctcgcctgattccggattctgctcttctactcctaccaatctgggaggccgcctgtgagcgcagtgagcaagcgtgattcgtgttggtgtgtggtttggttttgcaggcttgcgtggagtacggattcttctacgtggtcaaccatggagccgagggattggcggagaaggtgttcggggagagcagcaagtttttcgagcagccgctgggggagaagatggcgctgctgaggaacagaaactacctggggtacaccccgcttggcgccgataagctcgacgcctcgtccaaattcaaaggtctgcgcctcatgttccatagccaattcttcgcttgagctttgcagtttgcagtttgcactgctcttctatagccaatttgagcctaaggggtgtctagctaggtaactgtaataatagaagatgacgagttgtgtcggcaaaaggcagaacttgacaaattagtgcctgatgatgaagtattctttacgcgtacaaggctatataagtacattaagaatgtcccaatgcttgtgaatgattccttttagaaatgattacaagtcatggctctggtttgatcgacctgaaggtcgcacaatcttcaattagtacaaggccaatataattcgagatgaagcagataactggataagtgctgaagaaccatttaccactttaacgtatcctctctgcctctagtttgaacagccgatacatcttgtcgattttaccttcttgtgtttgtaatgatgcagttgagacttttgtttgtgatttgtgatccaggagatctcaatgaaaattactgtatcggacctatcagaaaagaaggttatcagaatgatgctaaccaatggccttctgaaggcaattccccctcctcttctttttctttgttgtcatttcttcgagaacataaataaattctttctttgggtatagagaatttcccatgttggaaggagacaatgaagctataccatgaaactgcactgtaagttatcattttgcccatctcagcaaaggaaatttaactgctgtgatgcaatctacaacaatcagtccatcattaattcgctgcatcagcattgtgtttgtaatacttttatataactatttgtctcaaatttgaatattcctatttattcgctacctcttccagtgctactggtaaaaggatactctctctaattgctctgagtttgaatctcgacgttgaattctttgactgcccagtggcctttcttcggttattgcactacccaggtaaccttagtgcgagtccctttataatatgaaattaaccaaagttgcattctaataatatgcagcagagtgctaagttgagcattttcattattgtcgagccaattgagcttcttttcctccttacacaaacacacagtacttattggttttgtatgaatagaaaatatttttaaatgcaggtgaagctaacgagtccgatgatggcaattatggtgcatcagctcactcagactatggagtactaacacttgtagcaacagatggcactcctgggctgcaggtacaccatgttctcacaaattttgattctccatctcagttctgttctcttttgcagctaattgatcatttaaaacaatataggagtatgctcataatattttatgaggatgagattattgcccaccttttaccactttcaagcaaaacaatacctcttctttagaaaagtagaaatataatatgcataattttttgcacttatgttctggtttctctcactgttttgagttttcagatatgcagggagaaggataggtgcccccagctttgggaagacgttcatcacattgaagggtaaataacaaatatttttttagtaaaaaaaacaaatattttttatgatattaatgaataacaatttcatatatatcattgctttgtcttttttagaaaatggattaaaatccggtctctacatccaaactggatgtacatagccctacatcatatgaaattgctttacgccattgctttgttcttagctttctggacctcaattctgtgtgctccttagataatgcgttgtcttgtgttatgtatctgtagggccctgattgttaatatcggcgatttgctacaaaggtggactaattgtgttttcaggtaccatcttttcttacttctgttatcctattctgtggttgtgaggaagcctcatgtactgtgctggctgttttaaataagttcaaacgaactattacagttgtgagtagttgcccccaagaactttctgttttctgcaactcgatatggttaaatatgttagaaggcacagcactttctcaatgataaattggttaggcttgtcaatatcatgaacaagttagaccatgttcgtgtggttccttacaaattcagggtgctgttttatgacattatacacttcttttcctattttatccctatggaaaagaacaattttttgattgttctcgttcttttgctgacttgtaggtctacactgcatcgcgttgttgcagttggtaaagagcgatactctgtgagtaactgagtataactaacacctgaaatcagaaattcataactgagttttagctcctattgaactcatgttgtaaagtcgggtgaacttcttattggtaaaaccaccattgataatatatagcatttcgccaactaaatattgcatcctttttggtgcacgttctttcttacacatgtttttcaatttgtcaggtggctttctttcttcacacaaaccctgatttagtggttcaatgcttggaaagctgctgcagtgaggcatgcccaccgaggtcttcttcctcctgttaagcttagcattattgcagttctttcatgcttgcttctcactgttagaaattgatgcacgttcaggttcccacctataaggagcggcgactatttggaagaccgattgagggctagatacaaataatcctacgttggctgcgtacatccatgttggatgtaaaggccaggttttaatccattttctgaaaaacacaaataatcctacgtttttaaatgtgtaaagcttaagattagtgaacttcagtgagcagctattccgttgagatggacggaaacatcttgatcttatatgtagcccatctgctgttgctgatttctcgcgtgtgttaatactagctttacttatgagcaatcatgtcagcatctggtgaaatttgtaaccgccttcgagtgtcaacatatatttttgctcttcactgttttcaggaagactggacataacctccactgtattttctgttgccaaaacattggtatagagttttttgtataaagattcttatgatgctttcacgattaaggaagacacaaataaagtaactttgctctcagatcaagaactgcccatctgtgtttgattgaagcaagttgtatggtttcacattctgtagtaagggacaagagcaagaaattcatgtgttttttctattgtaattgaaaattttgacgggggaagcgctgatatgcatacttcctgtgtgttctaaagcctgtgccttctacatgttgcagctccatttttgccatagtttagtaagcagcagctctgatgagtgataagtggacaattgatcagctctaatgaggctggaacctgaaatgaaatgactgacaaccagtatccagaattggtcctggtctgttctataattggcttttcatgggcctctcctgtacggtcgtattttctctctgctgggctgtaatcttgtgcgagattggccatgcctttgtaagaaatgggccttagtgggccatgtttactgtagctgggccctgtttgtttgtccagtgatggcccacctgtcagtccagtccgtggatacagacgccggaagcggatggacgtgactcccgctcgggcgcccggtggaaggagattaaaatcgggcgtcagcacccgatttactacgtgtaaactcatttttctcttaaattactcatccaaataatgatccgattgcaccattaaattcattgcaattaaatattaaaaaaacaagactatattccgacgaaaaaaatagcttattattaaattatttttaaatattgcacgatgtttcactaggtatataaaaacaagatcgaaagtgtttcactcgtttaaatcgggtgttatttcaccttatataaaaataaatatttcagcaaatagcgaaagaatgtttcagttcactgcaacattagatctatacataatgaaacattatgagtacactaggtgaatattttcggtggaacagaaaataaaccaaattattttaatagagagtttttaaaatatatgggtgatttgttgcaatgaagttgtgtgggtgtgtggaagtggcaggtgggtccgtgaggagagggagacacgtgggtgggccgcagggcgagcgtccgatcctggcgcacccgcgccggtcgaccgagaactagcattctcggaagcggacagcagcagaagcaacaagcagcaaccacttcccggcgggagaggcagctggaagccggagatggtcgccgccgccggagatcgcctggatctccccgtggtggacctcgcgtcctccgacctccgatcctccgccgaatccatccgaaaggtgcgcgcccttctccccgtggcaatttccgccaacttctgcgaggctccgctatgttccgtgggtgcggcgacgaggaagcgtgattcgtgtggtgtggattggtttcgcaggcttgcgtggagtgcggattcttctacgtggtcaaccatgggatcgaggaggggttgctggagaaggtgttcgcggagaacaggaggtttttcgagcagccgctggaggagaagatggcgctgctgaggaacagcagccacctggggtacaccccgccctacaccgagaagctcgacgcctcgtccaaattcagaggtcttcgccttctattagtcgattcatcgctagcttgcgatttgctgcatgctgacccgtctttttttaatggcaaaattaggtttgtgttaagtgaaattttagagatttgctctggtccaacaaaaagtaccttttggtaccggtacctcacggtaccaaatcgtttccgatcgttggatctaacaatgcccatcctgccagctagatccaatgatcggaaatgatttggtaccgtaaggtattggtacctcgagatactttttgttgaatcggagcaaatctcgaaattttaagcctaaagtgtgcctgatagtactagataggttaatttaatagtagaacgtgaggagctggaatgggatgacccttgtgttagcaaaagacagagcttgacaagtcaatgcctgatggaatatccctccatcccactcactaagacacacgcattttaagatttgactttttaaatatttgactaataaatagtttattatgaattaaattttcatggttattgatgaaaataatatcattgaattgtcatttgaatttactttatatgattatgattttgttgctacaaacgttgtagtatactagtatatgagaaatttaaagtcaaagatagactactaagtttgatagcaccttagtgagtgggagagagggagtataagctaattaaaaatgtcccattgcttgtgaacgatgtcttttaaaactggccacaagccatgggtcaggtttgatacacctgaagatcacataatcttcaattagtaaaaggtggatatgattcaagatggagcacataatgagacaagtgctgaagaaccatttaccagtttaccacatcctcactgcctatagtttgaacaattgatacatcttgtagattttaccttctggtgttttgtagtaatgtagttgagattgttttctgtgattttgtgatccaggagaccttagtgagacattcaaaattgggcctattggagacgaaggttttcagaatgatgctaaccaatggccttctgaaggtaaatcccactccccaccctccaccctttccaaaacataaacaaaaccctttccaaaacataaccaaattctatatttgggtgcagagcgcctgccatgttggaaggagacaatgaaactgtaccgtggaaccgcactgtaagttttcattttgctcgtctcagtgaaggaaattcaataattatattgctatcgacagccatccgtccatcactgattcgccgcgtcagtattgtgtttgtgtaatacttctatatgactgtttcattcatgatttgaatattcccacttatttgctactacttccaggggtactggcaaacggatactctctctagttgctctgagtttgaatctagacgctgaattctttgactgcccattggcatttcttcgattgttgcactacccaggtcaccttattgcatgtccctttctcatatgaagttaaccaaagttgtggagtaatgatatgcagtgtactgctatgtacatgcttgataatgtccttatctcgcttcttgccatgtcagaatgcagattgatgcttggatttgttcttttgcactgatttgttcaacaaatttctttctttgaacaaaatgctgtatgtcattctaaaggatgaagaacatgatatcctcctattgatgtagctttattgggttggcccttgggaacattacaaatatgtcaagtaaattataatgaaaaagtcatactgctacttgcatggtctcaattgcattttttactaaaacttcgtttaatatctcacttgttaacttgcactagtagctgacagagtagatctgcgtgatagaaatcgctaacagttcaaactaatttatcttgatgctgacatactgtatactggagtgtaatgataaatatgttcttgtaaatcaatatgaacctaagttatggaggttcctaaggtagctttgttttctgcattgttttgcttgctattgtcatactggaaagtaggatatgaactgaaaatatcatgaaacttcaacctgcttctaggaacttttgttttggaggactgactttgtttcgttgttattgtgttttcttccttatatagtagttattggttttgtctgaatagaaaataattctaaatgtaggtgaaatcaacgagtccgatgatggcaactatggagcatcagctcactcagattatggaatactaacccttctagcaacagatggcattcctgggctgcaggtacaccatgttcttcacatatattaattcaccaatttcaattctgttctcttttccagctaatcaatcatgtagacaaatacatgctcagaaggtttggtgagaatggggttatgtgatcaccttttaccactttcaagcaaaacaatactttcctgtttagaaaagcagaaaaataatatgtattatttatttttacatttatattctagttttctcactgttgtgcgtttgcagatatgcagggagaaggataggcatccccagctctgggaagatgttcatcacatcgatgggtaaatagtaaaatactttttggtgatattaatgaataacaattccaaatatactgttgctttgctcttagctctctggatcactgtcttgtgtgctccttagataaccaggtcttgtgtacagggctctgattattaacattggcgatttgctagaaaggtggacaaactgtgttttcaggtatcatccgtttgtacttcaattaatccattatgtggttgtgaggaagcctcatgtgctgtggtgactgttaagaaagttcaaataaaccagctacagttgtgagtagtttaaccaaaaactttctgttttttgcaactcgatatgattaaatatgctcgaaagcacaatgctttctaagttggtttaggcttgtcaatatcatgagcaggatagatcatgtccgtgttgtttctgaaattctacaggtcttttcgagttctgaaatttaaggaaaaagccttgtgtatgaattttgattattcttgctcttttgctgacttgtaggtctacactgcatcgtgttgtggcagttggtaaagagcgatactctgtgagtattactaaccactgaaattagaatttcattattgaggggtttcagctcattgaattattgctattttttgtggaagctcccattgaattcatgttctagagttggatgaaccccgctttaagggaaaactaacactgataatatatagcacttcagtgacttagactaaattgtgtgcttaacttcaggacctttctggtggacattctttcatacgcaagttttttttttttttaaatttgtcaggtggctttctttcttgacccagaccctgatttagtggttcagtgcttggaaagctgttgtagtgaggcatgcccaccaaggtcctcttctttctcaatcttagcattagtctagttcctttggcacttgcttctcatattgtttgaaatttgatgcattttcaggttcccacctataaaaagtggagactatttggaagagcgcttgagctctacatataaataaggaaaaatttgctacatgacacctaaagtttgttgttttagccgtaggacactcaaagaacgtgtaagcatggtaattatctgctggacaccgaacacactattttattattatattcgatgccaatggagggagaaacagtaatgaaagtacacatttacccttgtgttggtaaggtgtgtctagttcgaagcagccgctgtaattcttaatgctgctgccccagcagtagcttaaatgtaatgcagctaattacgtatcatattatgtacgatcatgactcaaaattagttaacattggaatgatctttccagaaataaaaaggaagttaactcgctcgccgcttgaatccaccgctcgccgattgaatccgctgttgcgcgctcgttgcttcaatcggccgccgcactcgccgcttcaatccgatattgcactcgctgcttgaatctgtcgctggcctaactttagtatctgtatacaaaactaattacataaataaaagttaatttgcgagataaattttttaagcctaattaatctataattagagaatgtttactgtagcatcacataggctaatcatggattaattaggctcaatagattcatcaagcgaattagtccaagattatggatgtgttttattaatagtctatgtttaatatttataattagtatccaaacatccgatgtgatagggacttaaaagttttagtcccatctaaacagggtctaaagctcacagccgatggtcaaccttgcaatcacagcaccatcgtcaccaccaaaacctaggattttagaaatttgaaccagacctactcgggttaaaaagaaactagcctcatgggtaaacttgtcccttttaaaagtttctccctctatttgaatcaaatataataaaataatgtgtttggtatccaacagctaattgtcaatttgccatgttttcacggtgtcctctagcatatatgcgatctttggatgtcctgtggctaagaccataaattttagatgtgttgatgtgaaaaacacgaggcctgaaagatctgcttaacttcagtgcaggtccaaaaatattgcttttaggttcgtgagcgtgccagttgatttgatcctgcaatcaacaagaaataaagacaaagaaaccgcggttaaatccataaatgatagccgatcggctagccgccgatgacatatcatttaactttaagctggtgtcatatgtgaattgataagtaatcatgaataaataagaaagaactaaatctactcgatcggttgtagatgttaacaatatataatccttatgtcgatatatacttaaatcaagtgattgggatagatcggtcgccatgccgagacaatataaatcacttagatcaaaatatatactaacaatgagattatagatgttcatagcatagccgatcagatagatctagcatgtatcggctaatactccgataccactctatattaagatattaaagcaagcaaaatatatcaaacagaagcctaatatattttattgtaataagatcttaacataatggcagatctagcatatcgattaagcacatgaaatataaagctaaatcaggtaagaccggctgaaaccccaatactaccctaatcggcaaccaaaagcaggctagagattaagattctaataatgacttataagatcaaactcaactgatgcagctataagtatgaaaagaaggacaacatctagatgatcaagccgttgtatgttttatagagtggtagatatcatgtataatctaagtcaacatagatatttaacctaattggctgccttccaataatagatgttagccggttgaaggttagacaacgatattgtcgaagattatacagagtatatgataactcgacgaattacataaacaagactagagtatcatgaagatggaagcactaatcccgagaatgcaagccgccataacaagttttacccctagttgaagatcgaaaacgatgcagctcaacccgaaagcaagaactcgtcgaaacaaaacgaaagtaaaagggtggcgatgcgctgagattgtattgaacgtgtgttgttgtattacatgaggctcggggtctattaatacccgagatttacaaaatatgtccgtgtcggacacgactcttatctctaacaaactctaagataccataagtctttgcgacagacttttgcccaaacatatctctaagaaaattacatgaaatatcctaattaatagatacaattgtcttctcaagactcgatccatacatggcaatcctcatgaagcacattaactcaacccgacagcgtgtaccgctccacattgttggcatcggctcaatcggccaaccttgtccgactcgaactctgccgatcctgatcatagccgattcggaattttagccgattctcgctttgtttccggaacgatctctatcttgaattccgcttcgatttatcttcatctccgatacttggattaccaaaatttgttgttaacaagatgtcctattgctaattttgcctacaacatttttacatgtgtaaagcttaaaattgataactggctcccattaaattggctgctacatgttgcagctccatttttaccataatttagtatgaagcagctctgatgagtgatgattgactattgactagtgagcagtgagtgatcagtggttgatcactgatcaggctgaaacctgaaatgaaaggaaaaagtccactttgactcccttaattgtatgccgaatctaattcgtacccctcaaccagaaaaccagagagaacgactccccgaactattgaaaccggtgcaatttgactcccttagcggtattggagggcggttttgctgatgtggcgctgacgtggcggtattgacccggtcttcgtcccacgtggcgcttaagtggcattagaattaaaaaaaaatgtgggacccatctgtcattcacaccaaaaaaaatatatttgtgggacccattgacatgtggggcccacatatcatcctctatctccaacccttcttcctcctcccttcctctcacatgagctgcgtcctcggccgcccctccgacccctncctttaccacccccagcagcccaaccccccccccgtcgccccggagaagccgcccgccgtcgccaagaaggcggccgaggaggaggaggagaagaagccgccgaagcaggctaggagggagaggcacgcatggtcgtcgcggtctgccgccgccgaggcggtcggcctggggctcggggggagcttcgccaacagggcgcgcggggagcaggtggcggccggctggcccgcctggctctccgccgtcgtcggcgaggccatcgacggctggaccctgcgccgcgccgactccttcgagaagatcgacaaggtacgtactcctgccctcgcgctcgccattgttggtggtgggggaagggaactgagctcatcggtcttgtcggtggcgcagatcgggcaggggacgtacatcaacgtgtacaaggcgcgggacacggtgacgggcaagatcgtggcgctcaagaaggtgcgccgcccccaccccggcgcgcgacatccccgcccgcaccggccgccgccgcctccccccagccgctccctcgtgccttcctcgccgccacggcctcctcgccccactgcgcccccgcgtccccgacgccggcaccgccgcccccgcccttcaccggccctaccgtccgatgggaaggagaaaaagggagagaaaagatagagaagggagagagagggaggaggaagaagggtgggagagagaggatgacatgtgggccccacatgtcaatgggtcccacaatatttttttttgtgtgaatgacatatgggtcccacgtatatttttttaattgtaatgccacttaagcgccacgtgagacaaagactgggttagcgccgccacgtcagcaaaaccgccctccattaccgctgggagagtcaaattgcaccgttttcaatagttcggggagtcgttctatccggttttctggttgaggggtacgaattagattcggcgtacaattaagggatttaaagtggactttttccgaaatgaaatgactggtaatcagtactcggaattgggcctagtcaagtctataataggcttttcatgggcctctcgcgatgggttagtcgtagtttctctctgctgggctgtatcttgtacgagacgggcactaatcttttattcggcattgttcgtttaatcccaaagggattttggtgggatgaaaagcccttccttttcaattgggtagggggtggtaattggggaatctcaagcatccgtttgcatttaagttactgagcttttactggaaatttgatgctgagcttttactggaaatttgatggctgaatggcagatacaagtatcaagtcgcacttatgtgatgcgtggctattaaacagtaagtgatcagtgatcaggctcaaaactgaactaacaactactatccgaaattgcgcgtcgtcgcttcagtcttttccggttttccctgaaaactaggatgtaatggaagccctggtgcgagatgatgcaatccacgaacagtttgatgacatatctgaaatttctgtctcaaattcatctagaaaaaatgattaaaaatgataaatgatatgcagccgatctatgatggagcagctggattattttcgggacatttaactttagaccacttttaagatgtgtcaattaattatttgccactcgctgtctatgacatgtgggctctcatgtgtctatgatatgtgggtccagtgacaaatcatttatcaccatccgtaagagtggtaaataattaattattccattatcttcaggtgaattgcctgtactttgtcttgcataattggcctcgtttaattcataataggcttcttaatgggcctttctttgtacgtgatgggatactaggccattagtgggcctaagtttctctctgctgggctattctctggttgtaaatgggccccaaatctttgagtaatgggccgttcgtggtcccgttttaccctagatgggccaagtttgcttccttctctgtaagcccagttaccgtggggatacagccgccggcggacgcggagggcggcggcggcagcagcagcaaaccgccgctttggcagaagaggaatccgggatggccggcggcggcggcggcgggaatcgcctggacctccccgtggtggacctcgcgtcctccgacccccgagccgccgccgagtccatccgaaaggtacccaatccattccggattccatggcaattttcctggaaacaatctgttccgtgggcgcggcggcggcggggagagagagagaacagggcgtgattcgtgtggtgtggtttggttttgcaggcgtgcgtggagtccggattcttctacgtggtcaaccatggggtggaggagggattgctgaagaggttgttcgcggagagctcgaagttcttcgagctgccgatggaggagaagatagcgctgcggaggaacagcaaccaccggggatacaccccgccctacgccgagaagctcgatccctcgtccaaattcgaaggtctgcgcctcctgttttgctctgctcgccgtgttaaactgctaattgttaaacctaagcatcctctcctttttgaagactgttgataaatttaatcctgaagtgtatgggataacactggcaagttagtataatagtagcacatgacagagccggagtgacccttttgtcggcaaaaatcagaagttgacatgttagtgcctgattatggaatattctttattagcagtattaagcaaattaaaaatgttccgatgtttgtgaaagatgcttttaaaaactgaactaggaaccatggttctggtttgatctatcctgaacatctcacaatcttcaataagtacaaggtgcatggagtaataaatacaagcgctcactgcctatactttgaacaaccgctaggttttgtggattttaccttctggtgtttgtagtgatgtacttatttaagatctgtaactgtgatttatgatacaggagacctcaaggaaagtttctatattgggcctattggagatgaaggtttgcagaatgatgctaaccagtggccttctgaaggtactcccttctccttttttatcacttctttccaaaacataaataaattctatctttggctacagagcgcttaccaagtcggagggagacaattaagatgtaccatgcaagtgcactgtaagtcctcgttttgctcatctcaccgaaggaaatccattaattgtattacgtcagcattgtgtttgtataatactttggtgttatttgtttaaataatttaaatattcctgcttatttgctaccactactaggtctactggcaaaaggatactctctctaatcgctctgagtttgaatcttgacgctgaattctttgagaacattggtgccttcagctgcccatcagcatttcttcgattattgcactacccaggtcaacttatttcatgctcctgtatgtcatatgacattaaccaaagtagtattctcatgatatgcagagaaatgctaaaaacatgtgtgctggtctttaggttgcttcttgttgtgttggattgctgataattgccaatggtttctttagctctgatttattcaacaagtttatttatttcaaacatgaatgagtgcactatatgtcattctaaagaatgaagaacttgatatcatcctattgttgtggtattgtcgtgtgggtgctcagaaacattacaaatctgtccattacagtgaatagggaaattgctactttcatgatcgcaattataatctttttctaaactataacaatttcatttgttagctaaaacttgcattgaagactacttttcagtttgtaaaaatatcttaactgttaacttacagtagcagctaatggagcagatctgtgtgatctctattgctaaaatttctcaaagcaactgtcttgctgctgcccgctgtttgctggagcataatgataaatatgttattgtaatctgtaagtcaatgttaatctaagttttaaagataccttaggttgcttcattttgttgattgttttgcttacctgttattatactggaaagcgggatgtgaactgaaaatatcgtgaagcttcttcaagcttctaggaacgtttgtttttgtgagctgactgtgtttccttcttgctgtggagctagttaagcgttgtgtttttcgtccgtactgtagtatttattggttttatctaaatagaaaataattttaaatgtaggtgaagtagacgactctgatgatggcaattatggtgcatcagctcactctgattatggaatgataaccctcctagcaacagacggcactcctgggctacaggtacaacattttctttgcacaataaattcaccaacttagctaaccaatcatgtagacaaatatatggtcagaaggtttggtgaggatggggttatgttcccaccttttaccactttcaagcaaaaaatagctcttgtttagaaaagtaagaatatctgttgtgaatttgcagatatgcagggaaaagaataggaatccccagctctgggaagatgttcatcacattgatgggtaaataaaagtaaataagtttttttaatatattaatggaaaaaaatcaaataaatcattactttgttgtttaatttgctggtctcttgtaccctcagggccctgattgttaacattggcgatttgctagaaaggtggacgaattgtatttacaggtacccttttccttttatttttgatgacatattctgtggttgtgaggaagcctcatgtaccatggttgttaaaaagctcaaacaaaccagttacaattgtgagtagttgcaccaagaactttctattttttgcaattcgacatggctaaatttgttgtatgacacaatgttttcttaacaagaagttggtttaggattgtctcatgaacaggttagaccatttcagtgtgtttttgaaattctataattcttttggagttctgttttattacattatacacttccttttctattttatatctctaagaaagaaaaaccttgtatatgaattttgaatgttctccctcttttgctgacttgtaggtctacagtgcaccgtgttgttgcagttggtaaagagcgatattctgtgagtattatgactgctgaattcagaatttcataattgagagttcttttttttttcctggggaatcaaggggttttgtcacctgctgaatacatgttgtatagtcaggtggacctattcatgtgcaaactatcactgataatatagacgtaacgtttcagcgacttaaattgcgtgcttaatgttaggacctttttggtgcactctcttacacatgttcttcaatttgtcaggcggctttttttcttgacccaaaccctgatttagtggttcagtgtttggaaagctgttgcagcgagtcatgcccaccgaggttctcttcctcctttaggctttagcacaagtctagttccttttattatgcttgcttctcatactgcttgaaatttgattcattttcaggttctcacctataaagagtggcgactatttgaaagagcgattgagcgctacatacaaatagtcctatgctttttcatgtgtaaggcttaacataaggttatttaaattccgttctgatttgcagtgattttttaggtggcccgtggagctacctcgggctcagttcctttgcttggacacttgacagtttacataaaaaaatgtgaattggatctgcatatcttttccaaaaacgcgcaagagaactacacaagttcaagcagtggatttttaggtcgacactaaccgtgtggaactgtggatgcaggtaaaaggaggctaacatgtgctacacggccggccatcgttctccattgtccatttttcttctgcgtttagacatcacagtagtccagaaggttgtttgtgttgttttactgtaacgctgtaaagaaaaagtctgcagtgatgtgctatgcttgatttctctctccactgctcgacaccaacctgaactttttattgtttgtcgttcaaaaaaaaaactttttattgtcacctgcgagctgactggtgtttggactagtattcttgttgacttggtaaagaaactccagtttgatcctgggaggcaagtgattccccatctccatccttcactttctaactcttgacaaagtgaagttgagttgtgatatctagattttgttcatacctgatgaacgcgactaaatatgccatcgagaagattgtgatgtcctgcatggctaacaactgcttgccatatggcttttttacattttggaccttttttaaaacttattttacaaatatatcttaaaaaaacttattccgcctttggtggcaccaatgtcattggtaccatggttcaacatgacggtgccgatgccccctagctttcccaaagaagccaagtcacttgtatgatggcgaatggcaccgatgacctatttgtaaaaaaattgaaaagaacttatttgtaataaaaatatttataaaataagtccttagcactaataaccttgatgctaaggacttatttgtaaataatttttattacaaataagtttttttttgatttttttaggttctcgacggcaatgtcgttggcatcgtgaaaaggatctattcctgctataagtttttttcgaggaactatttgtaaactaagtttttgcaagagaccaaaagtgaaaaaaaaatccactgcttgccatgaccggatccatgagcatgtcaaagagttacaagtgtgtatgctacaacttggtctgaaacggcagcttggtgggtggcggcttccatgacaagttcagaatggtcatcggatccatgcaaaagctcaaactactcatggttcgagccgttgctgttgattcgcttgccggtgaaagctcggaactctggcaagaagactggtgaccaaatgaagtagtatggtcaagcagagatggtagattattttagagcacgtttggtacagctctaactcctaaatttagctctaatagttaagtctggagtggagttgtggacctgcctaaacccagctccacaactctagtttatttggtgagagagctccacccagctacactcccatttggtggagttgaaactgtttggctgagctctaacttcagaaggggtggagctaaagttagagctgtgccaaatagaccggaagtgtcacacaactacacgtacaaagtgacaaatctcacctcaccaaacaggtcaatgacaggtgcgtttaggtattctgcgactctttgcaatgcgtaataattacatgattacatagagacaagcacattaaatatacgttgattaatctcggcatggcatcaaatacaaacacacggacaggtcaaacctgtacagtatgaatagagttacagtgtctactactgcttggtgacaactcaaaaattggttcgtcaagaaattcaggctgatatttgaaaactgcatgggagagttgccaaagttattatacttgaagtgaaagagatgtctttgattaatttcgtccaatgtttctagacacatgcatcatgtatctcaactcctcaaactccaccaaaaatattgctcaaattagtaaactaaaactatacagctagtgtcaacatgttatccaattcagaaacactaattatttctacatgtggcatgctgaaaattaatctgatgcctaacctctcctactgataccaaacctcaagaatattaactgcagctggtctttttctgctcgaatgaatgtagctgcacgcaaggagaagcctatagggttttgtgggcgggcagcttaattgcaagattaattttagtggagaagtacattacggtttataatcagatcttacctgatcaagatcatcatgcttaatatcgttataaaactaaatgcaaaaccgggtgctgagttgcctgcggcttaccacgttgcgacgacatgaatgaaaagagaaaaacatgaggctacaattaatggatttcggacgtcagaggaatctcccacaagttagcatagcaagccagctgataggactaaatatatagttaattcgttaaatttatagtcgtctcaaataaaaaaaaaggttgatcttatgttgacctttcaaagtcaacaattatataagcactaaatttttatcattcatgtattatgtagtatatgttttaagaatatttcactaaaaatatacatttttaagtgtatacttaccgattttttaaggaggtaccataattttcttgttaattttatatatatattaccttgtgatacaataataccacgtaggtagtgaaaggtattaaaatttacgctaaggctatgtttggttaatccccaagagggagggattggaggagatttattccacacctattgtggtgtggaattattccccctcaaacccctccaatccccttcaaccccctctaaaccgaacaaggcctaaaacataaggtgttctccagactagcatcttttgaaggtccaaaataatctttttacttatcaaaattacaaatttaggcagtttttttatttggaaaaatagtacagtttgacctttcaaaaactaggacgagttctatgattagtatgttgggtttttagctgtttgactttcgaaaaagtattttatctacacgtcccatggtgattggacgacttatatatcctcaagcggccggcaaggtcagtcaacaatttttttattcttgaaaggtacaaacaaattgattggcaacgtacgtaattgacaattaagttcgacaagcactgcctttgaagctagcaaatatatatcgtaagtggttggatcatcaacaatttaacgcaaaagcaaaaaaatggacagaggaagattgatcaggggcaccctccacttaccgtttctcaccggacaatagtcaaatagttagaatatttgcctcagctgccaggtcaaagcaaatgatggatcttcatcctctacggagtccacgcggttttttggggtctatgggcctcctgtgatgtgcctcaattctacggtagaccggtgtggctaagtgcacctaatacttccttcatctcaatttaatcatctcttaagatttttttttgtcttctcaaattgatcatcttttaatctctgtctattcgtattttcgtgcataaataaatggcattattctacatgtctatttgtctatgcatgcaggagtaaatgtcatcctcgtatgcctggcatgcatgcaattgcacgtttgcatgcctgatcctatcttcctatatagttgtacccatttagtttacttctataaagtagggcatgcaagaagtcacatcatcaataattctaagccatcgtatcgcattagtacatacttatcagccgttggatcaagaagctactcatccatctaatttaataattgattactcatccagtcacctccctttagattataatcacgtgtgacattgttatccattctttacataataatatgttttctcctcccaagtcctctccaagataatgcaaacttatcttctttatttaatacaactcaaattgttgtataacatgttagttttgttttgttataaacaattggataacatatagtaatcaggcatcattaacccaaacctgttttcgaaacaagctcgagataaaagcaaagaggtgcaaactactctaattatgacgatatccagattgtgcatgaaaataacttttgtatattataacaatacacaataacattttaaaacaaacatgaattgtattgtaatagcagatcgatgctatatatgaagccacattatttgaaacattgattgtatttgatgtaaaactagcaaatcccgcggcaaggcacggggtgccaactagtatatataacatcttagtcgatgaggtttaattttagaaggaataatactttcttacctaggtctcggcaccatttataagtatgatgctcaatttggaaaggagggagtagagtttaactggtagtgctgcggaccatcatggtttaaataatagacttgacataaatgtcgataaattttaaaagttaaaattttcaatgggtaagtgcattcccatattttgggaggtcaatatctcctaatttccatattatggtggccaccaatgccataagggtccctcaaacaataagataggtggacttttttctcttccccaacaccaagacatcaaactagaaaaaaaatattttaaaacaaggtgtaaagtgatgaaaaatatgaaataaaaaattataagggactaattttattttatatttttttaggatttaaagtgtacggtgaggttctctttacttaattctcgttgcaacgcacgtacatttttttatatataattgaaattctcatgattggatggatatatcacagaactccatttgtatcaaaatccgggaattctgtgttagggggataaatatatttgtgtaacaatatagagaccatcggatcaacatggaagagacacgtatgtttccaaactaatcattagtacaaccatacaataggctataatactgataatattatcaaagtaaattttactttgagccactcttataggccaaagtttcacaatggactggaggtagttcatctttttacataacaccacatatgtttgcactttgaccggggttcataacttatgccttgatatctatttctccaagtagtgaaatttgatctttgaaatgttcatatgtagtaacaaaatctatttatctttgaatgttcatttgtaatgaaatcccatttattttgtaggatgtattataacataataatgtacatttgttggttcttatgctatatggtgtaaaccccgatccaaagtgtaaagataggtagctatatgttgtaaagtgaaaaatataggcatgatcctagtccataataaaaagaattggtcaataagagtggcccaaagtaaaaattactctaataataataataataataataataataataataataataataataataataataataataataataataataataataataatatgaaatgacccctacgtaactacttccaaacaacaacaatttaattccatcctccggtagagagaaattatataaattctccaaaacaagggaaatatctctactacttactcaaaaaagggaactgttgaggaagcactggtgatgtggtggtgaagtcgtagttgcatgatttcatccaccagagtttaaatcccagtgcctacgaatattacatatatgcaggtggaatttcaggagaattttagtaagatcatggatatgccactggttttcgtctcttaaagtgtgttaggggaaacatatgtggggtgtgaatatggtgttgcatgtgtagtgtggtgtgtgcatgtatgattgccgtgtaatcgggaaaaaaaagaaaccgttgctttatggtagggtgttcttgacgttatgttggattcaggacctgtttagatgtttaatacactttgccaaactttcataccataagtttagcttagccacggtaccatagctatagctcgaactaaacacttgcatataaaagtgaaacctagctagttatgggtttgtggcaaattaaagtttgaccacgaaccaaacaacattcttaaacagtttgtgtttagtttctgtcatgctgaactgctaggtccagtagttatctgtaatttgtaaactcttttgcagccttctagatatgacaggcactgttttgtttgtaatgatcagttagctccattcatattttgaaactgaaatttggagatcatgtatatggactatggttgacattacaaaatgaatgtagatatgtcaggcacgtacctcgggtacgcatgcactgttacaaaatgaattcagctgaccctctcttttacttctggttataaacaaatagttgacattttggttgatttgaggataaagtttcggtcgagtaagttgtacatcattgtatctgaaaattggtttgcaatctaagttttctgaacaatatcagcacacgatagtggctagctagctactagacagattgtgtacttctggcagctcgaatactaggaagctatagctagtgcactagtagtaaattgttagcaaattagttgactatccaagtaaaggcatatttaaatcacttaagaatggaaggaaatgtattaaacttgtacgacatgtatctatatcctatatatttttaaagtttatccccattaatatatttcttttctctcattaagcaacatcagcttaattatttctaaactttggatgatctatagtccaaattatctccctcctttccgtatcccataaagtcatattaccttagttttatcttttaatgattaatctatattatcttctttttcttctgtcattgaggacacatcatcttagttttacttttaaatgattaacctatatatgatttaaattgttataaactgcaatatcttaattatttatattcttttccatggtcgaccaaaagataaaaattatatagagcatataaagttatatcgtctagctattaattacatgttatttatattattatcatacaaaactcctgcaacaatgtgcggggccttgtctgtcaggttgatgattcagtcaatggtgccggatttagggttcataaagttttttttggtgacggtggtttagaatcttacaaaagaatgaagatggtggccgatgctcattcatgttttgttacatgtgttagagttgctcggcattgtgactgctcgtctgcttactcgcggaatttcaatatttacagtttctttgttctatcttagtatctaactttttcattattttttataacaagaggactattgtaaatttgtaatattctttcctgttctgccaaaaaaaatggcattgcaatgccggatctttgatgaatagtaggggccggccggaaagcaatgaagttcaatttacttttagtaccccgtcatgacccacaaattcaggattttactatgctgcactttattactattctgtcgcaaattaagaacacaaatagtacgtctatgagcaaaagtcaaacagttttttctttttcatgataatgatcaagtcggacttttccccttatttttttttcatcaggccgggcagctccaacatttccatgtaatataaggagggaaggagaataatattgcagaaaattaagcattgacttgatttcattagcccattttgtacaaatttcatttgccaaattgcatccaataacattccttgtcttcataactccgacagcgaatttaacaattttaactagattgagacaacctaaagaaacgctaaaagtaacaaatttattttgaaaacatacctataaaattgtgtggtggcaattagtctatttaatcagtgaagtgcttttgcagaaataacccatcacctctcgcgcgcctactatataaatagatccctcgctgctcattttctcctcgtccagcttcaagctctcaactttctcatcactcgtctcctcgatttatttgtctccttccatccagacacctcgagccggcgatcgatcatccaaaccaagctccgccgcccgagacgacgaagtcgacgtcgccgccgccgccgctcgccgccggcacacagctagctgcaagctgctagacgacgacgtcgagctgatccgttctaaaacatcactataaactaatccatgtcctgttcttgatatccctctctctgttgcatcgaatgaccctatccatttcggccttagctatcttgctataaagctcgtggtagcttgttacctttgctagagttttgaattcctcatcttctcccgccgtttttagctagctgttttgttgcacacgtgcaacacaggacaagacgtgtgtaagagcttggatactgccgccatcgctgccatgtgcgaggctctcgttgaccggcaactcctccccccgtgcggttgcaatggcggcggcgacgtcgttgtcgttgtggtgccgaagacgtcggcggcgccggtgttggaggacaggccgaagacgtcggcggcggcggtgagcaagggcggcgaggcggcgtcgatcctgcggctgtcattgccgatgatcatgacggggctgatactgtacatccggccgatgatctcgatgctgttcctcggccggctcggcgagctcgcgctcgccggcgggtcgctcgccatcggattcgccaacatcacggggtactccgtgctgtccggcctcgccatgggcatggagccggtgtgcggccaggccgtgggcgccgggaacctccccctcgtcggcgccaccatgcagcggatggtgctcctcctcctcgccgtgtccgtgcccgtcgccttcctctgggcgtggatggagccgctcctcctgctgtgcggccaggacgccgccatcgccgccgccgcgcagcgctacattctcttctgcctccccgacctcctcttcctctcgctcctccacccgctccggatctacctccgcgtccagtcgatcaacctgccgctcacggcgtgcgccgcgctcgccgtcgccgcccacctccccatcaaccacctcctcgtctccgtcctcggcctcggcatcgagggcgtcgcgctcgcctccgcctgggccaacctcaacctggtcatcttcctcctcgccttcgtctacgtctccggcgtgcaccgcgacaccgggggattctcgctgccgcgcaagatgttcaaggacgtcgacgggtgggtgcggctggtcaggctggccgccgagagctgcgccagcgtctgcctcgaatggtggtggtacgagatcatgatcctgctctgcggcctcctcgccaaccccagggccaccgtggcgtccatggggatcctcatccagaccacgtcgctgctctacatcttcccgtcgtcgctcagcttcggcgtgtccacgagggtcagcaacgagctcggcgcgaaccggccgtccgccgcgcgcgccgcggcgagggcggggctcgcgctgagcgccgtccagggcctcgcctccctcgcgttcgccgtgtccgtgcgcggcgcgtgggcgcgcatgttcacgccggacgccgacatcctcgcgctcacggcatcggtgctgccgatcctcggcctctgcgagctcggcaactgcccgcagaccaccggctgcggcgtgctccggggcagcgcgcggccgagagacggcgcccacatcaacctcggcgcgttctacggcgtcggcacgccggtcgccgtcgggctcgcgttctgggcgggcatggacttcagggggctctggctcggcctcctcgccgcgcaggcggcgtgcgtcgcggtgatgctcgtcgtgatccagcgcacggactgggacgtacaagccaagctcgcgcaggtgctcgccggcgccgcggccagtggcggcgaccacggcgtcaacgaagccggtgggaatgacgcggtcgcgcacgtcaaggtcgcggcgccccacggcgacgaggactcgagcttgctcatcaccgtgagcacgtagctgaccggagcaacgccgtgacaacgacgacgtacggccatgtctacgtacgtatgaaccacggtaactagctactccctccgtcttaaaatataatcatttttagctatgaatctagacaagtatgtgtctagatttataagccaaaagttgctatattttgagacggaggtaaaagtcattgtgtcgtgtgaaagcacaaagttcttccggagtctgaactctgaacattttttttggcagttcgcatgagttggtcagtgtatgtacggttatacttatacacttaattatacctagtatatagtgccatagttattgcagaaaaacacctgagcttaattttggtgaaaaatagctcggtgtttcctgtaattacatggccttcatagaacagtattaggtggtgttgagcgaactaatcagcacctagttaattgtcttcggttttagtaggtggcctgaggactcgtattttttgtatattttattcttttccacaagttatgtattgtcatgggtatatatatacttgtatatgtacacacaaaattgaaaactaagtgaaatttcggtgttccttttatattttgttggtacataattgctgtagtacaattcacacagatatgatgaaaattagtttagtagatggatcatgtacgccctcattcccagcgtgaaatccaaatagttatgaattttttttaaaaaaataaaagcatgtattgttgttgtgtactatatcgatcgaccacacaaacatccctgttaaatccgttcattcatcttttttttctcaaacaagcaagataactgcctgtcattttttaaaaagagaataaatgagttcatcttgtacacaaaattttagaaatctaactgtaatgtgactacacactttttatagtctaattttaattgtctctccatgtgtacagaaaatttaacatcttttttaggggagggatatataaaatctttattattagaagtttctataaccattgttgaccacatgaaaacaattgatgtcacatgcctaaaattgtttaaaaatagaagttctaatggaagatacatatccagttttcatacatgataactagtcaaactagtcaaattactcatgcgttgcaaaggattatccaaatagacaaaaaacaatttgaaaaaaatatttatctctagttgattatattcaaacaagattcttcatgcatcttaaaaaaaaaagtataccatctattttgaataggtatgttagtacactaacttcaattaatgtacggaatcttatgatcctatatactcactagtaaccatcatcatcaagagttatttgaagtagtatatataaatccgtgtatccaacagataagaaaactataacctttatgatgggacaaatgtagtataaaaaaaaatgctattggacataccataacaatttgttatgtaacaactaaaacagtaatctattagagcgtctgtatacaaatctacaatatataattagttgcatctcaaactcaattcggcctccgttcccatagcttccacggtagcttaagcagaatctaacaggctaagaaaaccttcctaccaccaagctagctagcgatcccggccgccaccttaatcctatcttactataaagttatctcccactaactccttaagtttaacatgcaaagatgccacatcatcatccactaacaagatgccacatcatcatccactaattaataagatgtcacgtcatcatccactaacaatcatcacatttaaacattatgcaaacatgctatatctttatagtttttataatttaagagctttttaaatacaaacatgttaaattatcatctaacataattcacataatgttttaatgtatatcttcatattaaattcccgcagcaatgcgcggggtttcacctagttaatcaaatattaaaacccaatttgtatagcaccagagttaatattgcaaagtggagtcgtaggtgcatgattccattgctataatttaaattatagttcccacaaatattaaacgcatactctctcctttttaaaatgtaagagattttggaaggatgtgactcatcctaatattacgaatctggaatatgtcacgtcccaccaaaatcccttctattatggggcgaaggaagtatgcatgtagtaatgtacttagactttcaacatgattttaataagatcagggattttaatgtgttagaaaacgtattcgtggagtacgagtgtaatactgttacgtgtgtaatggtatgtgcatctccgtgtaattgaaaaaaaaaaattaatgcaaagtataccggccctatagtacgtaagcgagaatatatacgtacgtaggcgcttacgcacgcgcccacaaacaaataatcaggtggcgtctgatcattgccactgttccctacgtaggcggccggcgtcgctgtcgatggcatgtcggccggggttgggtttgctagctgcaggctgtcttcccggccgccggcaccgtacccggccacgcgcgcgcggaggccggtgagaacggcggcgcgtagattagattgtccgcttcctcccatgccgccgcggcgccgtgtcgttggaattcgatcgagatcggctgtgtcggcaagttgaccatctatcgatcggcaattcggcatcgacacgacgtacgacgacgacgacgccacatgtgcatgcttatggtgaactactccctccgtcccataatataagggattttaagtttttacttgcaacgtttgaccactcgtcttattcaaaattttttaaaattattatttattttatttgttacttactttattatctacatcatcactttaagtacaacttttcgttttttatatttgtaaaaaaatttcaataagacgagtggtcaaatattgcaaataaattaaaacttaaaatcccttatattgtgcgacggagggagtacctagcttcgtcgcatatgcagccgtacgtatatgagtacgtatacttgcgttctcacgtcacatcgtccattgcaggctcttccccgctgcttgcccactggcgtgtgggccctaattagtgtgcaacagcggcttaggggcttaggatgtatttagttcacgctaaaattaaaaatttgattaaaattaaaacaatgtaacggaaaagttggaaatttgtgtgtgtataaaagttttgatgtgatagaaaagttaaaagtttgaaaaaaattttggcactaaacttggccttagttatattatggctagtcgatgcaccatacattaaaaaaaactatattttttttacaagtacaagtcgaatatataccactaaatacaagtgccaactcatatatattacccacctatatatattatgtccccatgcacacacttatatagctaccatgcatataaacaagattagaggccagtctcatatagtatgagttttggccatcaaacgcgtctacatgtatatactgaatttctcttgctctctagatttggcagttattacttggtcaaaaatattttggtttcttatataagcctgatattaaatgtcactaagaattactctctcgttcacgaatatatactcgtcaatttttatccattttatttattggcaaatatttttcacttcatgttttcgaatgtatttttttttctcatcttactcattaatttcatctttcatgttctctcaaccacacatttaggcttgttcggttaatccttacccccatgagattgaagggatcaattttacacctattaaattgtgaaattaattctcctcgattatctccaatggttctagaagcatctagctagttagctttgaaaggtactccatatcatatatggcgatataatatgaaagcaaatgattacctagatatatcgatccatgttatggtcaaaagtaataattaagtagttatgaacgaagggagtatattttttaataaaaataaaacttctatcatggaaaatatattaatatggttatctctaacaagtatatatattagtaagcaatatatatactagtacatagcacacggtgtctgaacatcgacatatggagagcttgccatcgttttcgcagtactggctgtgatctaatttacaattattgctcaagctacaattggtgtttgctctttgctttcgttaacctgctgccccatttgcaagttgtttgttgtatattttctgtaaaaccaatcatgtgcgtcatcagcatataattaacaacgcacataatatgaatagatcgattcgtctacgtattgctgcatctttgtgtactttgaaaaagaatctagctagctgagatgtacgtacgtatggaaaaggattccgttgttatattaattccacgctttcgttttctcaactgtaaagcttgtcaatgcatgtcagcgtcagttgtttttcccttagactactgtaggatcgaacacaaaaaaccaaacttaccagaggggggtgaaaggggggtgaatggtaggaaaaaccaaaaacccaaaaacttttagcggaaataaaagttaccctcaaattgaaaatctcgatgtagtcctgtcgccgccgccggtcggacagctcacacgccgccggaacccaaagaaacacaaatcgaagaactctcaaagtagatgacaactttattgcttctctctatttttacaaagtgcaacaacagcactctttacaaaaatctcgactaaactcgaaaccctaactaaactatcaactcaattgttctcaaaagcgataccgggaagcctcacgctccctctctatttataaaaaaaaaaaactccctactcaaagtaggtgtagaactcctattcacaatagaactcaatccctgatattccaaatcttcacaatttctctaacaaatccacagccacatccaatcggactgcctccgtcccggtcgtcgcgatcgcctggccacctgagccgactcggcctgccatctaaccgagccgccgctgctgccaaccatcggcatgcatacatacatgtatcagcatgcatatatgcatacacgtcacgctacagtaccacgagtactgtagcacatatactcatcctccaatttcttaaccaatttcctcctcgaacaccgacgcttgcatgcacacctcgtgaagcccgttgcgaagatcttttccacacgatatccatccaccgtatgctatctcatatccaacttcgtcacccggtatccttgaccgtctggacctcaactcctccctgagtctagtcccgatccccaccgttgaccgaagttgatctccaagaatcctgactctagtcaccttctcacatggtatcctgaccgcactagacctctgttcctccttaaaacatagtcccgttcctcaccattgaccaaggctaacctcaagtcacctgcacacaatcagacaaaacaacagttcctgggcacagatatcacaacctgacccacattagtcgcacgcactcacaccaacatccacacatactctcaaaccaattcattgattaaatcatttacaaaaccaattattcatcacaaatattaatcatgacaataatttcacaactacttcagcatatgacaactaaaaaagtgcatgtaacatatgcagagtaattaattaggcattttgatgttataaatgcataatgcagaaggaaaaatggtgcacaaattactgctagctgtgagagtaataatccatacaacgactatgagcacatcctcaattaactcgctctttttgagaaaaaaaggttggtcgcttaagggtaaaatgttacactggaatagttctataacctcatctcgttccagctgatcttccgtggctgcaaatatatgtgcggtatgtttgtgctttttgtatatatgattatttgtttatagaaaaaatattgcatctttgcatattttttttcgcgatcgtaaaaaagattgcacgtcaatatattacaataaaagagtttttgttacacaatgcaatttgccaaaccggcctatgccaagggaagggagaaaacaaagacaaaaaccaaggaagaaaaagaaaactcatacgacggataaacgctactccaatcagcgggatggggagggcgggaagggagcagagccatactacactcccaacaaatccccaaaagaagcaatgcctgctaacaaccatagatggccctccaagaggatggactctagaaccactaagaccgaagagagagcgcagagtcgaaaatcctggagctccgttccttctacagttaccaagagaccaagaggactagggagtcaaagccggcacggaggtgcttaggtaagcaggccctagaagatggccaccagtcctggtgctagctgccacggaggagagagagggcaacccagccaggaggcgacagcacccgtagctagacctgtcgagcgaacacgcagtcgaggaggatgtggttcgccgtctcaagctcctgagcgcaaaaggggcaggccgagtggctatcgatgccacacttccgaaggagatcagccgtccaacaacactgctgaaatgcaaaccagaggaagaatttgcatttagcataacccttcacgtgccagagaagatcagcacaagcaaaggagtgctggccatagaataacgcctggtacgctgaacgtgccgagtagcgttggtcactcgtcaagcgcgcatctttgcatatgaatatacatacacacatttgaggaaattttatttattatattttatacttaattagtacattaatttagtttgcattgctacacaagaacgctatgctggtatatatatgactgctcacctatatatatgatgcaaacagcaagttatcacgaaattagtctcaaaatatggaatgtatatagaagaccatgtaatttgtaagagagatgtgtttaactttttaaaaacttcaagatcacacaaccccttcaatcttctcaaacacaaaatagttacaaattctctgccaaaaaaatccacatgcactagaggcaaccaatttttttttctcaatgtgtagactttaaaattttacgagtaaagcacaagacctgttcctaaaattaaagcgaggttatattcccaattttaggccctatttagtttacgaaaagaaaatttttgggtgtcacatcggatatttgaccggatgtcggaaggggttttcggacacgaatgaaaaaactaatttcataactcgtctgtaaaccgcgagacgaatcttttgagcctaattaagcactgtagcactttatggctaattatggactaattaggctcaaaagattcgtgtcgcgatttccatgcaaaccgtacaattagtttttgtttttatctatatttaatactctatgcatgtgttcaaagattcgatgtgatgtttttaggaaaaaaattttgggaactaaaccaagccttgcaagttcagcatttaggtcgataatcctatatattttagagtaccactgctctctactagtagtataaagtaatccaaaccattgatcttatttgatcgaagggttaagatctatttctagctactaccatccaacttaacaggagtagaaatatggaggggtattattgtcccgggaaaaaatatggagggggtataatcataatttatcactgattaaccctagcggccattcattcgatccttcctcacgccgcgatccaatttctcgatggaatctgtatgtgtttgatgcgtttgagactgttgaacactggattcaagtcatgatgcatgccagcgattaagctatgattatcgtgactagcgtgaaactccggtgattatcgtgactagcgtgattaagctatgccaccgattaagtcagatccaagggccgatgccagcgacctgctgacccgtgaggggaaaaaatgaaaatggctaagttaccctcgtaactgtgttaataagttactattttatccttaataagaaacggttcagatctttttattggtagtataattctaactaatagaaaacaccgaagtattgtcctatatattttaatgtatcttagcaagtccaaaacacatttaagtgggtttgaccgtcgatgtgtggctgtatgtccaccatgactggacaatatttgcatttagctccctccaatgtttgttcgcaccggtgacgccgcatcgaactgaccggccggccggtcaaggaagctgcagcgaggtagcaccgtagcagtgctcctgaagagcgcgatcaccttggtctccttcagaccgagctacataataaatcaacctcacaaaatatgatgtatactaacactacaaatctagatatacgtgtattcaaatttttagtattaggatgagtcacatttcgtatgaggttatgttgagattcttaatgttaggatgcatcacatactgtatgaggttatgttcagatttttagtattagaatacgtcacatcctgtacgaggttgttttattacaggacggagcgagtaggcgtcatccccctagctagctggcccagcgatcaagtatacgtaaccgcgcgctggcatggactgctgctgcctggagtgtactgtagcggcgctaggtggctgtatacttgaagcagtacgtcgatcgtacgtgttgtgtacgagtgcttgatattcatactgtttttttgtttctcatgccatcctgaaatagaccaaacagtaattaatttatgctttgtttgtttgcttccgtaggtagcttaaaaagattatataatgaatatataatcaaataccacagtacccttctagaaagcaaatacattaagctatgtatagtgtatgtactactactccgtattagctagctagagatcgatctgcagatcagatcagctgtcacgcgtggcctctgacgccttgaatgaggtaagttaattaacacttgttgtaaaatgtaaagagggcaaccgcggcagatcgatcgatcgatcgatcttcagaataatgcgatcggtgcctcagttccattggctatttctgatggccggctgggccgggttgcatttttgcatctaatataccagttcagaaaccaaaaggatacatatctttttgtactatcaattattattctgtcatgtattccgatgtgctgcatatcctatagcatttgcccttcgagctccgaagagactggccgggatcgaactaatttacacagcaaatgcagagggtaataattaagaaacactgcaatctatagtattatacttcatgctggttgaggtgcatatcgcttctatgcctatatctaactggtactgtaagttgacattttgatgtctcatattgaaaattctcaagggctcaaaagtcccattttttaattggttgaccatgcatgaggatgtacatagcagtgggacatggtcagagatgatctagatggatggcaaactaggggctgaactgtctactacctgcatggttacatgccagcacgctcacatgaaacctgcaagatgaacaagactaaccaatgatcttgtgtacaatgtacggcttcttcatgcgtgtaccaatggggattcgctgactagatggcggcatacattttatgcgagagaaacctttaattcgttcagagtattcagtgttgtgccatgttcaatgtgtaattattctactaccatgtatagatgccaaggtttaatataaagtatgtatagtccactggcttgatataatcgcaacataagttatagttcttctccgaacaaaccatatataaatagaaaagtagcactgaccgaatgtgctagttttttacgcaaacacgcaaaagtcttgcgtgcaatctatgtattagaaggtagaaatagttgcatagacgatgcaaccaatgtagcagttggtacggaaaggggtgaggcggggaaggcttcatgtgccacagggaggatattacaatgatgcaacctcctataataagaaaaaaacagaaaaatcacaaaggtttcgtgccttctataatctatttgtgtttcttgcagtatcaaatcagttgttattggataatttattttatctaagtttgaatatttttaatgcaatcttgtaagtatttatggttataattttatttcatgtaatttatagggttagataattattagtcaacgttttttattaaatattactcaacattttaggtaataaagatggtactttgtttaaataaatttcaagagtgatgagaatcattggattccatccaaggagagagaaaaatggcagaatttttttaaaagttcagtcacctaaaatctagacactacttaatacatactttctccatcaaaaaaaaacctaacctagtatgtatataggagtctgaccagattcattgtactagattatgtcccatttcatacatgttgggttttttttgggacggagggagtcgatcgatctgaggcaaatcgtttatccttatgctatttttgcttcttgacatcacgaaagccgacgaccctcagttgtgccgattttgcaaattttctttatagatacgtcatgtatatagcatattcatgccaacgtatacgattataactccaaatatatagttcatctttaaattagttaagaaattgatttcccttaaataagagatgaaaaagaagtactagcgtggccgtcatgcatgagatttccctgacgacgtctagcatatgcctattattgatcgtttatgtacatacacgcctgtgattcttatggacattcattgattatattgccgtctcacctctttttaattggttgactagttaaggaaaaaattgtagttatatgttacttttttagcatgctacagtacttaaaaattacgaaactcttacaactaacattgattttaaccaaaacgtattttgcggatgttagggtttcggcgacggccgggcgaccggccgccggcggcttcacccctagtgtggagttggttctggatggagttctactccgatctgttgttgggttatgcagggtctgcacctgcgtttggtaaggctgtgacgatcaggtctcacccaaaggtgggtgatccggtggattggttgcttcgggggaaaagtaaacctgtaagtttctggataaagcggatcggagaggtgctttcctatggtgtgggtaacaaacctttgattcaccatacagatcaagggccgattggctggggcagatatgatccatattggtcttccagagtgggatcgtatcggaatcgaactctgccggaaatcaatataaagtgacgaactggctctggtcgtggatttaagtcacaactagcttggcgaaaatacaaccaaactgccttcgcgtcttcgtttgtgccgatcacgtgatccaatctatggcgtctgaagtcggtgggggcgacaaagggatcgtcatggcgacggttacccgcccgaagccgatgacggatggcagggttggatcgtcgagtttggcgctggttctggcggaattgccggcgccgaatcaaggagaggtcttggctgtggcagggaaggaggcgggggagcccaaacagaacctgatccctggaagtacatcggttgtggctgggactccaagggtccggcgactcacatagaaggtgatatactggaggatgaagatgacgtggttgaagtcagtcttgatgcagatgaggcaaacctggtggggcagtggaccgtccttgctcgctactactctttgaagacgccaaatcagaatgctctctttgatgacatgcgtcgagcgtggagattgagggctgacatgaattacaagtctcttagggacaacctgttcattgtttccttcagctctgaaggggattataagtttgttaaggatggaggtccttggttacatcgaggtgatgctcttttggtggcagagtttgatggcctgacaagcccatcgcaagtcccactggaggtggttccaatttgggttagaatctatgatctcccgttggttttgatgacgaaggataggggaatcttatatggcagcaagctgggacatgttcgggaggtggatgtggaagcagatgggcggaacaagcatgatttctttcgtattcgagttgatctccccgttaatcgtgctttaaaaacacacatagctatcaagatcaatgtccaaggcaatgaggaggtttgagctgagatatgagagagtgccgcacttctgttttttctgcggttttatgggccactctgacagagaatgcgagaagaagctcactaatccagaccagccgttcagattctcggcggagctgagatgttctcccttgaaggcctttgagaggaagattaacacagtgaaggctgtgcaaagctctggggtggctaggaaactatcgtttagtggagcgggcagtgctagctccacttcatcgagacataagaaggttgagcaatgggatgaggcagttcctccaaggatggaggcttttgatggttttgaattaaatgagaaggaaggggatgctaatgttgacctgcagcttgccgatcagacccgcaatatgcaggtgtcagggggtggttctcaggatgccgaaggcctcacaaaaggaaggaaaactaaacaagctagaccggcaccttcaggtgatctggtttagtcaacggggaagctgtcgtcgggagagatgatacctgcaatgagggagttactccaacaagcgtcttttggtgaagtctccaccgaggacactactagccttaacaagaggaggtcgcctgattcgggaactaagtaggagggcagagtcaagcaagctgctttggagtacacacaggcaacaggggaaggaaagcagatcattgtgaagccggtctctgcaggaagagcactgaagcgtgtcaggaaggaggcaacgggggatacacagatggaggatatggaagcaaccagctcgggggctgctggtaaactgacgggtcccatggcggggtcctatcaggagcaatgaattgcttatcgtggaactgccgtggcatcgggaacgccacgacagttcaagagctttgtgccttggtcaaagaggccagttcccaatttgtatttttatgtgaaactaggcagccagtggataagattaagcgtttgcgtaatagattgggtttgagaggttttgcaggggttagcagtgatggaatgagtggtgggcttgctcttttctggcatgagtctgttcatgtggaaatcttaaataagaatgaaaggtttattgatgcttatattcgtctgtctcctaatgatcctttgtggcatgctacctttgtttatggggaacccagagtagagaatagacacaagatgtggtcgttgctcaactcaatcaaacaatcttcaaacttgtcgtggctagttataggggattttaatgaagctttgtggcagtttgaacatttctccaggaaacctagaagtgatgctcaaatgcaggcctttagggacgtgttggacacatgtgagcttcatgatttgggaatttctgggttaccacacacgtatgataatagaaggggcggctggaacaatgtaaaggttcgcttggatcgtgctttggcagatgacgagtggagggatttgttcagtcagtaccaagtccaacatttggtttctccctgttctaaccattgtcctattgttcttaaattacatggttctgtcccagatcaggtctgtcagaaatgtctgcactatgagattttttgggagagagatgcagggatcagcgaagtagtttcggatgcatggaacgaaacagggggaagtctgatctgggggatatctctctgtcactgaggaaagttatggcagcgctgcagtcttggagtaagaaaaaatacaagaatattggcagagaattggagaaaacaaggaagaaactctcaaaccttttagaagctggaactgataaagctgctatacggcaaacctcggattacatgaatgaattgttgtatcgggaagagatgttgtggcttcaacgatcccgcgttaactggctgaaagaaggagatcgtaatacaaaattctttcacaatagagtggcctggagagccaagaagaacaaaattaccaagctgcgagatgctgctggtacttttcataggtcgaaaatggtgatggaacaaatggcaacacagtattttaaagatatgtttactgctgacccaaacttggatcattccccggtgactagattaattcaaccaaaagttacggaagaaatgaacaacagattatgctctgaattctcagaagatgaaatagcaaatgccttgtttcagatagggcctttaaaggcaccgggtactgacggctttctggccagattctaccaacgtaattggggctgcatcaaaaatgatatcgtgagagcagtaaaagaattcttccattctgggattatgctggaaggggtgaatgatactgccatcgttcttattccaaaaattgaacaacctagagacttgcgagacttcaggccaattagcttatgtaatgtgatctacaaggttctgtccaagtgtctggttaataggctgaggccttttttggatgaattgatctctaaaaatcagagtgcttttgttcctaggagaatgatcaccgataatgcacttcttgcttttgaatgctttcatttcattcagagaaataagaatccgagatcggctgcctgcgcgtataagcttgatctctccaaggcttatgatcgcgtcgactggaggtttttggagcaatcaatgtataagtggggtttttctcattgttgggttagttgggtcatgacctgtatatccacggtgagatatgcagttaagtttaatgggaccctactgaacacattcgctccgacccgaggtctgcgacaaggggacccgttgtgacccctttctctttctgtttgtggccgatggtttatccttgctacttgaagagaaggtggaacagggagctatctccccaatccgggtttgccaccaagcaccagggatctctcatctactgtttgcagatgacacactgttattcttcaaggctgatctttcacagtcacaagctatcaaggaggtgttcggcagttatgctactagtacaggtcagctaatcaatccaacaaagtgctctatcttgtttggtaactccttgccgatagcttctcgagatgccatcacaaactgcttgcaaattgcaagcacggagtttgaagataaataccttggtctccccactccgggaggacgaatgcacaaaggtaggtttcagagcttgcgagaaagaatatggaaaaagattctacaatggggtgagaattacctatcgagcggcggaaaggaagttcttatcaaggctgtcatccaagcaattcctgtctatgttatggggatttttaaattgccggagtcggtttgcgaggacctaacaagcttgacccggaatttttggtggggagctgaaaaggggaagcggaaaactcactggaaggcatggaaatctctcaccaaatccaagtctttgggtggcctaggtttcaaagatatccgtctgtttaaccaggccttattagcaaggcaagcgtggagactcatcgataaccctgatagcttgtgtgcacgggttttgaaagcaaaatattatccaaatggatcaattgttgacactagttttggagggaatgcctccccggggtggcaggccattgaacatggcttagagttggtgaaaaagggcatcatctggaggattggtaatggcagatcggtgcgcgtgtggcaggatccttggctgccaagagatctgtcaagaagacctatcacaccgaagaataattgtagaattaaatgggtggctgacctcatgttagacaatgggatgtgggatgctaataagattaaccaaatcttcctgcctgttgatgttgagatcattctaaagctgcgcacctcatctcgtgatgaagaagattttattgcctggcatccggataaactcgggaatttttcagttcgcacagcttataggctggcagagaattgggctaaagaggaagcaagctcgagttcctctgatgtcaacatcaggaaagcttgggaattgttatggaaatgtaatgttccatccaaagttaaaatcttcacttggagagcaacctctaactgccttcctacttgggacaacaagaagaaacggaacctggagatttctgatacgtgcgtcatctgtggcatggagaaggaagatacaatgcatgccctatgccgctgtccgcaagctaaacacctctggttagccatgaaggaatcaaatgatctgtcactaaggatggatgatcacttattaggcccatcctggcttttcaatcggctggccttgttgccggatcatgaacagcccatgtttcttatggttctgtggcgaatttggttcgtccataatgagatcatacatgggaaaccgagcccttcgatagaggcttcacaacggttcttacagagctatatgaaatcacttttagagattaagcaacatccttaagctaatctggagaaaggcaaacatgtggttagtttcataccgaacagtcctgttggtcaaaatttcagacaacaggtgaacttgaagaaatgggagaagctggcgctagggtggatgaaggtgaatatcgacgggtcctttgacgcacaggttaataaggggggaactggtgctgttctcagagatagtgatgggaagattatctttacgtcctgttcctaccttgattagtgctatagtgcgctggaagcagagttgctagcttttaaaacagggattgtgctgtccctgcaatggactctgttgccgttgatagtagagactgattgcctggtggctatccacatgcttcaagcagatggggaggataaatcggacctagcttttcttgtccgagaggtgaaagatctgttagctggaataagggagattaaaattgtgaagggccatcgtgaccaaaatcgtgtgagccatctgttagcgaataaggctcgctgtgaatctatttcagatttttggcctaagaacacttgtaatttcatctcacattttgtctgtgagtagtaatatatctccctttccccgcaaaaaaaacattgattttaaccgtttgatttaaattactggaaacagaaaatctaaacatatgtatcaactttagtaatagtatagtacagaaaatgtaatacttgtaccatcttccattttttcgaaagaaatataaagagagtatgtgctgcgatcgatacaatcatgcatactccctccgtcccgtaaaaaatcaacctagtattgaatgtgacacatcttagtattacaaatctggacatatctctgtccagattcattgtactagaatgtgtcatatccaattttagatttgtttttggacggaaggaggacaatatttgaattgaaaccaattgcaagctagccgagactctagctaaccataggtcttgcccgtttgttctttatttattagatgataccaaatactgcagatagtaggggagtggattttgatccctcaaggggatgtccactccttatttgcatgtcatttaaatgattataaaaaaattaagaagatatataaacatgtgatatatcactctacaaacatgcaagttcaaattcaacttctacatcttacaacaaaaaaacaaatttgactatgaatatactttaattagctgtagtttaatttatttttttcattgcaagatgtagagttgaatttgaacttgcatgtttgtgaagtaatatatcacatgttaatatatcttcttaatttttttttcaaattgcttcataatcatttaagtgacatgcaaacaacgaggagatatcccccgtaggatcaaaaagtttccctagatagcaataaccaccaaattatgtccatgtggattactagtagttctaagagatgctcgcgagagctgtatatatcacatgacccctaatggattagtaggttgttctttcgtgtgcttgcatgcctagctagctagcttcaggggttgtttggttgcatgccacaagttgccacgtctaaagttagtcatgccacggttttttagctattgtttggttcatgacacaactgtggctagccacacattttctctatatggccccacatgtcatacactagtattttttgctaactttggctaagttgtggctagtattttgctaaccacacattttgtggcagccacaccttgcctaatatgggatttggcaaagttagtaagcaaccaaatatcccctggtgacacggcccattccataggcacatctttgaggcatcctttcaccttctcatggactacagataaagaaaacataagacatagtatcaaactgaacgtcgcaagagcagaccaaattgatcaattggaccaccactacgttggtacatagctggtagacggcgctgacaatctaccttgaggcacccaaaaaaggagtccgcactctactccttctaatgacatgggagatatggtaggagagaaaccagatagtgttttatcacaaaagctttcggcaattttcctcgcagggaaaatctagcatgaggcgaaaacttggccaacatgagcaaaacgactcacacagcttataccttagttttcccatttacctttgttagtttcttttatctatacagaatttctttctactatattcaataaaaattggcgcactctaattaagtgttgatttgtaaagaaaaaaaaagcaagaactgcaacacgtaccaatgcatgcatatactattttacatttagtccatatatttttttttcatataactaaattaaacttgatactgtggaaacactgttgttttcgctaattaattaattgcattgtcattttctttgtgagttttgaacgagctgagcagaggcagttgtacaatagtctgccaccttaattcttttttttttcgggaaaaaggacttcattaaatcacatgggacaaattacagtctttttcaatcaaccatgaaacagaattggactcaaacccagcccaaaagcctgagtaatcgtcccttctagctttgtttgctaattcatggctaatcaaattttgttcccgctggatcttcgtaatagaagtcgtcctttctcctgatcgaagccatcttgcttctctgactagaaacgccagggttaagcagtcctccttattagtgagtagatgcacaactgagatgcagtccgtttcaattgcaaccagcagcagtgtccattgcagtgctaaccgaaggccctccacacaggcggcaagttcagtctctaacgctgaagagcagtttgcaagtgacttgcacatcgtaaagatggtttcaccattgtagtcccgaagaattgcactgatcccagcactaccatcggactcaaggaaggagctatcgatgttcagttttgccaatcctgagggaggtcgtttacagcattcttttggcttatcatccttttgcgtttggcaaattgtgtcgccctggatcttcttccgatccccttcaccaggtcactcctttggccattctttatcatcagcaaggattggacatagctttccaagaaccttttcaatgcacttatgggtgttggtcttttatcgtgcactatctcattatgaatgtaccaaattcgccacaaaatcatcagtatacgcataccatcttctgccgaaactgtatctagcaaggctaacaaccattctgggcctgtctgccaccttaattctgcatatatagctgtcctgtgcaaatgtgcaattaattggtatagatgtccaagcatcagcaagtatatcttgcagtgcaacacggcgacaaaaatgtgcgtccaacgcaaccattgtacaatgaagaagaagtagaggccacagcatgcaagatatatccatttgcaatgccatgaagaagaagaaacagctagctaccgatgctagttaattagcttgcagataagggtttgaccagcactaattaatcaccacctacaggaagtcagaaattaaacaatgatacttacccccaaagcttagcagaaacaacatgttacagctgtttcaagcaccaagaggccaacgcccacctaccttacctagcttgtttttaatcaagaaactgacgatgtcccacgctttgttgcgggatatatattagataataaaaaaaaatgatgaaatgatttggattgaaacattataaaaatgatttaaaaatgatgatttagcatgtgtatatttagttatagaatgaaataaattatatatataattattatatacttacatgttaagcttttctttcttaatgggttagtgtagcatgtaggttttagaagctaataaatattatgcttgcatgctgagctttagatgtttagggtgtattagctttatagtagaaagaatggatacaagctgctcttgagccggccggccggcgcgcatgcatgcatcgatcatcttcgtcgtcaaggcgatcggaacagaccagtagccgtctcttggaattcctttcaacttaattatacagcttacttagaattatatcaaatattaatgcttaaagagtaaagatagtactcaagcaataaggtggtcatattgtgttgaaaaccattatactttcggaatttgttagaactaaatcttcagttatatactgattatatactgatacttgatcttttgctcgagacatcattttcaggtgtcattaatttttattttcatgtattagactgagatagaaattttttacctcaaattaagtattaagtatagtactctctccatcccaaaatataagcattttttgactttgatacggtctccgagatgctactttgaccaataatatatataaaagtaaaatattttaaataaaaagaggctgcatattatgatagtttgttcagtaataaatctagtaacatcaattttatatgattgattttatttttatttttttactattaatagttaaagtttaaaatatttgacttgtcactattctaaaaatgattatattttgtgccggagggagcagtagtcaggggttggagccatcgcccggctagctcgggtggctgctcgggcgtgccggcgaaaactccaataaattttaatattgataagtaaatcgatgatgatatttttatagcaaatactagcaaaatctttttggcttcaccactgatagtaattaacattacggcccctcttgtgaaaaaaagacgaagggcttgttcactttgctactattttcaaccttaacaagttttggtattgccaaattttagtaaagttgctaaaattttagcaaaattatcaaattttggcaagatttcatatgtacttattaaaatttggcaacaaattaaatgtagccatttttttagtaattttgcttaaaaaagataatgttgaaaatggtagcaaagtgaacaagcccgaaaccctggtttgagacgtgagaaaaatcttctcttcactcacagaaattgaaccgtttccaatggaatccgcacgaaaatctcgtgaatagcatgagtgagtagtcacacacacatgaacacatactgtgcgctgagcctcggcagggagcatcgcgcggcgcgagcaacccgggggggacgctctcgtactgtaagttgacattctgatgtctcatattaaagaattcttaagggctcaaagtcccattttttatttggttgacaatgaggatgtactagtactgatgcatagcagtggagcaaggtcagagatgatcagatggatgacaaactgggggctgaactgtctactgcctacatgccagcacgctcacatgaaacctgcaagatgaacaagattacggcttcttcatgcgtgtaccaatgaggattcgctgactagatggcggcatacatgtttatcagtttatgcgtgagaaaccttttaattcgttcagattattatgtggtgtgccatgttcaacgtgtaattattctactatatatagatgccaaggtttaatataactatgtatagtccattagttagctagatataatcataacaataagttgtagtttcttctccgaactgcaatctatgcgttagaatgtagaaatagttgcgtacacgttacaactaatgtagcagttggtacgaaaaggggtaaggcgggggaggcttcatgtgccatggggaggatattacaatgtgcaacctcctatgagaaaaaaaaagcgaaaaaataagaatttcttacatgcctaaataccataaaggtttcgtgccttctataatccatttgcgttcttcgtgcagtatcaaatcagtcgttattggatagtttattttatctaagtttgaatatttttaatgcaatcttgtaagtatttatgattataattttatttcatgtaatttataggattagataattattagtcaacattttttgattgaatattactccacattttaggtaataaagatggtactttgtttaaataaagttcaatcattggattccatccaaggagtgagaaaaatggcagaattttttttaaagtgcagtcacctaaaatctgacactctctagtacatgctccctccgtacttctaaaagaagtcgttttggacaacgacacggtctacaaaacacaactttgactttttgtttctataaaaatatttattgaaaagtggtatatgtatacttttatgaaagtatttttcaagacaaatctattcatataatttttatattttcaaactcaacaacttgagagttattcatggtttatattcctaaggtttgacttaaatactgtcgtaaacgactttctttacgagtagtacggaggaagtatatataggcatatatgttgttgattacagctaatgatcgatctgcggcaaatcgtttatctgctaattttgcttcttgacatcacgaaagtcgacgagccctcagttgttttttttttttactaaatcacggggcggagagcttgccaacctgaatttgccattgtatttgaggtagaatacaaggtccattagatgagattaagagtctggaggggggaagagaacgaccttcagttttgtgccgattttacaaaaagaggttttagagatacgtacgtcatgtatatagcatattcatgccaacgtatacgattataattccaaatatgtagttcaaaatccatctagttcatctttaaattaagaaattgatttcccttaaataagagatgaaaaagaagtactagcgtggccgtcatgcgtgagagttccctgacgacatctagcttatgcctattattgatcgtttatgtacatacacgcctgtgattcccatggacatatattcattgattatattgccgtctcacccctttttaattggttgactagttaaggaaaaagttgtagttatatgttatttttttagtattgctacagtacttaaaaaaaacgaaactcttacaactaacattattttaaccgtttgatttaaattgatagtaacagatatcagcgttagtaagagtatagtatagaaaatgtaatacttgtagaatcttccattttttttgaagaagaaagagatgatgtgtagcgatcgatacaatcttgtataccctctctgtcgcataaaaaaccaaactaatactgaatatgacacatcctagtactacaaattctagtcatacatttgtccagattcgttgtactagaatatgtcatatcccgttcttagattttttttaacgaagggagtacaatatttgaattgtaaccaatgacaagctagccccataggtcttacccgtttgttctttatttattagatagaactcactctatctacttttgatagtcatatttcatcttagcacagtgaccaggaataagtaattttacttatcatctatttaagctactagttattcctcgtaaataagcgattcattaatatttacatttcttgatgcccatgtagccaatcttgtactccctctagtttcattttaatcgacgttttggacaatgacacggtctacaagatatatctttgaccttatttttctattataatatatataataaataaatgcatgtttacttttattatagtaatttaaaagataaatctatatatgttgttctagttcttttaaactaaatacttttaaagttattgatggttaaagttataaaagtttgacctcaatcttgtccaaaacgtcaattaatatggaaccggagggagtatggaagaatggagagtcacacattaaatccgagaaagtcattaagaggatagttggttagattgaaatatgcctatcaaaagtatttttttttgatttggaaatatgcttataaaaaatagatggagggagtaccatatattcccttcgtcctaatatataaggtatttcagagggatgtaacacatcctaatactataaatctgagcagggagtctgtccagaacatggagtctgtccagaacatggagtctgttcaaattcgtagtactacgatatgtcacatccctccaaaatttcttataccatgggacagagggagtagatggtaggcaataaccaccaaattatttccatgtagattactagtagttagttccagtagatgctcgcgagagctgtacatgtactccctccatactcataaaggaagtcgttttggacagcgacacggtctccaaaacacaattttgacttcttgtttctataaaaatatttattgaaaagtgatatatgtataatttttggtggggagctgaaaaggggaagcggaaaactcactggaaggcatggaaatctctcaccaaatccaacaaagcttttaccttagttttcccatttacctttgttagtttcttttatctatacaaaatctctttctactatatattcaataaaaattggcgcactctaattaagtgttgatttgcaaaggaaaaaaaagaactgcaacacataccaatgcatgcatatactattttacatttagcccatatattttttcatataattaaattaaacttgatactgtggaaacactgttgttttccccacatcaattgcattgacattttttttgtgagttttgaactgagggagcagaggcagttgtacaatagtctgccagcttaattctgcatatatagctgtccagtgcaaatgtgcaattaattggtatagatgtccaagcatcacagcaagtaaatcttgcagtgcaacacggcgacaaaaatgtgcgtccaacgcaaccatattgtacaatgaggagaagacgtcaggcctttttttttagataatggaatagagcatcccggtctttgctcaaagagctacagccaattattataatctcacacttaaaatgagtgaagttcaaagaaacttaaaggatgaaaccaaccatcaagaagaaacaacctaaaaactgccaacccaagataaagagtacacaattattgaattctgtttgtgaacctccatccaaaattgacaaaaagttgcataaccgttgtctcaagaatacggcatgcagcctttaaaagctcactatcttcctcacacttttgtagttgtgcccaagaccggagccaatgtgttgccctgaaaactacctgcatatatgaaatagatggtgacttgtcaaaaataacataattcctactcaaccatagagcccaacatatagcaaatgctcctatgagaacaagttttcttctttttttgtccacccctagaagccaattatcaaaaatatgagatataccatgaggaaggtaaagactaaaagaaaactgaactgctctccataaaaactttgcataatgacactccacaaaaagatgttgaatagtttcatttttcatacagaaaaaatatctcaagctaccattccaattcctccttgccaaattatctttagttaatacaacccctttaagcaagtaccacatgaagatcttgatcttaagaggcatcctaagtttccaaataatcttgtttctctcaatataattattgtttattaaggctaaatacattgtccgaacagtaaattgcccattttgatgataattccatctaaaacaatcattcagttgactcaactgaatatgcacaatagaagcacacaagttatgccaatgtgctaaattcttaccaaccaaagctctcctaaaagaaacattcagcggaacaaatctcataacattagcaattgaagaattcttcattcgaacaatggcatatatagacggatacttatctttaaaagcaacgttacctatccatttatcttcccaaaatctagtttgttccccattattcacaatccaggaacccatattcaagaaagtattttttaactttcatgagacttgaccagaaatgagaatcccctggtttcctatcaacttgagttatataatggttagagagatacttccttttcaataagtcctgccaaaccccttgctcatttattaacttgaacaaccatttactcaaaagacatttattttggatctctaaattatgaacacctaaacccccttggtctttgggttgacaaattatatcccatcttgtcagtctatattttttcttatgatcatcaccttgccaaaagaaacgtgatctataataatcaattttttgaagaactccctttggaatctcaaaaaaagatatcataaacatagccaaacttgatagaacagaattaatcaaaaccaatcttccccccacagacatatgtttacctttccaactactaagtttcttctcaattctttgttcgataatcttccaatctttattgccaagctttctaaaatgcattggaataccgagatacttaacaggaaaagaacctagcttgcagccaaagatattagaatattgatcattatattcctttgcttgaccaaaacaaaataactcacttttgtgaaaatttattttcaagccagataacttttcaaacactgttaaaatcaatttcaaattcttggcttcttgtaaatcatgctccaaaaatatgatggtatcatcagcatattgcaaaatagataaaccatcatccattaaatgaggtattacctcacttaacataccatcatctttagccctcttaattagtaaagctagcatatcagccacgatattaaaaagaatcggagacagaggatctccttgcctaagccctttataggtttggaagttatttccaacttgatcatttactttaataccaacatgaccaccttgaatgaaagaagctatccattgacaccttttaggtgaaaagcctttcatcctcaatgtctgttgaacaaaagaccatttaaccttgtcgaacgctttcttaaaatcaatcttaaagattacaccacttttatttttacgatgcaattcatatatagtctcatgaagaataacaaccccttccataatatttctcccagggataaaagcagtttgagtagggctaattaccttttgagccactccaataattctattagtagcaactttggtaaaaattttaaagctaacattaagtaagcagatgggcctatattgctggattttcatggcctccatacacttaggcaaaagaatgataggaccaaaattaagagagaatagaggcaaagtaccattatgaaactctataaaaagatctaacaaatcagatttaataacattccaaaaaacttggtaaaactcagctggaaatccatcaggacccggagccttgttatgttccatttggaaaattgcctttttaatttcatcctcagtaaattcttgtgttaaagcttcattctccaattgagatacttgaggaatgtcatcaattttattttcatcaagttgtaaaccggaatcatcgggaggaccaaataaacctttataaaaggtggtaatatgcgatttaaggtttttgcatcaccatttattacttggtgatcaccgtcttgcaattgaaaaattcttgtttttctatgcttaccattcgcaaccaaatgaaaatacttagtattagagtctccctccaagatatctttagacttagccctctggtaccacttaatttcctcttctctcaaaagcaaagataatctatttctataaaaccatctaatatcaatttcatcctaagttaatagagtggattcagcttttttatcaagcaagtccaatttatctaataactcttttttatctttttttgtaaatcccacttgtatgtttagcccatcccctcaaatgttgtctcacagtatacaagatatatccatatgcaggccctgtttagattctaatttttcttctttaaacttttaactttaacttttttgtcacatcgaacttttctacacacaaactttcaatttttttatcatatcgttctaatttttttaaacttcccgttttgatatggaacttaaacacaggcgcacaggcgcaataccatgaaggagaagaaacagcgctagctacctacctatgctagttagcttgcagtcttgcagataagggtttgacctgcactaattaatcatcacctacaggaagtcagaaattaaacaatgatgcttacccccaaagcttagcacaaacaacaggttacagctgtttctagcaccaagaggccatcacccacctgccttagagcaaatttaatattacagcccactactaactcaaattcatttatagtcagtctaatagccaattcaacttactatattattaatatatggtcccacctgtcatgcgcatactgcgtcttaaaatccgtgctgtagttgactacatatctgtagcccgctgctcttctctctcatattttatctaattaaaatatgtttataactggctaatagttgctattgtacctgctcttagcttagcttgtttttaatcaagaaaagcgagctgttcttgtgccggccggcgcgcatgcatgcatcgatcatcttcttcgtcaaggcgatcggataaggctagctagccgtatgttggaattcgtttcaactagattatacagcttattttgaattatatcaaatattaatactaaaagagtaaagatagtactcaagcaataagctggtcatattatgttgaaaaccattatgcttttagaatggaaaaagtctgaattacccccctgaactacaaaaccagacattctttaccccaaactatgtaaaccggacgaattaccctccttatccaatccgcggtagttttggtctacaaggcagtccagtcagcaatatatttattaaaaaataggttggccctacctatcggtttctctctctctcttctatctctcactctctctctctcttctcctttagacggcggcggcagaggcaggagcgcggcgaggcgaggcgaggcggcggcggcggcagaggaggaggcgagggggtggagaggcgagcgcagcggcaagggaggcgaggtggcggcggcgaggcgaagcggcggcggaggaggcgagggggtggagaggcgagcacggcgg

SEQ ID NO: 7596 - DNA, 43146 bp, Oryza sativa
atgctattcgtggagcgcagcactttatttatattgagaaccagtatttcattggatcttcgtttaattgggattcaaacaaagatattggtaagcatatggtgtaaagttatttttttaattaatgtgcacccaccaataaaaaaaatccagaaacaaaatacagtgcacattacattttcttgatttgcaaaccatttcagcaattcagaacacagcaaatcccttatctgatcctaaattggtattcaaattgtgagttttcaggggctaataatttaataccaatcgaaattgctctcaaaattgcaaacaagataaaggcaaaagagagattctctgcatatatagtaattcccatgtggcctgagggtaatccaacaggtgctcctacacaaagaattctttactggcaggttagatcaacatgtctgctttgtgtcttgtttaatgtttatatagattatacccagttagttcatttgacatgatcgcatgttttttttgttgctcctgtagcacaagacaatgcaaatgatgtacgaaacaatatatagggccctgaaagaagagggtctagatgatctatatgagcctcaggattatctgaacttcttttgtcttggcaatcgtgaagttgctgacagtccaagcacttcaaactcaacaagcactcctcaggtaagacgtcttgttttttcctttgacaaactatgctgaggaccctccattggttttagttttccctgcaaggttaaatgcttttttttttcatttatagtattaaatacagtaattaatgtcacattgaatttcaacaaaagtcacaatatggtcccttaagcctgcgtcatacgagaatgtgaaagctgctgatcttgccgacctctgaagataaattttgctctgacttgccatattacactggttcttaaaggatattgatatcaagtcttgttctctgatcctacatggaggccaaatatccaatccactttagtttctttatcagatgatacatggaaattctggttttgtacacttgtgccttttatttagaagaaaacattcgatcggttagaatgatttggctcaattgtctagatgttctacaataatgtttcatcttgttggagcactgtgtatagtatttaacttttgatttatcaaaattacaggatatattaatatgtatgatatgcttgctagcaatctcgctgaactttgttatttttttaacatctgacttgcatgaaaactgcctgcatgcaacctcgttcatttattctacatttactacccaggaacaagctaggaaacatagaagattcatggtatatgtacattcaaaaggcatgattgtggatgatgaatatgtgataattggatcagctaatatcaatcagaggtccatggaaggtatcagagatactgagattgcgatgggtgcgtatcagccacagtatacatgggcaagtaaggtttctgcaccccgtggacaggtaacaacacttcatgcctgtatggctgtatcacatttctggagatctacagagaaccgagctggcatcatatgctcatatattaaacattgcgccttcagtgattgtacatttgcaactcgtttgctttacactgttattgtctgttgttcagcactactgcatcaatccagccatatatatttgttgcaattatcttttgttttggcagagtaacctaaagggaaattcgtaccctatcaatcatatttttttagataaggctaaaaaaagctaccactcactcttaagaatatgttaattggaagaaaaaaagagaagctaccattcattctcaagaatatgttaattgaagaaaaagagagctatctacaccatccatcatggtgggaccagattgtagctacaaatgtatggaaaatacaaatgtatttgtagaaatagagaaaaagttgcatatcaagtacagtcatatttcaaatagccctgtacaactgtgaaggaatctcgactagttgtctcttggtttgagggatatacctattttaggatgactgatatttctagaaccacactctaattcaaatctgctgatttcatgtgtagatttatgggtacagaatgtctctttgggcggagcatattggagtggttgaggaaggcttcaactatccagagaccatggaatgcatgagacgagttcgccaaatcggtgaacagaactgggaacgatttgttgataatgaggtgactgagatgagaggccacctaatgaagtaccctgtaagtgttgaccgtaagggcaaggtgaaacccttgccaggatgtacgtcattcccagacatgggtggtaacatctgtggatcattccgagccatccaagaaaacctcacaatatgaatttcgattatctgtaagtatacaattgctagtgattctgagctattctgcttcctgaggttatagatagcgtgaaaattttgctagcaatataggttgaaaccaagtaggacatgacaagaaaaggttattaccctgcattttttatgcctttcttaagagaattcaacatttccatcttaataggttttctttttatgtatactttttatcaatgtatagaagattaagaatgtttgaaagcccggaaccctctgtttagggaacatggctttggtagcaactttgattgatttaagtatgtagcgacatgtaaagccattaaaataagtttctagtgtaattattttcagccttgatttgctggttccattttctaagtgtcaatgaaatctaatccatttatttcttcgtcatgcccttggtaacataagtttccgctttgtttttgcaatgcttcttcaaggttacataatcaacaagcagatactgaacctatgtctagagaagagtaaaaattaagtgggtgcaaataaaatctactctaaactctaaagacagttgaacattttcttttccttgaattacatgcatttttttgctcctgaaacgaaattatcttttgttcatcatttcttccatctctcggactgaatcttcacacccatatacctgcccagtgtccatattgaaaactatactgttagtgtgttgttactcatggcaatgcactttcatgagctaaaatgatgccagttacctgccgagcatcatgacggtggcctgagggttggtgccgggggagtacttgaaggtggagctgtcgatcaccctgagcccctgcaccccgaacacccggtaatcgtcgtcgacgacggcgccgacatggcagccgccgtggtagtgccagatggtcatgacggtgtccatgcagtactgctccggcgagcgcgagtcgttgacatggcgcggcagcaggttgacggggaagttggcggaatcggtgaagatggactcgacggaggcgttggcgtaggtgaagttggagaaggcccgcgactggatcacccgctcgatcgtctcgatgccatggacgcaccgctccagatcctctgcctcgcggaagtagttgaacgtcaccgacgggttcgccctcgggtcggtggttcgcagctcgacgtggccggaggacaccggcccgaggatcttctccaggatgaagcctccccggaacgccctcctgtccagccgcatcatcgcctccgccgcccgctgcagcgcctccggcgtcctctgcttcggcggcagcgtgccgagctgccccgtctgcggcgacagcatcccgaagctgcgcgcccaccggagcgcgccgtccgacaccggcatgccgaactccgacccgctcaccccctcgatgaagctgccggagcgggtgatgccgacgacctgcaccagggagagctccaccggcaccggcgacgggatgaacaccgagttcatcgggttgtcggcgacgccctgcccgaccatgggttggtccacgatcacctcgatgccgtgcgcctccaggtgcgcctgcggcccgacgccgctcagcatcagcagctgcgggctccccagcgtccccgccgacacgatcacctcgttcttgtcgccgtcgcggaggtacacccggtgctgcacccccagcgggtccgagaacaccaccccgtacgccaccgggtacggcaccccgtctgcacgccatggcaaaagctcgccgtcgtgaggtcaagcttcttcggcgcacagcacattttccattttcatcgtagctgtgtaccttggcttttgaagaggatacgggagacggtggcgtagaggaggacggtgaggccgcgggggcgggcgtggcggaggaagtcggcggcggtgtggcgctggccggagttgtcgaagatggtgccgccgatcttggtgccggtgacgtggtcgaaggtgaagccgttgtcgggcgtgacgccgacctcgagcagcgcgtcgcggagcgccgcctgccacggcggcacgtcggggcggaacaccagcgagcgctccacccaccggtacgacgagttcaccagccgcgcgtcccacccggaggcgcgcacgtactcgttgctcgcccgcgtgtagaacccggcgttgaggcagctcccgccgccgagcacccgcgcccgggcgttcaccacgccgtcctccgagatgaaccgctgcgccggcgacgccggcgacgtgtcggccagcgcgtccgtgaagtgctgctcgctcgacatgttggcgtacggcaggccgccgcgctccagcagcagcacgcgcgagtgctccgacagcgtcgccgccagcgggcaccccgccgtgccgccgccgatgacgatgtagttgtagctcgacaccagcggcgcgtcctgcgcgtgccgcacgaaccgcaggttctccagttgctctgcacaacgccatcgcacgccatgaacacgacgacgacgcaacacgcatcaacgcaaagatacaacgcaacgtttacgcaccttgctcttccgagagcgcggcgaggcagagcgagaggagcacggcggcggcggcggcaagcaccggcgccgacgagctcgcgcggccaagtgctgccattttcgccgggcaaattcgctaactttcacattcccctgggacgaaacgttcggtctgtttatatatccggagttagctcaatggtagatcaagagtagatgtcttgaataatcttgcagattgctttgcactgcaaagaagatcttcgagcagctttgtaaattgtggagccctgagaagaatataacatgcatgcagaagtgatgagctgatgaaacattgatcaatgatctgatgtggttgtgagcaagcaagcaggagagtttacttgccaatcttgcgattgtttcgaacgtgctttgatatttttgccattttaaaatcataatttagtcgttgctgagttatttttctgttacgagacagtcggggcaggctggatttcaatggtttcttcttgatttattaagtcgtaaaagaagcgtaattttaatgagttgggtcagctcttgggcaagattatgacggtgcttaccatgtatgcatctcaactaaatctgataaagccccattgaaacggtccatttgtacaaaaaaatattaaaatattaggtgatttaattttagagtaaattttactatagacgaacttttattagcgatgtttatcaatgttctcactttataccggttattattcttacccatcctcaactcttttatccatatataacttgtcatataccgatgaatggttttacatatatatgtgagagtttattgatgagtaggagccaatgtaatcgagattgttcatgctcgagaagagagatgggtggtatgtggtccaaagtgaagcatctgtaacaaaaggtggtccaaatgaatttgctcttaactttaaattaacttcttggcccattgcagttgtattgcccaatggtaaagttgtaagttttaagacggttggtttctttttttgtgttttactcctcctccttctttcttcgtcttcggattgctatacgccagtctagtaaaaaaaatatccatttccctaaaccacattcgattgaaaattaagaggaaaatcttacaaatatctaacctttatatctacctcacaatttctgctctctgcctctccaacaatgttgattatgtccagagacattgacagtggtctgaccagttagagagagcataggttcctccgcttagagtgaggctaaggagatagcggcctgatggtggacggtggcattgggaaggcaacgagatgacagtgacgccgtcgtagctacgaggacaatggatagtggttatggcgagagaatcccgatcatgtaattaggtgatggtgagttgctcgagacggaagatgagaatagggtcaggcacctcgctagattggttaggtggtggtggtcatgaattcagcgacaagaccattagagacgaggaagacaacagcgtaaggacataagaaatggtgatggcacatgagaagccatctcaaggaggatgatggcaatagggatggcgatggaggtgcttgtcggcgagcatcaccagcgttgagggagatgccattgaggctaaatggtggtggtgcagagggcatgattggttcagcgtagcacagggtgaggttaggaggagcgatgtggaagtggtggctagggcttgactatttgtttgtattggagggtggagataaaatgtagattttagatgacagatcttgcgattgagaatttgaaaaatctggtgggggattttcttactaatattacttggggttatttggttagttgcttcactttgtaatgccacattttgattatggcgtagttttctaggtaaatgtttgcttcgcccccacacctttttagccttaggacatagtatatgttatactactacctccgtttcaaaatatattttagtccaatttatagtattgggctgagtttagtgtcatagaaaatagggggagaatttactatttgcaactaccaaaatgatagcactcaaataccactctcctaaattttcattcccaaatgccatccgaacgcacatgtcagcctcacttttcattcaaacataagtggtgaggtccgggtgacatttaggaatgaatatttgggagagtggcatttgagcactagtattttggtagagtgacaaatggtaaattcttcaattgaaagcttaactatattacacttaactatttcttagccgcacttttatcaacacgccacaattacggcaagcttgcttacgcatctaacaaacatcagtctcagttttttcttttaccaaccactgcatcagttcacttcaggtaaccaactgacaactagcctctagtataacggaatgaacaaagcacacacacaccaggcaaggttgcctgcctaactactaccactacactactagccacttactagccagtagccactcgcagcgtcctctgttccagtacgtgtggttctggttcatcatcgtcaaacgaagcaaacgacgacgaaacaaactcccggatacggcgcccttctttggtcagaatctttcaaacttcaaagcaagaaaaaacacaaacaaacaagaaccatctctgcattccgccatacattcgcgtcgatcggtgtccactgtacaggttgatcgatctctcgatcgatcagagatagatcaacgcgttgatcgatcagcaagttcagttcagttgcggcggccggggcgcggcgtgatcttgatgacgaggccggggaagacgtcgtcggggtcgtggacgtgcgggttctgctccaggatgtacgggtcgccgcacctgtcgctgatgctgtgcagcgtctccccttcctccaccacgtatatctcctcgcacggccgcgccgccgccagccgcgccccgcgcaccaccaccacctcctcctccttctccaccgaccccaccagcagcagcgccaccacgcccagcgccaagcaccacgccaccgcctccgccgccgccctcctcctcctcctactctctcccgccattgccatgcagctagttgttcttgcctcttctctgctttggttttggttggtgcttgagtagccgggtagagagtaggggtggtttatatagggtgagacatggaagcaggtgagattcagagagatggctccggtgttagcacttggcatgggggagaggatcaactggagaaatggatgctgatgtgttgctgtgtgctataagtgctcactgatgagtgctgaggcctgacagaaattgtattttttttcttctttgacatttttaaaacctgatgaatagttgatgatttctggtgcagagaattgattggtgagttatgggttcagcgtatctgttgctgccatcttgttatatactactagaagtatcttaatttttatacgtacaggtgtattcaggaatcaggatagtatctttcatcggttcaaattatccagaaaaagtatctatcatggtccacaagtaaacatatgcatcatttgacatacacaggacaagggcataaaaacatggcattaggtaattgaattacctggctcacgtgcaataatccgcatttgtgatctggtgattacctttacctttggaaagatctttaaacgtgtaacagcggaagacagagcagcagcagtacactgcaccagtacagacacctcacaacgacaaccgattcaacgaagcgcacacatgctcccgattggttgcgagtgcgtcgacggaaagcgccgcaacgcgcacacacacagacgcaacagcaacgcaatcacgcaacgtgattccatgtcatccaaacattcgtgaacctaaactcgttgtcgtcgaggagaaaaagcccttgaagatggtagtttatctcaacaggcaggagcagaattggcacgatcgatgcccaaaaagtcctacaaagcagcttcttttttgtgagctggtgctgtcctttgtggccatggaaacaagggcgacgtagtggtgtgattttgttattgctcacggtcactagcccgccttctaaatcttcgcgtttgggatcatgtgaacatccgtgagctggacgacgaactagtttactgccacttttgtacccatcggacgaaaaaattactacaattggcagtaagttgttgcctccgtctcagctccaaacccagataattctgaaaaacacctaattagcaattttctctgaaaagcttgctttttgattcattttatagatttcataactataattttctatatttaaaatgaaaaactaaatcattgaaagagtttctgattctgaaaaaaaaattacagctgcctgaagctcccaggcctaaactccaagcagcacggtgcgcccgtcagatcgccagtaaaatcctgtgacgccgtgcagcgcacatgtactacacgagttgtactgtactgtaccgacatgcgcgcggccgcgccacgtaccgagttcccggctcgattcgcacatccgcccgcctgccacctgcgtcaacgacacggccacccgcccacctgcagtcgggcaggtgtcgcgcgcccgcccgcgcgcgcccttccacgtacgtacgcgtggcagtgcaacgatcacgtctcgtctttccgcttgatttggaccgaggcaccgaggcccccctcgcgcatgccatatctcgtctcgcgtcggcgacctccgatccaccgagcgcgcgcgcgcgcatgcgcccgcatgggcggggagtggcacgccatggcacgggtgcgcgacaacgacgacgacgaccccggggcggcggccggcaaagtcgtttcatccatgcatgcggatgatggaatgtatcgatcgatatttgcgcttttgatctgcacgatcgatggaggagtacgtgcgtgcgtagagcagataaataacagactataaaccaactataaacacattttgatttcgagtaaataaaaaaaaaaagaagagcagcgggctatatatttatagtcagctgtagcacgaattctaagatacaagtgcgtataacatgtgagattagatattaattgtgtagaatatgtttataggtaaatattatataaattgactattaagttaattataaatgatttaaagtcagcagttggctatactattaaactcgtacgcacgcaacgcatatgcttgggcggctttcggaattcggaaatcggaatcgcttttgcacttttttgccagtgtatgaacgttccgcgcgcgggtgatcgatagatgttgctgtcgtgcaccatttgctctccatgcagcgtgaaaatggaaaggaaaggatgggggagggtgatgactgatgagaggggggagatagtgggttaggccggaggcacgtacaacgcctatgtatgattcttttaattatgtcatatatgatatcttttgtcatttgtcaccttttgtatcatatcatacaacgcatggtcgattgttagtcagggtgtatgtatccctctctgtcttcctatatcttccttttcgcgaatgggaaatttctgatgagaaaagggaagaggtatggtttggtgtgtaatgtttgctgacaccgttgacatagtgacggtatggtacagcacggagcttaaaacgcaatttattcaccatagtacatggcctacaataatttcgacttatataaaaatgtcattatatatctaaatatcattcaacgaaaggtcattatctaaaaaagatctttcaacgaaaaatggagtaaaaaaatttagacggaatatggagtaaaaaaagtacactaggaaagttaattacaaaaccatattggtgttaattagaatataatctctctctgtcccaaaataagtgtagttttacattattcatgtgtaatatttgaccattaatcttatttaaaattttttattagtattatttttgttgttgttagatgataaaacatgaatggtactttatgtgattaattttttttatttttttaataagacggacgatcaaatgttggacatggatacccacgcctacatttttttaaggatgaatgtagtaactataatataattacaatataggtacattgtacctttaatataagtcaagataaacaatcaacacgtctggttgctcagttggtaagccttctctttgaaacacactttactctttttcttcttagaggcagtagcatatggatctcaaacacattgtgacatttttttaataaaaaaacagtaaactgcacgaccaagccctagacttgctcactcgtattatataggtcctaaactcttcaaatacatttctacatcatgaacttggtaattaaaatgtgacattagatcctaagttgccacggcacctgcgggatcttatgtggtgacatgatcatgacatgccacatggccattgcctctttctcctttttttcctttttcttcctctttcttccgttctttcattcatgtttcatatatggtggaaaagaaaaagatgaaaaaaaggaaaaggtagagaagaaaaaaaataaaaaggaaaatttgttattgtaatgttcatgtggcatgtcacgtaggatccctgagatattgttgtaattatagattagaatgacacactttaatattttcgaatattaaaaaaaatactttaagagttaaggatctgagtaacatggatgaatagatttatggatcaaccatgtaatttactcgtaaaataatataggggtagaattatagcgaatccgtttgactttatagatagcaacatactccatcagtctcgtaaaaatcaatttaggattaaacaagatatatctttttactttttatactaggatatgccctatgttggtttctatgaggcggagtacgtacaccgttccgctggccggtaggcaaaacgcgcgtgacacaagcaagtggtactctaactttctgtactggcaacgggtatggtttgggccagcggtcagcctagtgtgtgatcgtgctgggcttgtagcgtttaacatttcattcagggccaggttggcaaactacaatgacccggaggcccacatgaacacaacggagggggcgtatcagagaagaaggcccgagacacaccatttattttgggtgggctgcatcaggcattcatcagaattgcagcctctaaaaacaagaattccaagtgaatagcacaatatcttcttctcgaacagaaaagtgaattatatattgtgccttctcaaccgtttccctgtgacgacgtactaaaaccaaatggaaatgtcaagtgcaataattagggactatacagtacggagacacgcatacggcttccaaaaaacttccaaactcttaagtcagagagctgacaaatttgccttcgggacccattgatcactagtgagcattaaatttcatttctataacaatagtatcttgtaattttttcaattgatccctcaagtactcctccactactaactacttactaaggtgcattagacaatcgcgacaaaacattcctttaatcaactttccctttctttctcaacatagttaatgttatcaagttcgaatgctaaaactaccaatgatgcatctttactggaaaaatttagataaaactctagaataaaaggtgacctgatgggtctgctgacgttgatctgttacatgaacataaacttatccaattatctcagttcaatgtcagcaattaagtgacacatgacccaatcattttcatcaaccgatctaccaccactactactaccaccttcgcaataacggcaatgacaccccggctagatcgatcggacggcgggcgacaacttggtggtgcacatagggcgcaacagtcgccgtccgatctgatatataggtaaccagtgtcaaaacttttggctaaagtagcagtagtagtagatcatggccaatggggccaattgccaaccaatctgatgattctgtactttggtagtcttggctccttctatatttttaagagagagatgaaatggatgtttcgcggctattctgtgagttctaaaattcaatgagggggaggggggattctacacgattgagatagagatgggaaatggatgtttagcatctattcctttgagttctagaagcatgtatttttgaactgatgtttaggattaacttttctttatcttacaaatgtactatgagccttcattggcttgaatgttgtatcataaagtacaaaccatgaactcagcgtactatcatcaatcaataatgaacctggctgatttctcagcttgccaataacccattgaattattgagaatggttgaatatagtgtttcgtcaacaaatacgctgtcctagttaggcttgcctaaattctctacattttctagccatcctatcctggttgtctgccctatgaaaccactctctacagtattggattcttcacaagaacaggcttgggtcaagaacagactcgatagaaatcataattttcaagtcaaaaaagaatagtaaaattcataaaaccacatattctctagcagaactactacgcaactacagatttaacataaatttatcatgcaattacatatttttatagaggaatatgacaaatttgccaattatgacaaaacaacataagttagagtttagattctttaacactatggttttgctgaacctaataaacaatataggtttgtgataaatttttttattaaatatgtagttttacagtactatgtagttctataaaaaaagttgaaaactaaacatatagttctgcgatacaccacttaagatgtagttttgcctgtcgcaatagtttggctaaaatacatgtacttttacataatttacccaaaacaaaaaattaagtgtagtactacaaccgtacaagcgaatgatccaattcaagcaaatttggggtgcttttctgcttgtttccccccaactctccagtctccacacaaaataatgcccctgatcgttttgtttatctttaggccttttagcagctcaccctcctcacctcccacgagcctcctcgcggcgcacaaaaacaaacccagacacacaaacaggcgcacacatccccatagcccccaaaaaccaaaaaaaagaggagcaaaaaaagaagagaagaagagaaaaaaaaaatcccacgccgcgttggctcgcgatcccctcctcccccctcccctgtcgatttgctccccggtggtggccgcccacgacgaacccccgcgccgcgcgcgattcgatcgctccttccggattctgctcccggactcggatctcctcctcctcgtcgagctcctcccgccactgcccgtgtaggtctacctgagtttggggggcggagggggggaggggagggggaggtgatggggattggccgggcgcgctgggtggcgctgcttgtcggcctcgcggcagcggccgtggtggcgacgttgggtgcgtccgagggcgacgccgatccgctctacaggtatgtagggctcgtgactccgtggattctttgtccagtgttgcgacatctcttcaaagatttggtgatttggcgaggcttgtgggggtgtgtgtgtgttttacgtttggttcgaggagctgattgcgtgtgcaatggaatcagcgagggtgtgtggcggtagtcgttcttaggcatttgctcgaacacctggtgctcgttggctgtagagcgcaagatttggtttggcctcaaagcatgattcgcccccctgaatactggtattttggtcattgatttcttatgaagagattgcaccaaggaagctaaactttttagaagtaactcccaatgtgtgtgtgctcttttgattatctaacctatatccatgatcatgcgtgagaaacaaagctttgtagggtatttcatgaccaaagctgggagatgtgacctcctgatgaagtcctgtgatttatacatacaaccttagtatttgaatccgtacataaaaaaactgtttagttctctgttctataaacatgttgggatgttgaaggttgaactgatgagcaatgacaagctaactgcctgatttgtccccaacttgtacagagcctgtgttgacgaatgcgaaaagacgggttccctccgagagacctccgtgaggcactgccaagttccaactgatgaccatcctgctgataaatcatggtacgcacatgaaccattgtacttgcagtggaaagaatggaactgcaagagtgaatgcagataccactgtatgatggagagggaaagtgaaagggagcaacttggattagggtcagttaagtatcatggcaaatggcctatgaagcgtgcatctgtgtttcaggtaatcaatcaatcatgtactaattaattgcttagcttttttataaacttgatctgtctaggcattcctttttcagttctaccttgtgtccttcacctatcactaattgcttttttttttcccttcttgcaggagcctatttctgctgctctttccgcgctctctctccttgtacaatttaatgggtggctatcttttttcctcctgctttcttacaagctgcctcttaggcctgaaactcaaatgacatactatgaatacactggcctatggcacatttatggtcttctggccatgaatgcatggttttggcgtgccatctatcacagttggtaagcccaatacattgatgaaaagtatgattccagtatatgtgtttgatcataattagttgaacttgattcttccattgcttgcagtgatacagtttggacagaaaagttgtattattcatcatttgctgcttttattgggtactcccttatcttggcaatattgcgaactctaaatctgaaggatgaagcttccagagtgatggtggcagctccaattctggcattcacaacaactcatattttgtatctcaatttctatgaacttgataaaggtaaattttagctggacatgatattgaacttttgaaaccattttacttattataggtttttcatgatgaatgcatcattcctgagtcatgacttcctgcagataattgaaatactgtcttgccaatcgatctgtatattttgtagtagtgactagtattgcttgtaaaacttaagcagtagtgaagttctgagtaggtatcatgttgctctatttaaacctgttactgtactaatgtcgaacctgcactctacatttctacactcagattatgtaataaactattgaggatctacctaactgttagaaaatatttgtgtgtcaatatttcagtaggtatgtgttaaaatgatattgcgtaaccttttagaaagtttacatctatgtatgctgatggttccttttttttttcttttcttttgcaggcctaaacacaaaggtttgcactgctgctagccttgctcagttcctcctatgggcagtatgggctgtcatgacaaaacatccttcatgttttaagatcttgtttgtcattattggaaacgtattctcaatagtcttggaaacctatgacataccaccacgttggggatatgttgatggccgtgtattttgtgttgctatttctattcccctcacatatctctggtggaaatttgccaaggaagacgctgagatgcgcacttcaacaatcatcaagaaaacaaggtagtgttcagcacaagtgaatagcacaaggatttgagcctatgtgaaatcttatgctcgagattcagtcttaccttgtaaaaatttgatcgttcatgttctttctaggcagcttgtgaattatgtttttttccatccctttttgcctcagctcagaggtttagggttaatgcttagggtgtgactagtcactttatattcattttcttgtaatcccgacagtgtaacacggtatgcttgtagctgtggtaatgtaacagaggaacgtagattcgaagctttctgaatgtatcattgtgatctgtggcataataataattctggttcatgaaagcatgtgatgcttgtgctttgttggtccctactttgcttttttctctttttccttggggatgttgttcatatctctgtcacccaagagaacatttcatgaatgccttttcccctttacacccgacacgatgaagactgctgaaaagagaatttcgttacccgggttaagtgcagtctaattggccttaggttgatgacctgtagagtgtacatttacatccaaacagaacagtaatcttcttgtttccattgccactctgacaaaactatatacagatgcatctgctttattccactgcccctaactcactacccccctatatcaaccttcactgaatctgttctatctcacgtttacattacactcgatttgacaactttgacatccaaacaaagaactacttcggcaacgcaatcaggtcactcaccagctcgtgcaacagctcgtccatcgccatggccgccaccaccacgccggcctcgcgctcctcctcgccggcgtgcatccaccgccggctccgctccatctccgccatgacatcctcgccgtggtacagcacgtcgttcaacgtccacggtgttcccgtgccctcaagccaggccttggcaagtctcatcgtttcgccgttctctcgccgtctcctctctcgtaacagactggtcggtgcatgcaactcaatatttctggagctgcacttcgcctcgacgaagaagtcgaggaggagcctctcggtgacgtcatccaccacgccgaccgacacggtgtccgccagtaggtctaggaggctgtcctcgtcgtcgtcgggatctttttgggagacgccgtcgttccgatgatcgtcgtgtcgtggcggcgccgccgctacgtcgtcggtaatgcactggtgctgtactgggacgatgccggcaaggcggtcggactccgaggcggcgaagcgtgcctcgagatccacgccgctgagctccgccatgctcccgagccgtcggatcttgggctgcagttgcatctttctccctgatccacggtaaacggtaaaaatatactaatgagttatacttcaagtaagtcgtaggaggctagaagcagcaagtacttgttgaccccatacaatttttaatatagagtttgtatatacaaatataaaaaggtaaaagggatagagttactagtagctagtaactttacttaagcatagagttcttttacatggcttagggatagagtttagtagcagaaattatttattttgagaactattagaaagtatttaaaacctcatttcaaaaagaaagaaagtgtttaaaacatttagggcttgttcggatcgtaggataggaattcagctcacatggaaaatagatgatcgaaaacatagaaatacaggagatagaatcgttcggagtaaaagattatgatgtgacatgcactctatttattaggaattttttcaagaaatctcacctcacctcatactaagaatcttatgaaattagcttgtaagattacaatccttaggaattttgtgggatccattcttatgaaatgaatgatgcatatagaaaaaaaatccaaggaatttaattcctacaatcatcttatgaaaaacctctaaatcgaatgagcccttagtgaatagtatttcccaaaaataatgtggaaaccctataatcctaacaagcccttaattaaccaatcccaaatccagtaaatttcgagagtcaaatatgctcaatcaaccaagataaaaaaaaaagctgagaaaaccactggcctagtatgtgccttttgtggccatctccgacagtcactggtcgggtgggcccagtaggatctttacacgatccgggatttccgcctttcccgggggcccgtatgaacagtacaaaaatcggaacatcttcttttgtccatgccccgtttcgtgtccgagcaagagacagaaacagagcagattccggttcggcactagcactaggcgacgaacacctcggacccgtcccgacccatctcatctgaagatttgacaccattgtgtagactacacaacactactatcacacagttaactcgacacgttatgcattttatagtacgtaattgtcctttggttttaggataaactttggtttgtgacagattcttcagaaaaaggatgagtgtacgtgttcagttcaatcagtttgcttactctggagctgggcgaggctgtcgctgaaagagaacgagcacgcgccggcggcgaccctctcgtcctcgtcgacggcggcggcgtcgtcgtcgtcttcgtcgaaggggaagtccatgacgcccaccggactgagctgctccttgtcgtcagcctcctcctcctcatcctcctccttggatcccctcttcatcacctgcatcacaccgtacaccagcaatcatccaccaattttgtctcaaccacacaaccccattttgtcatctcgtccatttctaatccacgacctttcgccacggcagcgtcagtccaagcgacgcgtctgtagcggcgtacggcacgacacatcgtccggctttcccggacgtcggctatagtgctaagctaacttgtcgtttcagcgataacgatgctactatcagcatcaccgctgaaacgacgagttggtttaattttagttggggcattaaaccatgtggccgtcgtgtgcacatgcagagagcggaagctacgcgaggtgagggtagagcgtgccatgcacaggacactggccccgctgcatcatgcttccggacaagcccgcactaactgtgcaacggcccgctttgcatttacgctttgcaaccactgccccttctggtccactgagccacagagctactgctcatgcatgcacagcaccagcgagccaaccacaccacagaggcctctaatctctacgaataattaattagtggtatcatctgcaatgctacttctatccttgctgatcaatggccgtaaaatcagtagccaggtacaaccctactgattgatcgatcaatgcatggatggacaggtcatttcgaccgatctcgatcgatcaatcaccacaattggagcagcagctagcacagggcagtagtagtactacgtattatcgcacatggtacacgaattactactgtactactctacaccctgtgtacataggtccatgtttggctgtatacgctcatcaatgcaggagtcagtagctagggctcccctttggatactcgtaacatgaacaagtcaggagattatccgaacaatcgagcaatccatgtgttggtgaataatggatcgctgctaccgaatgaatgtgcttcggttgtggcatttaatcgccgtgggtggggtctccgcttcgatcgttaattggtggctaatcccacttcgccctggagtttacgcaaattttggggcactaatgcaactaaacccaagctaccagcagctgaattaacgcccaattattgattcctcatcaaggttagtgagtgagtgagtgagtgattgagtaggagagaagtgaggttgatggaatggttgattacctcgtggtcggctccggtggtggagggctcgccggcggcgtggaggctgtcgtcggagctggctgacgagatttctgagtagtcggagtgggagcgcgacttcctcccgcctgtggaattgctggactcggacgtctcggagtcggagctggagctgcagcagctggccacggcgggggcggtggagctcgccgtcgccggcggcgccgcggcggcggcggcggcttcctcgtcttcttcctcgcgccgcctccagaagcctcccctgagccgccgggacaggctcttcgagaggctggacagcttgggccgccgcattgcggacgacgaccggtcggcgacgaggcggtgccgcattggcggcgccgccgcctcagccgcgccgccggcgacgcagaggcggcgagggtagcagcggaagccagcggcgctgcaggactcgcagtccagctccaggaggtccttgagcctcagcggcttactccctcccgccattgccgccatcccagactcggatccgatgacagaacgagcaatgcaatgcaatgcaacgcagagacggagacgcgagaggtagcaagcgcgcggtagcttctccgggcgagtaaagaaatgtgcgtggggtttttgatgtttttggagcttgtttggatcgacgcgagagcacgtacaggtgagctgcgggttgtcggttgggagatgcagcgagcagcgggcagcgacggtggtggcggtgggcggagcggctgagctggggagagtgggagaaggaggaggagagagatcgcctgctaaatacacgctcggctcagcgcggcggatttggtttgccccgaggccgaggttatcgtggcgtttctacctgctactagtactcactccatgggaggcgcggtggctacgatgtaggagtacgagctataggagtttttatggtttggtcgctgcctagctttgtgaccaaacgggagtaggagtagcttggaatgacgaaaccggagtgagctttgtgaccaaattaaagcagtaatccctcagtttcatattataataagagcccctttgattcgaggataggaaaaatacaagacgtgaaatagtatgtttctcaaatcctacaggaatcaacaggaaagataataggagctatttgatcgtgctatgagaaaaacaaaggaaagttcacgctattttttctatgaaatgtgaagcatatgaatacaatcctatagaacttttgtttcttttctatgaatcaaagcaacatgtaggaaacaaatctataggaatttgaatcctataaaaatcgtttgccaattatatgaatcaaaggttcctaaatcgttttgattttttgttaaacttttttggtttgatcaagtttattgaaatatataataacatttttacacaaaataaatatattatcaaaatatacttagtgttatattaactaattcaatattatatatgttgctaatttttttataaatttagttaaacataaacaatattttttttaaaaaataaaacaacttgtaatacgaaatgacaggggcagtagcttggaattactaatccaatagagtaggttggcactgtctgtagtactagtactcgagggaactggataggcggtcaatgcgtgtaataataaggaccgttccgtgtctctactcgtacacgagtgtttgctgggtgaaaactgatgtgcacgaacacatgctggtaagaagttaataagatcgatccgacgaccgaacaaggttgaattccgtaagaaaaacagagagatcgaaagcgatcacttggtgatgcgtactagtagtagtagtaacgtaaatactcgatcggtacaatttctcagtcaaaagaatacttcctctatctcttaatataagagatttttaacattttacttgtttgaccactcatcttattaaaattttttttataaatataaaaaacaaaaagttatgtataaagtattttgaataataaaggaagttacaaataaaatagataataattttattttttttaaaataaaacgaatagtcaaacagtacaacaaaataaaaaaaatctctagagggcggatacagtataaaagaagtagtcggtacaatgcagtggttgtactgtacgctactctgtttctctaggactgaccacgtaagatgtgaaaggctcccctgtttctgtcgcaaccagggtggtgtcccgtgtctgggtgatcgcggcgtgaactcgtgtggccttcgccaaattacagcagcagcggcggcggtaaaactcggcagaaacgacgacggatcggatcggtgaatttgtttgggggccttggaccggtgacccggtcccgactcgtaccacgcagtaccggattcgcggcgaggcgagcctcggagcaggggccagtaggggcgcgtgcagccagcgtccgcggcgccattacgccggcgacgtggcgcgcgtcccatcgcgtgaaacgcggccgcgcctgccggcaaaactaggttctattcttctctacctacgcgcagatcgaacgccaatctcaacgccacgttccaaaataaaccaatcccatatgggatttaacacatcaggtttctcttattgcttttggtacggttacaaaacctccgcgataaactacgtggtaaccgtgagacatatcgtggttaaaaaactgaaaagattaccgtgtatggtaattgtgataaccacgtgataaccgtacggttttgttaaatccttctgtacattttaccgtgtatcggatctgcaaaatcgaagcgggcaaatttttacacgctttgcttcagcttcgaactgaaccacacaacttttttacaataaccttcactaatgtgatttgttgttcgtgtttccagacgattaaactactgctccgacgagctttcggcgcggcttccgcggccgccgtggcgacgattcgacgcgatgcgattcgattctgcatctggcctgcagatttcgctcgtgtagccttctgcacgagtcaagtacagttgactgctacacgtggagagttggaggggaatagatactgtctgcctgcctccattcttttacttcgaaaacgaggctcgagcagccgagctctagtccagtccagctgtgccttttgattctccttgcctgttctccttgtcccctgcctgattattccacccagtaatggaaattaaccgtgtgcacaattttaattcactctgttcaacgaggtcaatcaatcttcaggagagtcgtcagaggcttcaatttttttcgaaggtaatcgaacatgaatgcagaggtctcgaactcgaaccaaattggcggcaccaagcaaatgcatcgaatcaatgcagcctgggcgagcaactgccgacggaacagaagcacgacggacgctttgatggtatggtcgccactagctgctgcctcctcctccattggcagatgggagacggctcaggacaccggtctcgcgattgcagcctcgtttgggcaggctaaacttgatataaccatccgtacgaagcgcaggtctcgacgaatttgagttaggccgctcaatttgcattagtaaactcggtcgagttgcaacagcagcagcaaacagctgtaaccagagttgcctcatgtgctcaacccgcagcagtaggatacgatgaaaaattgggggttttttctttttcctgcggtactgatgtactgtagcctgcataacctgcagtctgcatgcagcgcgagctgcacgtaaatgtgccggccggctcacagtttcgccgcggcttctggtcgtcgtcgtcgttgcggcagccgatacaggagggcgtttccagagatgaacctacagctgtgtgcgtgttgagtcgccgcgttggtagaagcagaaccaaaactgcatctttattgttgcctgttaccacttcgtggaagctgctaatgagggcatgtaactatggttgtccgactcttaaaacttgtaatgtcgacggttttattccttattgaaaatattacttgcggttcgaaattttggctctatagaacagttgcggatctagaatttataggataggtattcagaattttaaaatagcttttccaagatataacgatacagattgatatgttgacggtacgatacactattttcatattactatgacttgtgcgcatatatgataaaatatatagacttgtgcacctcttatcttgtgttagaaaaataactacatcatatctaaggaaactttaagtttataggaatgattttgaatttaaggtttaattaaatttttggtgtaggagtatatagagactatgtgatgaaaaagggtttcaaggagaaggtcttgttttaaaaatgggactaatataaattagaggtttggaacttagaagtaacatgtaatatggacatcttggatcttacacccctccccccccccccccccccccccgcgtgtttcacattataagatgttttgaccccctctatctctcgtctagatttactaacatccatatgaaaccaaacaaatatatgaagcacatacatggatgtatttcagaaggaagtatgagcacatatatatgaagtacatacatttgaaacaaaggaagtatttcagaaggaagagatttaaatataaaactcaaccaagaaactccaaatcaataaaaaggtcgaaattataaagttgagatgatactaatttgggcttttctagaaatggatggaaataagaaatggttcaaaattctaggaatttaaagcaagatacatcaaacattcaataaaaaggtttaagattcaaaaatttgaatcaagacataaaaggatagaaatatctgaaatcaacttttcagattaaaagacacactttatatttctccgaatagaagaaataatcgaagtaataagcaaagaatcgtcatggtgcatttttgaaaatgttaaaattttcaggatggtacattgatcttaccccttgtacaaattgaatccataatgaatctattaagaatacaaatcgttcgttcggacacccaaaaccagatcatctggagtatcttgttttgttaggatatgccaattttggttgtcaacagtcctcaagtcattgcatacaaatagaccaaacaactatttctaggcacatatgttgtaatctggcatacacttatgccaacatccaccaaaactccgaaccaatttttttaaaaaaaaatcatagtcaaatttcttcactaatttttcatcccaaaatataaaccattgttttacgcaccaacagctgtataaacaattttgtttttacaagcgacatttttccatgatgtgaaaattgtcaatgctattggaaacattttttcacattatgagaaaacaccagtggtgtgatggtggagttgtgggtgtatgactttacccattaggatctaaatcatggtgcccacgaatattacacatatgcaggtgggcttttaacagaattttagtgagataagggatgtgcagttggttttcgtttgttagagcctgtgttagctgacgtattcatgggggtgtgagtgcactgttaatgtgtataatgatgtgcatatatgcgtctgcggtataattggggggtgggattgtctttaaagcgtatgttagagggcacattcgtgagatgtgagtatggtgttgcggatatagtgatgtgtgcgcacttctgccatataatcgaaaaaaaatcacattacctgcttgtctcaaactcaaaccgttgactaatctaggagagtaggagtatcttttgcaagaaaaaggtgtccgtgtaactgtatgtcccagtatccatatagtacattgtatgtgtattgtgtcaccatcatccacttggatcacacccacgctacgtctacgtagaggcgcatcaccacgtacgcacgtatagtacgttaggacacacattcctccgtacgtccacgtctcagggcgatcgatcctcaccacaccacctgcagctgcatctgctcgatccatccatcgatcgatcatggcgttgcactcgcgcacataccctcctccattacccacagtacgtggtcgaacactcagctgtgatcccacaacctcaccacgccgccgccctcgtccattattccaccgccgtccgcctgcaggccgagcatcaccggcggtgggctgatcatcagcccctccgccatgctcaccatcagcctcggcatctccagcacgtcgtcctcgtccaccacgccgccgccgccgcccccgtcctcgagctgacgccgactgtcgtcgtcctcctcctggtgtgccatcgcggcggcggcggcggtggccgcggcgcgcacgtcgtcgggggacgcggacgccggggcggggcgcgaccgcgcggcgtcggggaagttgagcgccgcgccgcgcccgcgcagcgccagtgcggcggcgtcgtacgccgcggcggccatctcgggggtggcgtacgtgccgagccatatcctgctcggcttccggagctcccggatctccgacacccacttccccgccctgaaccgcacgccgcggtacaccgggtgccgcgtctccgccctcgcccgcctgatcccgcacgccgccgcgctctgcctcctcccctgccgctgctgcgccgccgccgccgcccgttgctccatgccacaacccaacacaccaatccacacctacgtgcctctcacattgctcaccacactgccacactgatcgatcactcgatcagctcatcaacatgcacgtacttatacgtacactggcctgctctaccaatagaatttcgcaccgtctagtacggatcgtaaaaaaaaacaaactggcttatattagaggaagatgtgtactaaactcgaccgaaacggaggattgcgagggtataaaaacgggcgggagttggtgaaaacattggggacaaatcgggatacgcgtttcttgcttgctcgatcgacgctgggctagggattagctgtgaagcacagggagcaaaaaagagtggctgtttcaggcttacaggacggtcaggccaatggcgtctcgccacattgggggagatctcacatgtcgcaaagccgctttcgcgttagtgcgcgacgaggttagtacgatcctcgcgtccaagtggcggctgatcaagccgtgatctgcaggatgttaatttatttttgacccggtctcgaacaccataattaagggtttaatggaaaaggtgaaagggatcagtcttggcatgatgagtagatgatgaatcgctagattcttttgttttcttgccacctaccatatccagttactagatcacgaagctagctagcttgtaggagccatgcatggtgagagatttttgtttcctctgaaagacaacgacgagaatataatcgctgcaacactccattttcagaggctcatatgctttggatggtgaattagtgataactgatcaccagtctgaataactgatcgccggctgtaccacgatcgatcaaaatatgaaaaacatttttgtgtgcgttgacgagtgtgctagttgttaagcacggccagcttgcagagagaagaaacagcaagtcctaccaacactgcaggagaattcagctgttagcctgtaacttgttagcaacttagcatcagtgctccacgacgatacgatcgaattgctgcactacacgaagctgtggatgcccccacaaggccactagtatgcatgggacctgaaggggtttttggcgatatctccctgaaggcccacatggtgatgaatgcatgcactaccaagctaagctagccccagctgcttgattgattgatgatcgatgctagctagctgcagatccatctgtggttagcttggagtaaagctcaatccaagcattttgtttgccttttggaatttgggggaaaaggacgttcttgaacttatcccccaaatagtatactattctgcgagaatgtcaaaagccagatcatccttttatgagcgttcagcatcttacattctgcaagcttccttgaaagtcgaaagctatctggacgatgggaacacttttggcgtggtcgtgaagttgtacatgcatgagtttgccattagttagtgcgtagatcctgataatcataagaagtatctacgtgtcatttcgcccccttctccccgccgcctcaccgccccaccaccacaatcggctccaacacggacctaccgtacatcactctggtcatccctctaagccggaaacaccttctactttctccaccccgactcaaatactcactgatgtttgctggaactcgtcggagataaatccatagcataaatcatagatacaatttgcaaggttagaaatttacgtggtttcacccccaaaaatgtgtcaagtgatgcgcagcattctgatgaagatattacacacttgaacgtgcttagaaaataatttgttaggttcatggattacccataccaaaatctattgaacatgtgctgaaggattgtacatatcggtgtggtatgcatataagtggtgcgtgcgcgtgttccactcaaccagcaaaatactccatagtttctacaagagcggtggtgattggtgaagctacatgcctactgtagcctcacacaaacattttctcccttaatgtctgacgttgataagtcatcggcgatcccatctaggcgtcagctgttgtatcttgctgccatccgtcgagtggcccgatgccccaagctggagcagcaggtaagttctcctccaatacggcgaaacccctaaatccttgtccaattgccacttgctctctaattctcctaatcctataccctaatcctctggatctgataatggaaacatctgctgaatgaatacttaattttgcggttttccttcttgtttacaatttcagccacattaaaattggtcaagtgctcaaccaagatcaatgaaacatatatgttaccttattttggtgcttacgagatgtttggaggctcagagctaatagatatattgaaaattgaaccttcttttgtattttttttttgaccggggaagggggggggcaaaatgtccacctaaatacattacgtcgaccttcttttgtatgttaaaacatatgttagtttcttatgtagttcgaggaagcctatgagtataaacatgtataaattgattgttatttgttttgtgtattggccttgtgtatgtcttgcatctgtgtgttatcctcattctagtagaatctgtatcaagcggcccatgccatggcccgtgtatagtcatagcagcatgaacgacttttgggctgcctggcccatccagcacggcccatgaaaagaatcacgcccaagccatccgttgtacgttcaaaatgacacttgttactatggggcgaaggcgcaaaagctacacgtttcagggaaactttacttcgagcaattctgaaacaaactagtggcgaagagaaataactgatatttttattcttgtttttatttctaggctttaatggtcttatcagctattcagctgtaacccgtggaaataaagtttttgtgagacaaattttaaatgctaaagataaatactctaggacggtcactcactcactcagttacgcagtctcctttaagtcaggaggaaaaggattggtgtagtatggacctggtggccacttgtaatatgaaaatggaaccgtgccaaatcgattggtcctcttccctatcatgatcagtcaggcccatacgcccactttggtgatgcgatgtgagtatgtgaccacaccgagagataagttatagccatattggctgtactaataaatcaaagcaaaagctaaaatttgaattttcaaattttattttgaaattggttttaagatatttttaatgtactttctttttcagcatcgacttttagaatgttaataacacatatataaaagtttcacctataaattatttttattctctaatattatagcttgctagggaatatgagcaatcgataagaacctcaagaaatggcgaaagagcgtgcctggattaggcctttcatccgacactgcacatgcacactgcacacatcgcgtccaggctttggccgaacatatctagtgttaaacgagtactaataataataaaaagaagagtaattaaacgatgaataaccaattgcagaaacgcaatcgttctagacagccatcgccgccagaatattgaattgttgcggagacatctgtagtcgaagattttgacaggggcaggcgccggccgtatccttcctgtccgtttttttctacacggcaagcaacgacaggttgatggctggcccatcagcttcatccggcaatggacccaggataatggagggttataaaataaacggtttaccacgactaaggttagacgtaacaaaataagtatactatgtcaggatatataagtgttacgtggacgtgcaattttttacgtgtttatgaaaaaaataagtattgtgaatgagcactgatgatgttttagggtgatgtaaacggtttggctgtatttgatacctttgggtgaaaggtgaaacggaaattttggagaaatttcaaaagaagtagaagtttattggaagaataataacggagcctcaaaattctctctcccatatgacagcgcgcgttgggagagccgtgtcgtgcggtgttgaatttccacttgttaacgacgcccgccatcactgactttggccgtctcgcgtgcatgcatccacctttttttttttgttttcagcattgacatcagttgactacacaagtcctgcattgtgcttatccaattaacttgccagccaccattacaaaaaaattgcatcttgtggtcgtggcaagcttaattttagcttgttctagtagatcaagcagtaccataaaagcagttggaaacaatattaacttatcctctctccgtattttaatatatgacgccgttaacattttaatcaacatttgattattcgtcttattcaaaaatgtatgtaattatcatttattttattgttacttgatttatcatcaaatattgtttaagcttgatacaaatatttttatatttaaacaaaaaaatttaaataagacgaatggtcaaacgttggttgaaaagtcaacggcgtcatatattaaaatatagagagagtattattttctggaaacggtcttaatatggtggggaatttttcatattgatgaatttaactatttagtggtgacattagtatgatgctgaatgaaattagaaaaatctaagttctatagatggctagaaacaaaaaacggttggaaacgataccattttcatatttattgtataaaaataatctcggtatatgaacggaaattttcataccgtttccatccttcgcagttgtttcactaaaaaaggtatacaaagtactatactagtagaaagcgacctttactttactctagaagtagaattagtcaggccaatcacgtttgcctaaacaagccactagtagtactagcattcttcccaaaacgtcaatcatactgtagtcagatctgcatatcaacattaaccgccacgttcttatctgatgaagtaaccatcaagaatgattcttcgagcttatcacatctcccatttgcataccactaatagttacagacttacagcaagagaggtatggaaagcaccggcgatactgtccatcgattgagagccgagacagcaacgcaattggctggccactgcatctgcatcagccatcaatggagggaaagctacagaaaggaagctcacagctgcttcgcgccactcgtcagggtcacactcaacagagtgaaaggcacacggaaaacgaaggaaagactggaaagttatgcggcattgctgtccaacagcgaaagccattggttaattagactccagcaattcagggtcacagaataatcatgtgttcaaaatcaaagccagctctgctttggttgtgagaattgcttggatagtagtacaggtaaaggagttgttttaagtgttttgaattaggagaagatattttttggactgcactaatcttgcggaattaacggggttgatgatttaccatatagtatatagttttgatctttgcatcaactatattcacattcacaagtccaagctgcttgaggaaattgttaccctgtaacccaacactagtttgctcatcgtttgctctacagaaaatgaatgaaacaactaaaaataatttatggtaaaacttttaaatcatgttctcagcgatataaaagcaatgctaaaaaatattataataaaagaacttaaaatcaatcaaattttagttgcggcataaatcaacaagcaaacggtgataacaccgcatcacagagtaaccaaccttctagaagcaaagccacccaatatatgcatctatgtgactatgactaagatgccaacaagatgtcatctaatgcaatgtttcctaaagtgcctcaatagtcctaattaatcatctcattccacttgctatcttgtacattgccgtatatatcaatccttatactacacatttctggtaggttttgatcaaaagttaaattaatacaaacaaaggaacttcttgatatggtatgaatatgatttaggcttctgttcagagacatgcattaatatacatcatcatacattaatatgcacacacaacctagagtttaagccctaaatacacacctaaataaatctatacaattgcttgcgtgcatatagttgtacgcaatcgaagtttaaaggatggaatcatgcacatacaactcctgtacataccaatgccgctaaattaggaggcggcgtgcagttaaatagaggacacatgagtattgagcgacaagccgacaacgagcgtgttccaactagatgattgaataggttgttcctttttccttgaaaaacctttgaaaagggtatggtattcctgtaatttgctatacaagaatatagttgattcagtttatgaggaaaatcagaatcgaaaaacttaatataaccaccacgaatgaaaacacatgactcaagtgacacaaacctatgataacgtcaggtgaaacgttcactccacagaaagttattgtcgttgctcccacgttgaataagagccctaacttcaacaagggcatgccgacagaatgacaacattgtccaatccaaaatggatctataggttcacacacccaaaggacttcctaaatgtggtattcacaaaattcccatagtatcatctctagaaggtgaacggtgtccgaaggcagtgacgtaactagcactttcaccctagagacacacacgcgaccaccagaatgccaaaactgctaataaggtcaccgcccatcgcacctcaacagcacgcatggatacgattgagctctaacttcaactaaaaagtgtagttgctttgatgtcagcattatcaacctcatcaactgatgcagcaacttcgatgccacctagactcagcctatcatagaatatcgtatgccagcaccatacactgctacatgacaacatcgaacatctctatgtttatcattacccacgccccaagcgagtcttgccaatgcaagaaaaccctaaaacacaaaaacaactcctctatcataaattcagagaaacatgagtccttcacatgtaagacccaccctcataaactcacacgtcatatgctcgtgtctctctaacattcgttagaaaagcctcatggcctaaaacacagtgcggttaggctggctagcacggagataagcgatcaaagctgtaggttagaccgttagattccgatcagacggcaggatcgactcacaaccaatcgctcccaaatcccaatgactaagggtgtgtttggttcacggtcatgcatggtgtgatatggcgatccattttttattggatgacgatccaattttttgttttatttgtatagatatgatgaccaaattacttgtttggttggagggatatagcatgaatgggaaaaggcaaaagttagtgggacccatttttcatatatatatatatatatatatatatatttcaaaatataataatccgaaatcttgttttaaaagatttagttgtaacaaatataaaggtgtgatcaaatcataaattagataaacggtttaagagaaaaaaaatcatttggagcttacttaatagaaaatcaaaccaaccacagccaatcagaataggacacatcatccagaccaaaactggatggcttcatctagccaaatcggctagatgcactcatccagtatattgaggtaatattccctatttcgagccgccccatccaccttaccctctaaccaaacaccacagaaaatcagacggtcatctcctatcaatactcgttcattcaaccaaacacaccctaaatcaatatggttcgcgtgtttaaccaccatttataacccttcactttcatccgcaatctccgtcaattacacggtgaacaacaccaataaccgggggagccttcaagcccttcaccctcatccgcagtctccgtcaattacactgtgaacaacaccaattaccgaagcctttaaggcagaagcaagaaataaacagtaaacagccaattgtaagcagcaaaccagagccaaaccgctgccgaccagccgctgccgccgtgtgtttataaaaagtcagcaaaaccttcccccaccacgctcgttagctaaaactgtgaaaactctccattttccttgcctctctctctccccacccaatcccaacccaccacctctcctctcgccgccgccgccgccgccgccgcgcgccgttctatggcctacacctcctcctccctccacctccacaagcacctcctcctccccaagaccaacccctcctcctcctactcgcggcctccgcctccgtcgttcgtcgccgcggcggccaagatcaacggcgtcaacggacactcctccaagaagtcccccaacggcaaggcgcagatcaacggcgacggcaagaagggggtcaacgggagcgggaggaagaaggcggcggcgcagcacatcaacgggaatgaccggatccatctgtcggtgagcacgggcggcgccgggggccaggatgggttcgggctcagggtggcgttccagggcgcgccgggcgcgtacagcgagttcgcggcgaagacggcgctccccgggtgcgacaccgtgccctgccgcgcgttcgccgacgcgctggcggcggtcgacggcggcgccgtcgaccgcgcgatactgcccgtcgagtccaccatggagggcaccgcgctgcggaactacgacctcctgctgaggcatgacctcgtcgtggtccaggagatcaacctgttcgtgcactactgcctcctcgccatgcccggtgtccgcgccgccgaggtgcgccgggtgattagccaccccatggcgctcgcgcactgcggccgtgcgctggcgcggctcggcgtggacagggagcccgtggaggacaccgccggcgccgtggagatgctgcggtccaaccggatgctcgacaccgccgccatcgccagcccgcgcgccgccgacctctacggcctcgacgtgctcgcgcacggcctccaggacgagtcatggaacgtcacccgcttcctgctcctctccaagccgccctcgccggtgacgctgcccatggacgccgacgccaagaccagcatggtggtcgcccaccggggcggctccatgatggtggtcctcaaggtcctctccgccttctcctcccgcaacatcaacctgaccaagctggaggtcatcaacaacaacgacggcggcggcggcggcggtggcgccgcggcgggccaccccgtgatgatcctcgacacgagcgcccgcggcgcgccgacgctccgcgcgttcccgcacgtcctctacgtcgactgcgagggcgcctctcacgacccgcgcgtcctcgacgccatcaaggagatcgagagattcgcggtgttcgtccgcgttcttggctgctacgccgccgattccaacgtctacgacctgcaatgaggcggccatcgatcgaacacacagctgcggatccacatcaaatcagctagtcttgcaagatttggatcactgatcagttggattagagctctccattccagcactcacttcagtgagctacagatgctatactttgcttgcttgctgctgatgctgctgctgctgcctgctatgcgatttttgtacagatgcaataagaaatctttaccatttctgctgctggcttaggtatgtgcataggtttttaatcctggtattgatgccttctagctgaaggaaagtgtaagatggcacaggattgatgtaattttggtgtgctagatcttgattgatagtgagtattccttaatccccatttggtcctagatcttcctctgtattcatcccaccacactatgcagtgttctgttgatctaaagattagaccttgggattcatctgatcttggagcacctgaatttgtcactgttactaactgtaatacactgaattttgtacagaagacaatgtaatttacacacctaatgttgtgtacttgttgatctactactctgcttacaaggtgagctctggtattttgtaaattttgtattatcaagtttgagactttgtaaaccactaaaacatgtggattccaactgttaaatatagttgattacctccacaagaaatgcactacttgggtacttaacgcacacgagctgcacgagtctctgcttagtgatatgatatatagtactaattcttttgctaatattagaaaatgatctgggcatctacgactgattttaaaatctgatactgacatgataaccggggaagacaatatttttacaggctccttttcttttggggggggcatctgtcctcaatcaagagccgacaggggaatctgaatccatgtggagctttgtgcggggtggtcacggaatctttcatgtgaattttcagagaatctctaaccttagcattagaaggaaagctccaaccatctgattatgctttagttacacttaaaacagttaaattactggttcatcaacgagcttcttttggcaaggggaatcaaatcaaatcgaggccctacccctgtcactcttccagtggctcaggctcattcaacagagcagggaaaaagatctgaggagtagtaactatcactgataagcgagggccctgataactgagagtcacaagaacactgagagagaactgcaacctcatgctcacatgtgaccgaaataaaaccggtctactcaggctgcaacgaaatgaaaggcacaagcgagcgatagcaaaggctcagatcccgtatcaaaatgtgcgaattttcatcgcatgtgtggcacatggaaccgtacggcggtttggccgcatttggcggtggaaacggacacatcgcgcgctgcaaacccacagaattccagcgaaaacggtgcgtttctcccccgttctttctttttttttgctgaaagcttataagaaattcagagctctgaaacagtggagttctcttctctgccgtggctggtgagaatggcttgattggtggaagctgtgcgtgtgcgatgcatctccacatggcctgtggcccggagactttgggagtcacgatgagcagcgtaccaaccgggttacttgggtggtagtatgtacttggtcattgtggtcacagttctttgctgtcattttaaccttacttacccacctccaactcccattgcaagagaccttgctttgtcacctgccaaattggcaagatctgaattatgtaccatatcttggacaataatgcagggagatagagagagatagagagggtgaccacacggttgaattgttccgagcaatgcttgctctcccatgtagctggagaggaatccgggacctgaactgatcatgcagtgtgtaagccgcatcttgcacgcgtatcatgaacaactgaaacgtcgctgccaggctgccagccgctgaattttctttgaagttagctagatttgatgtttttgatccatacctttcaggaatatatttacatgcaacataatgaatacggcagtggagaaggaaagggaaatttcaccggatcccaatggcgctcatacttcaagtaaaacctgaagcaaagagcgtgtcgcacatgcgaaaaggaatgtgttgcaaatggcattagtgaaacctctatagctagaggttctagaaggaatcgtgttgggactagggagcacatataaattattaattgatgcagggttgcgatgcgatgtggagaagaaaggtgtgatgtaatataagatatactacctccgtcccaaaataagtgtagccgtggatatccgtgcccaacgtttgactcgtccatcttatttgaaaaatttgtgaaaaaattgaaaatatttagtcacacataaagtactatttatgttttatcatataatagcaataaaaatactagtcataaaaaatattcaaataagacgaacggtcgaacgtttgaacgtaaatagtgtaaaactgcatttattttgggacggagggagtatcaagtcgtggacggagcacatcagtggctcacatgcaaccggtgattcggcgtgggttgttaggtcgtagtcgcgggggtggcctttacgccatgaacaaatactgggagtgggagagatagacgcatataggatcgcttggtttgcctcgacgggaagtaatttgctaaactcggtttcagctaacaagcaagacaacagggcacatggccgtatggtgctagctagtaccatgcttattccttctctgttccaaaagctagcttattcatcgtacgtggcatgcatgatggggtctcatcagtacctgtcattatagatgctgtgctggtgtcggtttagaccagagagagcaaatgatccaaggcgaaaaagatcttagggtagctctggtcgcgtcgtgtacggtccagatgcggcggggccgtagtcgtgcgcgacgcggcacgcacgctgattacgctcgtttccgcgtgaaattgcaccggaaaactgcccgcccgattcggcccatctccccagtcccaacccaacccaacccaccccaccccacccccggtcgcgacacgagccagcgcgagagaggccgcctgcctcgcgtcgcaccgaccgccgaatggtggccgggccggcccacgcgacgtagcggttggcgccacggggcctccaacattgggcaaacaaggccgcgcgctgcggtttctggcgtcccccagctgcttgctcgcgcttcgcgtccctgttccctgcctccctgccgaggctggcagcgtacagtatgtttgtgtgggaaaaagtacaccgaaggtccctgagcttatcataggataaaaaacattctcgaacagtaaaaccagatatgcggggtcccttaactacataaaaccggtcacccgaggtccttcggtggttttgactccggttttagtctatgtggcggctgagtcagcgtagtacccacatgtcagcgtgccacgtcaactttccctttctcctcttctctctcccttcctccctctctgctctctctctctcgcaggccgggccaagggtagggagcagacgcccaggcggcgagcggggctgagtggcggcgccgcgacggcggccggcggccgcgtcggccgcgcacacctagcggatcctcgcttcgagcctcttgacttgcaggcaaacggtaagaagagcaccaccatcagccagaactagcggggacggcgggatctgcgaggacgccagattggtggggacgcgatgccacaccgactccaccttgatggtgtcgatgccgcaggcaagctcccccatggcgcccatgaactgcgccgcccacggctcgttactcgcaatcgatctcgcctacacttcccatgttatctgcatcgatcaatctgaccttgtgactgcatgcatttctagctcccagctacctgtgtcaaacattccatttgcaagataatagcatgccagagccagatgataagaacaaattaaccgatacttgaagaactgagactaatcatcgcgtgcaagtgcaactgggcctctttaatctacccatgacaatactgtcagccaggttcaactagtgctcgggtcctcctccgctcaggccccgtcgttcactgagctgctcatcgctgggtgggggcgtcggcgggcggtgacgccattggcaacctcgagcagagtccagccttcccaatctctgctcagaaggatctgcgtgctcgagctcttcagcgcacaccgcgtctagtcgctccaccacgtccgcgaggaagaggcggcgcccctagttcgcgtcgtcgccgacataaggtcaccgctggggccatcagttgcaggaggaggcggcgtcttctccggctccgtcgcggccggggaacccatcgccttctccgactccaccgtggtgttgcgcagggccggtcttatgatttcgtgggccctatgcgaactcatcacgatggcccctataagctatatataaaattttatgatatatatagacgctaattttacttgcaaaatgaaaacaaacatatccatatattaaatttaacatatctgttaattatcgagaaataaagtcaaccaaaacaacaatatatttataccttggaactaatatcattatcttaatgaagaaaagaacccaatcatatccattgcttctcatgaaaagatacttcttcgggcatttctgatgcaaaatcatcaataacggtattaagatcaatagtgtctaagattgggcgacgaggtgacgacgctccaactcctctcgtttcggcgtttttgcttctaggtaggccatagacaggtactagactactagtattaggtgttggtccccccactatcatgggccccccaccatcatgggcccccggcggtcacctcggctgcatagggccagggccggccctggtgttgcgtaccgtgaggccataggcgatttgggaggaggggttgtcgggggcggtggatgtgtcgccagtggtggatgcggctccgccgccgtcccgcccgccacctcctcgcactgcggttgctgctcccgctcccttctcatctctacggccgatgacctcctcagcctcctcaacgacaatgacgacgatgacaacccgttccccgccgctgctaacgccatcgccgccgccgaccccggccgcgcgcgccgccttgggcgccctagcgccggcatccccatgccctgcgagagcagagagagagagggagggaggaagcagagaaacagagaaagaaaagaggtgaaaggggaagttgacgtggcacgctgacatgtggggcccacgtgggtcccacgctgactcagctgccacatagaccaaaaccggggtcaaaactaccgaaggatcttcggtgaccgattttatatagttaagggacctcgtatatctggttttgcggtttgaggacgttttttttatccccatgataagttcagggatcttcggtgtacttcttccttatgtgtgtgactactcatgctattcacgagattttcgtgcggattccataggaaacggttcaatttctatgcgtaaagagaagatttttctcacgtttcaaaccggggctttcgtcttttttgcacaagaggagtaccagtctggagtgtcggagccaaaaagatttttaagctcggataaattttaatataactaatatttactatagaaatttattcattattgatttactcatccatatcaaaatttattggagttttcgctggcgggccgggtggtgactccgccccctgactacttaatttgaggtaaaaagtttctatcttagtctaatacatgaaaaatgaaaattaataacacctgaaagtctcgagcaaaagatcaagtatcagtatataattggaagatttagttctaacaaattctaaaaggaaaaattatgaattacccctcgaactatcgcggtcgtctgaaatacccccctgaaccacaaaaccggacattcttcacctcgaactatgtaaaccggacgaattacccccctcgacccaacccgcggtggttttggtctacgtggcgtacgcgtggctgtttaatcagcattttatttattaataaaatgtgggacccacatatcaaattcctatccaactattcccctctctctcttatctcattctctctcattcacgcgcacggaggcatgtgggcaacagtgagcggcggcagggtgcagcggaggaggcgaggcgaggcggcggtggtggcggaggaggaggaggcgagcggcgggggatgaggcggcaagcggcggcggggtgcagtggaggaggcgaggggcggcggtgtgcggcggcggagatgagcggcggctaggtatggcgggggagaccagtggcggcggggt

SEQ ID NO: 7597 - DNA, 3939 bp, Oryza sativa
tacacattcatctaagatcccttatattttaggacggagggattagatgattatgatattaaacttgctctgaaatatggttagtattaaaaaccaagagagttgcacagttaaaaagtgattaaccaaccaaccaatccatggtgaagtgaaatggcagtgcttttaaaggagacccacaccaaacagcagcagagagcagagtctcttgctcccattatctatctctgtctctgtctgtcaatctcacgcacaccagcacacagccttttcttctcctcttcctcctcctccagttaacggttaaggcgttggtgttggtgcctcctctccaccaccgtccatcccactcccacgcgcacacagcaaagcaaaccaaagcaaagcttcgtttccgctgccccccacaggccactggacgaggaagagcacgcagcttcgcctctaccggcggcgcatggcataggcatccccaagaatgagagcttgggcctccactacaagagagagaggcagacccaccaccatcaacaacatcaggaggagtagatagatgggcaactgcgggacgcgagaggagaatgccgtcgtcgcggcgcacgcccaaggtattcttcgcttcctcggattgatttcttgggggatttcccggtgattgttttcttaaggatgctggttgttgggatgggatctcgggttggatgatctgaatttcatcaaaaaatttgatcttggtggttatttctaggtttcccctgatctcttggttggtgggttcagtggggaattgacaaaagcactgtctttcctttttgctatatatgatggcctatggcttattgggacctttggatgggtgttttggttgcaaatgttgattcttgttaggtctattccaaatcggcattttggtactttcggtttaggtttgattaaaatctaatatcaacatttgctccaaatgttcaacattgtctttctgttagttgcatatggggattctgggattttggtttacagtctacatttgctcaacatccatctttctttctttctttttctcttttttttttgttttttttgggggggggggagcctaatctccttaagctttctggtgtgattgctctatgatttcttttctgctgcatatcccggccaagttacgatcttactgtctttccttatcttcttggttgctgtatcagaaattctgcttcattgtgttcatcgggacaatttacaggcacttcccccaatagtgctgcaatttctgtgctctctgcttcactgaggcactgttgactttcagtttaacagaaatagagttatgatcctgcaagttggaaaaacataatcacttcttgcagtttgctgcattctttaagcaatttggagccctttttttattgcatgcaactctgcagtagatctggtctcctgatcctgtttacctcttgctgtaatcaacttgcccatgtatgtacttttttacagtatttttaggtagaataccattttataattgctaggaatcgccaacgctcgtttccagtagttctcttgttagtttgtgattatagcttccctaaatgtatttcagcaggattagctctctttcatccaaccatctctgtgaatgctgaaaattcaatatgaaaaaaaagttttatttttatcttatatgtatgagaatttatggtaaccttaattcgtttttaccttgactattttttctttcttgttgttgaaatgtcatcttctcagttcagcagctccatttgttacaacatcctgtcaagaatgctgttgcagagaggaagcatacccgcatctcatcagatatgagtgatccttcaacacctaggaaaattgaagatgccaagaacatctccatatacaacgatgtgattgatttcacattgtttgaactcgagaccatcacaaagagcttccgtgctgactacgttcttggtgaaggagggtttgggactgtttacaagggctacatagatgagaatgtcagggttggtctgaagtcactacctgttgcagtcaaggtgctcaacaaagatggacatcaaggacacagagaatggcttgtgagttgccaccttgttcaatattcactatggttgctgatgtctgttatgtacatggatacacggaacgttaacaattactcgtacaagaacatgatatatcttaattatgtaaattatggaaaaatatttgttgatgctaactatgtatttcacatcaatggcacatgcagcatttagttgtactcatgttaacaagtacgctagcaaataaatacaccatttcatctttcttagtctgttccctttttggaatagaaaatttctcaagaagctacaatacatggttagaatgattcattgggcttgtatcatgaaaaatgtgcaaacttgataggttgatgaaggctaaagtattaatttcattggccgaatgcatgtagactgagtcatactgttagatagcatatttcttgaaagtttacaaacagaacagtgtatctacacatgctcagaataggtgaaattctatttatttttaaaaagagaataagcaacattgtccataaaagaaacatgatgcatttaatttgacgtaagcaattttggcaattttcgggcatattattaacttggaaatccttaccttttcattcttgtcgttatgttataagaattatcaggaagtaactcatcttttgtttctttgtcagactgaggttaggttccttgggcagctaagacatccaaatttagtcaagttgattgggtattgctgcgaagatgaccacaggctgcttgtgtacgagttcatgtttcgaggaagtctagaaaaccacttattccgaagtaagaatccaactccttttcatcacttcatgatgatatcatggcggaatagtttctgtgatcacactttttaaatatatatttttctctctataatacaatcaagcaccatagctgaagttgaccatattgtggataatagtgtggataatagagtcgcaacgttgttctattaaatatcgttgatatgagcaaattgatcagcgttctaaaacctggtctggtaggatttcatttcaacttgctgttcatatggggattccaaattgtccagagctttttgactgaacaaccgatttaactgttcactgctagaccctcagtaagtttaggccctcttcatatttatcattcttggaaaactttattgacatgtttttaacaagattgtccaaagtgtccagttaaccatctgaactatttgtcttgccatagctaaatgccatgattttctttgtttgtatacttaatagaatcattcgtgatagttcactaccatgcatagagtatgcgagctacccatacttatctgctaaatatcttctgtattttttcttccaaaataaatgaatactattgaatactggcatgtatgatttgaaatgtcggcacagtatttcatcgattcatttgtaggtgaagtaaattatatgccaatactgaattaatggctgactaaagattgtgctcaactatattttgttcttgtacattgtggtgaacttgtattcaagattaggaaattttctgacattgtctgtgcttttcctttttcttctcagggacagctactccactatcctgggctactaggatgtcgattgcattaggggctgccaaagggttagcttgcctccacaatgctgaaaggccaattatctacagggatttcaagacatcaatattctgctggactcagttgagtagcatttcttgtcaatgtcttgttttttttttcctttctcttctatgctgttgggaatatgtaaatatttttcataataacatttatcttttatttacacttacacaggattatactgctaaa

SEQ ID NO: 7598 - DNA, 24827 bp, Oryza sativa
  unsure (1)..(24827): unsure at all n locations
tagccagcatccactgcctgaacgaataggagttgtcatgcaaatccactgcanatttaagtgaagtgatgatcgatcatgtgcgtactttctaaagtagtntgtgtcatggatatgaatatgatgcatgcacctgtgaccgaaaagctaccttcactttgcaggcatatattggcattgtttggtgacttgacattaaacaagttgctgcatgctcatcagctttgaaggagtaagagataagtcaatctacaaaggtgtttatacatatatttttgtttatcttcaattgttcatggtagtgcttgctgcgtaggttttgcaatgatcgcctgattattattaatctatctatgtactctctctctctctctctcactacctacttgcacggatcaatcgctgtttgacttcatttgatgagataatactaatgaactagtgcaagatagtgttcagtcaacagcaatggagataatactatttttatgaccttgttcaaaggtttgtaattttccattaagctagtgtttacaaagcaaaccactatatatgtgcacttgttacttagagcaatctagctagctagtgttatcatatcatattccaaaatccttaaatcaggttagatacaacagaaacaaaaacaaattcagaaagctgccagcacaacaaccacaattattttttactagctacgatcagttgtgttatccaaaccaaagtactagtataacatttcaggctttcagcatatatatgcttgctacacctgtatccccatttttgccctgaaacaaacaggaagtactaaacatgatagtatggcttctagcctaattgcactgtaatcggaatgataggggtgaactgtgcaagcacatgtacgtagcatgtagtagcaatataacctgaaagttgtggaaaagctatatattgggacattgcagcttcactgccactactgatcgatcatcacaaccgaaaaagaaaagattttgctggatatttaactatatacactcagctaagctggagtgaccacatgggccagtttggatggtgtgcttttgatgatgttatgtattccctcccaaacctgcaagctgcatgcatgcctattctgtgtcttaagcaccttggacaagcaactaattgaacagctcgcacagagcaatcggcaattgcaacattccaaattaggcctggtttagttccaactttttctttaaactttcaactttttcatcacatcaaaacttttctacatacacaaacttccaacttttccgtcacatcattccaattttaactaaacttctaattttgacgtgaactaaacacacccatatcaacaatgaatcaaagttgtccatatgcatgcatgacctagaaaatgccaagatctctgcaagagacagcccccgtgcagtccaaaatcaatctagctttaagctacagttagagtttgggttaatttgtttggtagcgaaatatcattcgaccatgacatgcatgtggcgaaccatgcatatgcagtttgcaaaaaagatagctacatagcgtggatggaatacttcaaaagcatatcaaaacgatacgatatgcatggtgtttcagtactacaatctttcaagaggaaaaacaaaaacttcatgtgggggcagggagctgcagatgcgtgcctcttcacttccagagaaaactaatggtatgtcagttttaggagctaatacacactgccattacatgtgttatgataaggattttaagccgtttgcgaagacaatttaggtactgctccctctaggttaatactaatacttattgttttgagagaaaaacacggtctaaaacacaacttcagtcactgttttatattataatctatatagaaaaattattaaatatatgattttatatatgatgttattataatatacctagtcttcatatttataagataaatattttaaaaattatttatagttaaaaaaatttataatttgataccaaactcattcaaaacaataaatatcactctctccgtcctaaaatataagaatctagtatcagatataatattttctagtactacgaatctatattagaaaatatcccatctagttttacgtttttttatattttgagataaagggagtatcaacgagagatgtatgcttagcaaagcacatgacttgagtgatcagacacacatgaacgaaattgttaggtaactgtctccatctttgccttcaacacaggcatgcagccagtgtatagaaggagaagaaccctgcttttgccccccttgcagaggaacaagctatccaggatatactattgtcgaactccattccaatgtctacccactagtatatgttaactggatcatatcgagaaggcaattagttaacatactgccaagagttgcacatgcatacttcatatatacaccttctggttacttcatgtgtctgagttctctgaatttgcttaacccatacatatcattggactccggttaattacctcgaactttgtagccaccccaccccttgcatcgatccgcatctggtatttataagatttagggtttattcggatcagagtaatttcacaggatttttggaggaatactgtacataggaattttttccttttttttattcggatcatgaaaactggttgtaagaaatccaaagtaaagtttcctttgatgctgatttcacaggaaaagtacaggaaaaatccatccaccttgagctcattttttgcttcctgcatgcaaatcctaggcaatcaatttcctgtgatccgaatgctatcaacttttgtattcctttgttattcattcctctgttttacacttagggcctctttgaatcgcatgattgagaaaacgtaggaataggaaaaacgtaggattttgataggaatgtaagtgtaaaacagaggattgtaaaacacaggaaaaacacaggaattggatgagagatatagactcaaaggaaaattagcaagaggttgaagctcttgttaaatttcctccaaaatctctataggattgtccattctataggaatttcaaaggattagataggattcaatcctttgattcaaagggcttcataggaaattttcctataggattgaaatcctctaaaattcgtatgtttttcctccaaatcaaaggggcccttagattcctttcatattcctatacttttcctatctatgtttttcctatcctataatccgaacaagcccttaatgtctatacatacaaaatgagtatatatgttgcaccgatcaagcatgtaaggcatatattgtaaaatcaaaggtgttttttattattattttgtgatgaacaattggcattggagattatcagtttagatatttggaatttatttgcgaagtggttttggagatgattggatttcataggtgatatacaggtactgtgctggattgggtacggtcacaccgggcacgggttgccggtcagaccggcgtgtatctcgcggtcagaccggcgtagcccacggtatgaccggccgactctgtgtcagtttcggtttcgggttgtttgtttggatatccgtgattgtttcatgattatgacttctagacggatattatgtgtatgaatattatcgtttgctactaatgagtcaagttggggatagcttggtctcggaatatggtttctttctttgttctatgtgtaggtgactcgagatgtcgggagagtatttgcggtgatggaccgggagtcggcttggggataagacgacgtccgtagtggtcagagatcatgcgggatactaaggctagagttcaatacacgtggttggtgaagattccatatggcatacgatggaggtattgtgtgtgaatgggatgcagagtcgaatttggaaggagtccaaatttggtatgattggttatgtaaagtttgtttcttgtactagagggtttcctagggtgattaggacttctagtatgagtttggttcgtggctttaggctgcctatctcgggtataaatagagggggagtgtgaggcttcccagtatcgcttttgagagcaattgagttgatagttgagttagggtttcgagtttagtcgaaatttttataaggagtgttgttggtgcactttgtaaacccagagagaatcgataaagtcgtcatccactttaagagttcttcgatttgtgtttcaccgggtttcggcgatctaaccggcggcgcaccggcggtcagaccagcggcattgcgccggttagaccggcgtctacgacaggcgacaggagctgatctcggcggtcaaaccggagatacaatctcggtcagactgacggcaaccaggcgatcagaccggcacatctacttcggtcatatcgcgatccgttgaatttgaggtaacttttatttccgagtttcggtttttgggtataccaaccattcaccactctctggttggcttagttgttctgattcgatatatatatatatatatatatatatatgctcatagcaacagcgacagatgctagtgaccatagtatatctcacacgaacaaattagtaaggtatatacgggcaaacatactcaaccgattaacgctagtggaaatataggcatcagcagtttataaagaagaataaataattgtacgcgttattttactatctatattctcaggaatagatgaatagtacatgatagaatagttctcatttgcccaccagtactgcaagtgactctgactacacaatatgtcaattgtcaatattcttccaaatgcatgtaatagtctttagaggttttctttcgtccttgagaggtatatacctctcattgtctgagagctaaaaaaaaataaaccattaaaaagcaagtttatgattggcaataccaataattttcttttatcgtcaccttatagtatatttgttcataggtcagagatatatgagtaattttacggtccttgagaagatacctagatggagtcatagagtatatagtgaaaagcaagtaggctatgttcgatttagatgttagagcaattatagccctatggcttaccggagaagacactccattactgcataattaatatatatagacatttaaaatatattgtttttacaaaaaaaataaagaataaaaagttttttaaaagaaaatcgtactcccttcatctcattttaagtacagccatgattttccgtgtacaattttacccgtccgtcttatttgaaatttttttaaaaaaaataagattcatgttttatcatctcataacagtaaaaatactaattataaaaaaattaaataagacgaataatcaaagttaaacacgaaaatttattattgcactttgaataggatggagagagtactatttagcatttaaaaacgtgcatgtctacgataatatggtagttcagaagcgaaaagaacatatatggctggttggctggctggctagcttattaaccatacgtacgtgtttcgtggacaatatccataaggctcacatggttattttagatgtagaatattctgatctagtagctacttgtgtgaactattcaattgttccaaagtataggatgtccccggcatatctccctgaatcatttcatctgaatcaaagtgaattattttgccagcatatgccggaccagctgctagctgatcatgaagcatttgttctagctagctccaccgtgcatcttccaagatttattttgtgcgcatcttagccaaagaattaggatgaatgtcgtttgttgcaaggacttggatacatccgaaagaatagttacaccttttccccacctacaaatcttgacgagctaatcatattttgggaaaaaaagaagcgttgatcacttgggaatatctgtttttagtttccagtactctagcttcatccatatcaattttcatgtgaaaatactacctcacacgtgtgatttaagagaataaatcacgttaatgtctaattaactttcaaatcaatccgtttcaagatttgtgcttcacaaccttttgcagcaccagcaaactctaacgagctaattggaggtgttcccttgcttagataaatatcctgtataatggcagctcactagtgtgggccagtttgggcccgctgacaatgagggaagctctcgccgtctttcgagtggttaggaggtgtggtgacggatccggcagcgggaacgacgaaggaggatgaagatacgatcaatgaagtccgagaatatggaagatgagggttaggagagagaatggaaggtgaaggcggattttgtggctccataagggtggttgcatgggaacaccagctgatgatgatggagaagatggcagaggggtgacttattatttttcttaagaagggagagggattacgcaatgtatagattgttcttttttttttatccatgttttactgtacatatatacatacaagtcttatcataagtctacgtcacattaataaaacttgggtatagagcatagatcagtatatttattgaaagaaaaacattcgaaaatacaactatataatcagtgctaccaaaatttgtctagatgggtttaaatataaacatatcctatatatacaagtcgtcatatgtacataccatgcatatcaactaataaatatcataaaaaattatacatgcatgtaatttcaatataatatatagtattacatctacgtgtaaattcccatctttaaattcatcgtacatagagaacagcaaaataaacaaaactgacatatttagtcttaaaaatatcagaatttttaatcatggctaaaatataatgaatttaagattaagactttagatgtaacactattgaagtatttcttctttattttttgacatttgttagttagtttacacgtgaaactaatatacacatgatgtgtttccggtttaaatatggtcatttgtacaaataaaggtagatcttaatcggcaacgagaatgaagattagaaggtctaaatataaattagtacaaattatgtgcttagcgaatagcaattaattaagagaaatcaacatgttatcagaatatagcaatatatttgtaaaggcttaaaagattatatttaattagagatgtcgaattgagtacgtagtatgtgggagatgtagtttgacaagccggtgctttggtatttttggcagtaggtcattcaattattatagctttacatgctctttaacaccttagaagactgtgggggaataactttgagttgattgtagaagtaaaagtggattaagtcggtgtgtggctaagtcttagctaggcatgcaaagaatatgttcgtccaccgccgcctatgacgcatatatccatcctgatcttgccgctgccccatgcgtccaaccgagaaaaccggctccttaaaccttaaacaaaagattaaaaaccggtagagatatgcaaataaaatcatcagtcagagaaaaaaatttgtgctagtcaagtgtggtgatgaggttagtttgtcgtgaccgcaagacttctatcgtgacttcgatacattttgatcttgtttctgggagatagaatatacgtgtaaaactgctaaaaaattagtgtacgtttccgggtaaaaagttttaaatataaatataatatactgtaatgtaattacaatataactacattgtaatctctaatgaataaaattatatatttttcagtacttacatacaaacaagttacttcgtatattataagttaattatatactatagaattatcattccgatccctaattaccacgatccattcagatcctacgtggcgctcgcgcgttgcatgccacatggaaacaacagtttatatataaacttcaaacaatatgtttttatttgatattgttaaaaatagattattacaaattttaaaaatagattgattgatattttaaattaactttatatacaagctaaaatctgcatctgatgtacacgcagatgaagatgcgccggcacccaatcccaccacagcgaattaagcggatccaaagctaataatactcgatccgctgttagtgttagccgcgggcgcagcatttgtctgcatcgttcgatcggtttcggcttcattcattcatgtgctcccccctccccgcccacgcactagcggctgccgtccacgcacaaaccacgtaagcacgcaccacctcgcgcggtataaattccccgcgccctccactcattccattccccaaccccaaccattcctatttctaaacaacacacctcctctgcacttgctccttctcttcttctgtccatcgaatcgacaagaagaaatttacaagcaagaatggccgccaaggtgcatcctaacgtcgccgccgcgccacagccaccctgcattagcagcatcgtctcccaacaacaagaagaagaggagcccccggtggtgctcacggtgtggcgcaagtctctcctcttcaactgccacggcttcaccgtcttcgacgccaagggcaacctcgccttccgcctcgactgctacgactccaccagctcaaggcgcgccgacctcgtcctcatggacgccgccggcaagccgctcctcaccatccgccgcaagaggatgagcctctccgacagctggatcatctacgacggcgacggcgccgccacctccaccgccacgccgctcctctccgtgcgccgccgccgcgtcggcctccgcgcctccaagtccaaggccatcgcgcacgtcacgccgctctcctcctccctgccgctcccggaggcctacgtggtggagggctcgtacgggcgccggagctgcgcggtgcgcgacgcccgcggggacgccgtggcggaggtgaggcggaaggagtcggtcggggacgacgtgttccgcctcgtggcgcagccccgcctgggcgcgccgctcgccatggccatcgtcatcgccatcgacgagatgctccgcggcggcagctcatcgctgctgcggaggacatgctccgcgtaagtccaaaattcttccttctgtacagtagagacattgagctcgctgcaaggggatcagaagctcggggtcccacctgtcagcgactcagaagcagtgttcccgcagcagagtctagctagatgcagggcactaaacacccagaaaagaaaagcacaggaattatgacaaacttattagagttggtgctgtatgctacaatcaagttttagctagctgctgggttacttaagcatcatccatgttgataggaaattaagcaggactgatacagtcaggcttgtgaaagtaaagcacaagtaggacaatacatatagatacagcctagtacaggggagttctttttttttcttccccggatgtaatattacaaaagattattgtttattattatatggagaaatggaactgcttctccttttccttcctttttttttagtgatctgtgtacacggctagcccatacagcagcatgttcagtgtgtgcgtgcttgaccgtctatccgagcgacgagagaccatttctgtgttaatcagatgtgagtagtaaacagatcctatctccagcaatattttattttgtttagaagtgagaatccttattattaggcgattcttctgctagtatcatattgctacccactctttgatatgacacagatcgatgatggatggagcagagcttagcttggaagtgcacaacccttgacagagatgagtaacacacattataaacaacagaacattattcagctgaacatacaagatgttagcagctaacatgcacttgacctgctactgttagtcccagacttgtgccagctgatatttcttgaaattaatcccagtttgttaatttgtttcaggtctcattcactgtgttgtactgtagagccactcgatctgccttgttcatctcgcggtggagctagtactaccaaccgatctagagtatctatcacgttttaatcaccattcattcttgtttgagacgatgaaagagagaaaaggcagtagatgcctcaaggacgacggatcgaggacatccttgtcgatgctctgtcccaactagagtagcttatagctcgatgaagacacatgcatctttcttccggccgtgtggtgtggatgtggtccttgatttgtttgcgctagaaattcatcgcttccgcgtaatacagtagtactacagtatgagagctagatggaaaattagacgaaataattttgtctatagactgtgcatgcagctgagaaaatcaaactcaacatcgtcatcatctcatcgtacagagagaaaaacaaacgcatgcagtgtccccgcccccttgcaaaacacaaaacacatggacacgatgcagactggtttaacacagagttatccctggatatataaaaaaaaaaaggttggacccaaagaaggacttagagtcaatggttttagtaaggaagaggtaaatttttcctgtggtgagcgcgctcgacaagggtcgaacccgggccagcggggtgcatgccagcgaccctgcccttgcgctaatagcgcatctctatccctggatatatcagtctttcaagtgtaacttttgctgactgcagatcgagggtgcttaatttcttcatatcattaaagggtaatttcatgtgtaactttttctggacatgtgcacttcttttattcaagggaaagggaaggaactcagccattcaatataattacaggaggtgaaaagagcttagaacactagaggaaaacacattattacaagctgaacagccaagaagctgatggagcagctagcacaactaatttgacgagtgctccaaagtgattactctggggctggtgcttgtcgtgcttcttctctcgcttataacaaacttctttgccaaatttgctacatcttcaaccgtaccatagacactgttgaatatcctgccatttcgttgcaaccaaatgctccagatcgtttcttgtgcactttttcagacgataaacagagaactctgcactttctcagcgctttctacatgacgatgaacagaggatcgtgcactttttcagcgttcgactacttggtttagttctcgatccattcgtttgatacatatacgtatgttgtggagattatggataccacatgtccacacggcatgtatattcgactgggtatggtggtaccatatgtagatagaatatatttaaggggctcgagttatattcttaacctgtgtatcaaggaaatactcgagattctagtcggttatgattgtattttatctttacttgcctattttgctaggaatatgggctgtatgttataatacggactcctctcactatataaggaggggtccgggtgcctcttggggcataacttttcccccagatcatacgatcaataatacacttggtggatcaatccctgtacatgagtagggtattacttctcattgagagggcctaaacctgtataaaattcatcgtctccaaacccatccacttttcatgcttgatagccacccctttttgtattgccgaaatcttgtttcgacatatgttgacttgattgggatactgatctggactactaattcacaggtcaggcttcagagggagtgccattccaagtttccaacaagccaacaattaccactgatcatacataaacagaggcaggaaatgacggatttgagcgacggctagcccagctttttcatgctgaaaattttaggcggattcatcgaagtacttgctgtacagaaacataatggatgcatgaatggctgctagacttaaatttctgtctgctcattcaatccaatattgatcagagtgtcattttcagtcctgctcctgcatgcgccactgtacgtgcatctgacctttggcgaacttttgcgcttttagccgccgaaattgcccaactctttgagagaaaaagttcggttgcaatacgttttaaggaggggccaaagtcatcttcttgttatactcgatctgctcatttcatgtgcatgattagaacaaaagcacgcgaactgaacaatcaaggaagctgccatacaaatacgtactacggtactagtacgcgcccttctgtaactccattctgagtttcaagtcttcaaaaaattaaagtggcttataatatgaaacgaagggagagtactagttaccatattcatgtttacatcttcactgataatatatttacatgcttctcccttcgtttcacaatgtaagttattttagcattttccatatttatattgatgttaatgaatctagacatgtgagaaatgctaaaatgacttacattgtaaaatagaggaagtagatgctacgtacgaagtactcctaagtaaaaatcatcatgctagagaaatacgtgatgtcggtaatcctggtggtgatattctcaaaccagacatgtacagtaaactcaatagtcaatactatgggtaaggtatggattgagatccggtaaggtatgcatattctcgaacatgatcagtcactgcatattcgatcgatctcctaatcaagatgcattaacaagataggttcgaagaccatttgctgaaaacctaagctagattggtccttcttgcatgatgatatcttgagaaatactccctctgtttcgaaatgtttgacaccgttgactttttagcacatgtttgaccattcgtcttattcaaaaacttttgtgagatatgtaaaattatatgcctacataaaaatatatttaacaacgaatcaaatgataggaaaagaattaataattaattaaattttttaaataagacaaatggtaaaacatgtgataaaaagtcaacggcggtcaaacatttcaaaacggagggagtactaataatcgtaaccatccttttcccttgtgttttttgctgactggttgtgctctttaattatcactttatgcgcacttttctttgacgccttccacaattaacatgcgcgcgcgatgggtggttttgtttatatagtactccacactattgtacccgtatgatggcaatactagtctgactagtgtttgctcttcatctagaattgttgtgtttctgtacagtagtatgcatggaaagcaaagaagttgtggaaatgcggtcatatgcttggctaggaactgaagagatagcaattgggatggttggtttggcgtctaaataaaccacagcgtcctggaattgtgagtcatgcgtgatgcgtgattcctccagtacagaggagagagctgatcaaggaagataactcgagacaagccagtcagctaggatacctaatattccctcttggggctcctacaacgtatggaggaggagaaaaacgtgtcttgtgatcttaattgcgcagaggaagaacaaattcacctccgcctccgccgccgcgccgtgtcgagggatcccgatttatggatgcaaatcgctttttcggatcgtgattaatggtacggtggcccaaagcattccaggccctactagatagtggactcaacatgggccgaaatatcgggggggcctccgaaagcccatatacaattgccttacctgtccccacctgtcacatgcctcacgcagcagagctcaactcaagtcaaggcggcatttcgaaattcgaaaacaccaacggtttcaaatcctcctcacatcttctcttcccccaaatccctcctccccatcgcggctcctcctccggcagccagccatggccacggtcacgccgggggtgctgctcaagctgctccaggcgatgcacaccgacgaccgcgtcgccggcgaccaccgctcccccgtcctccaggtcaccgccgtcgtccccgccctcaccgcctccaccgccgactccctctggccctccaacggcttcctcctccagctctccgacggcctccactccacctacgtccagccctcctccgccgacgccgacgccctcgtctccgcgcgcccgcaactcgtcggccacctcgtccacctcgaccgcctccgcttcgcccgcccggtgccccgcgccgtcgggatccgccccgtcccgtcctctcgcagcgtctccttcgtcggcaacccggagccgctcgtcgcccgccccgccgcgtgctcccgcggctacgtcatccagcccgggtcccactccgacgccgcgccgccgctcatgccatccagttccggcaatgcggcgcagtccgatgcaacgaatgccatcaataggacggttctcgcgcacaagaacgtccccgaggccgcgccgccgcccgccgtttcagccgccaagaggcggttctcgtctccggcgccgtccaagcagcgagatccgtcgccttcggtcaagggcggcgcgtcacggccttcgtcgccctcggtgaagggcgcctcccgagcgtcctcacctgcggtcaggggcacgcccagggcgacgtcaccagcgccgtccaaatgcgtggtgcccagccttgttgcggccaaggaggagaatcgccgcacggcgagggagccggcgattatcgtgccatcaaggtacaggcagccgtcaccagtaggagggaggagaggggcggggtcgcccgcacccggtgggaggcgcgcgtcactgtcgcctagctcccggaggctgtccggggaaggtagcagcaagaagaaggtcggggtgttggtggctggtatctccaagatgacggatttgacgaatgggtcggctgttaagccggggaggaagagctgggacaatacctcaatcgcagcagcggctggctctgtgatgaaatcgaaggtcaaggtggataagagtactattctgaggacacaggtcaggatcatgtttcatttgtgttgcaattgcaatcttggaattgcacttgctatgctactattgctatatagttgtacatgcactgcacatttatcttgttgtagtgaacagacaaatagtacaactctactttgaacaggctaatcgtagtgaaaacagtggttacttcaaatgcttgattcagtacatatgtgaaaaatggcatggttttcttgcagttacttaaaatgtttataagtttattgaggaaagagagaattgaaaacactgttatttattttctttccagatacaatggcagctagtttgtaatctttgaatttgactcatggacatgcccttccctaccatcatcacattgttgtgttactgcaggaagcaatggcaagacgactgagtgatgttacaacagaactatccagtaacgatgatgattcatctgtagatgagaagccaaagccacggaagaagatagagtcacctgcagtaaagacgaaagcaatggctccaaaaattatgcttcatgatcctaaatggaccgatggaagcattccattggatggagtttctgatgtgctttcaaagatgggaaaggtaagcactcccaattcatctttgttagcaatgatcaagtcgcagttcattgatccttgaaacaccacatcttctctgaatttgcaggaagccactgaacgaagagacgcagcagcaattgctgcagctgatgctctgcaggaggcattaatcactgaatccgtaatcaggaacctaaggtaattaaaagccgacttgtgtccccggaatttcattcagcacaaaagtggtttttcctaacactcagcttgctattgtccacagtaaattttctgaactaacttcagcatcgaagacctccaatccccttccaacagttgatatcttccttgctgtctatgaggatactctcaaatggaagaaaattgctgagtctatatccaccaatagaactgaaactgcatcatgggagaattcagttactcattgggttgaagcagcattggcaactgatcttgaagtcctaaagttgatgaataaggcacctgaatcgctctctcggaaaaggggtgctgataagccaaaggctcccttggtggtagaagctccaagaacaaccatatccaagaggcaatcacatgggacttctgcaaaggtccagtcaaaggtcttaccgacctcttcagcgagctgcgcatggaacaaaactcagggcgtgaatgagacggctgagcttgccacgaccttgtgctgtgagatgcatacgtggttcctgaaatttgtggacgaggcaatggatttaggtttccacctttttgaagatcagaatgttgcaagtaggggaaagcagagcagccacataacaatggtactgtcccagttcaagaagatcagtgactggttggatggagtaggcaagattgcagaagaggctacaactaaggataaggttgagcagttgaagtgcaagatttatgggttcgtcatcaatcacatgggatctgcatttgatagctcggtctcgatttcatcaaggaattgaggaatgcttaaagtaagcctttaagtttcttctcttgtatttttgttcattggggatgggatcaaagctacataattctatgacgagaggtctgctacagtttgtagaagctactccttcagttattacctttggttttgccttgtgaataagttgtttgtgaaatggttcttgttttatcggttacaattatgtacacttgatagtttagcttgctgtagtctgagtgaatgactgacttgttaaagctacaagatatcattcttacatccttgcaaatattgtgctaggattaatggtatgttaatttgattggtgcccaatcttttcataacaaaggttaggcaaatgcctgacatgccacaaaaactgtagctagtacaatatgtgccaagtatatttggaatgccgacacattttgctagccgaagaaggaaaacaaatcttcagttgctagaggtccttccatgttgctaatttgctataaatgctggtgaaccatttggtcagaatacatgaagctgtagaattccctttcttgtcgaaacattgatgaaggataggtctagctcctgaacctttcagctgactggtcctaatgattagttgggtcactaatgtcaaagagatgctgcacctgattatggtagtatacaggaggtattggtgccaattcatcttttcaattgaaatttgaaagggacccatagaacttgacaaaaatattttatttgatgcgcttgacgcttgggaggctgtagggtgaagtaaaatcaaacacctacagagaactccctttgagatatgttattgtaaactgattgactgaggcagaaatgccaaattgtctaccggagttgaaaaggagttttatccaaactagtattactatgatactactagactagaattattgaactaacagtcctcaccaaattgaagtctgtagcagttgtttctgttcctttgttttccttgatgtggttggaacttggaaagctgatttgcttgaacatgaagagctgaacaaagacagccctgtttgtaacaaactagtaatcagataattcagccgattactacgacaattcagctgtttggttgtgcagaaggtatattgaccatgcagggtaattcggctgattgcatgaacttgtttggtaaaaactattgtgtataaatcgtgctccaaactcttgagcggatgctattagtgggtgtttttgattggacaatctgagcggcgagtagtgcagtactatgttgtgaagaaacactagtgctgggtgctgctgagttgctaaaaagtatgatatggaagggaagtatggatgtggttggggcagctactgtcccatgatggtttgtgctaatgaaggatggggagttgattgcgggagggatgagtgtggacgcaggcaggcgttcatagttagtgctggatggtgacaggaaacggaacaggaggacttgagagctgggcctaatgtgtggtttgggccgactaaaatgctaaagcactcccttctgatcgtacttgtgattgtagtaattatgtactagtaacgaaaattctgtttagccttttcgattaaaaaagaagaagaattaaactgatagcggacgcactggccgcatcttgtattcttaccaaaaaaaattccatgtcgttgttgtttaaccgccagcagtggactacttttaccaccggtgcacaagccaaattctgagacgcaatgcaacgacgtcatgctatgcttgcagagttgcaggctggtttgtgctgcgcattcgcgtcaacactcccatttattatgccaactaattccaaacaccagcaatactctcctcattaacttcttccgcgggacgagagagggagagagagccaaccgcgcactacttgtacttcctcatcttcctcttgctattaatcgaatcaaattactactagtctcccttccacgccacgcacacgcacccaatcccctatcgatcgagagacatggcctccaccaccgccaccgccgccggcaacggcagcggcagcatcctccccacccacaccaccacggcgccacccttcagagcccataaggacgccgacctggaatccacgacgcggcggcgccggcgacgctgcctgtgctgctgcctgctcgtcacccttgtggtgctcctcgtccttgccatcaccctcctggtcctcttcctcacggtgctccgcgtccgcgaccccaccacccacctcgtctccacccgcctcaccggcctctccccgcgcctctccttcccggccacgtcggtccagctcaacgtcacgctgctcatcaccgtggcggtgcacaaccccaacccggcctccttcacctacgccacggggggccacaccgacctcacctacaggggcgcacacgtcggcgacgccgagatcgacccgggccgaatcccgagccgtggggacgccaacgtcaccatggcgctcaccctgcaggccgaccgcttcgccggcgacctcacgcagctcgtctccgacgtgatgggcgggtcggtggcgctggacgcgagcactcggatccccgggagggtggccatcctgggcgtgttcaagcgccacgcggtggcgtactcggattgccatttcgtgttcggcgtcacggagatggccgtgcgtagccagcagtgcagcgaccgcaccaagctctgattgatcatgtgattccaacttaatttgcaagtttccaagcacgcaacgtaaggtgggcatgccgcatcgcgacgtgggacaagacgagaagccgtatgatatgctgctttgttacgcaggtgcactgcactagtagtacatagtagagtattatattctacacgggcggcacattagttcgttacagatagtatcagatcaggaattcaggattcagtgctacgattttcttcaatatttcttactgcgtgttgggattgatttgattcatgtatataacacggtgtcagtttggatatatatacagtaatttcactattctctatttcttcaacgtatgcgcccatgatgtttactagcgactgattcaaaaattcctaatccaagcgccaaacttcagttaaacagacctttctcgacagcatgcccacagcttcaagctgccaagtgccaacactcacagaaaactcggcccggtgcaaaaaaaaaaaaggagcatatcctgacttctttcactagcaaatactgagttactaggatttaggaccctcacatggtcaaacaacaaacatactaaacattgttacaggtttcaaaacatataatgaagccacatgtataaaccaaacggccatttccagcggttttctgtttaacctcaccactaacagtcacatcaagcaagcagcactttacattatcaatcatgattttcactactccgctgcattcatcacataaatgaaaacatttaagcacggcacaccatctcacagttcttgtgaaagaaaaatgaactactattgagcagcattcagacgatccacatcatgaacctgcaacagactcactagttcaaccagacacagctatccattttaagacttacaaaaggtacgtggtcacagaccacaactcctaattgtatatgactaacccacccaaaaggaagactgattaaagcttacatgtataacttattaaactgcctcctactcctttagcatcactacctacatgtttcagttagcaaagttaccatattggcacagggcaactgaaattggtagccaaaaactgccccaaaatgctgttcctgggcagatcaaaagggtgtcaagatatcacttattctctttaacgaataaacaccttggactgactgaatcaaagtcgagctttcgacaaatgcttgggctgagctgtaccgctttaagaggtcgcctcagtggcgcatctgggcaggtgtctgcaatgcctgtaagtagaggctctgaagaaggggtctcacagcttctaggtgaattagaacctatcagatcctttccagtcgtctctagtgcttgatttgagataatcagatcaataaacatcatgcagatccgttcgagaaactgatcctcctcctcagcatcatcgaattcaaaacttaaccttttaacagggtaatcacctgaatcaaaacttagctgccttcgcgaaggaagttctggtgccttggtcaccttcttctttggtgcacaagctaactcctctggtcctggagcaaaaggatcaaagatgctttcgcgcggtgtctgacatccatatgaaggatcttcatctgcaacactttttgagatatatgattcaatcgcttcattctctggtggtgtaatcacctcagcaacaccactcttgttattttcatgatcacataccatgccaagggatcttgtgtccttattttcaaagggagattgcacagaaacttcttcatctacacacttttccaacttttttacaacagggaaatcacagtttgaaactagcgaattatcagtaacattcttatccacgccttgatccatttgggagtaatgtggactcaacctctcctgtaacttgcaaaatgaaaacctacaatgaaataaggaatagaaaatttaaataccacaaactaaccaggacataacagaaaatgatcaccgaaacaaacaagggacacccaagaagagtccaaaaggtttctaggagaaaataaggcaaaaagggtcataggagaaactaaagcaaaattaagtggttatcgacaaaacactagccccaaatgtaactgcaactgctatgaatgtaaaatgtgttctaaaagactatgcaaggcgccaaggtagtcgtcagccactaataagcagaacccagcttcaactcttgttagaagccgagtgaaatcactggcatcatctgatctaatataaccgaagccgtttttgtcgataaccgtttttttggccacatttcaaactgttcaaccatcactctgagtccaagtatgtatacaacaattatatatgtttctttacttctgtaaaaagatatcaattaaccatcaacatctattttataaagcaccttccgactgtctaattggataatggggaaacctaaaaaataaaaagctttctatgcattagctccttggaagaccttcatccacactttttgcctactatatatgtatcaatggtttatatgcagctatgactcatacataaaagattaaaaatattctctatagccagcgtttttccagtatatctacacttgatctcacaagtttttccattatcacattttcctgaaacatagtaaaagtaaacaggataacctgtacctttgaaatagtacaggatctgagttgcagagatcaggttccaagagcatcaacacttaatagtagtatgatctttaccaaaagagcaagtgcagagtgtatcggtttcatataaaaacttgatcatgtcaaaatcaagtgtggttacctaaaaaaatgagtacatcagttgatatcaaaagatgaacaaggaacttgatagtatttgcctgacatcaataactcgaaaatgtagcaaatatgtgcagaaatttgacatcattgagcctcatttccagcaggtaaataaatgcagaacaatggcctcagatatatgaagaatgtgaagtagctactgtcattggtatctgttctttccagtatctatcaaatgtagcaaaagaaaaagtacaaggaaaaggaaaataagaccaagtgtaggaaaaaagaaaccgcaagaaaatgagaacaagtgtagagcaaaaatctattcacatgcatcacaaacagcagcatatatcatcattggccatctttcccagcctaacagcacgaaaaaaagaacaagtgtagaaaaatctgttcatgtactcttataaattctgctcagttcaagtgtagaggtggcctcagttctgctaagatcatttgaactataaaatactgagaaagatcacagaaagacagaaacttagaaagggcatgtttggttgcctgaccttatcgaataaggtcaagtgcgggcatatctgttcttatgcatcacaaataagcactattaatcaagtgtgtatctgtcagtatcaatttaaaagaaggcactattgtatccggccttatcagtaacttgtatttgtagccaaagatacaatggcataacacaaatcaacaggaaaaataggaataagtgtaggaaaaatgaaaagcaagccactagacatttcattccatcgaaatcaaccaagaaagatgtcagcttttagtagatctagcatatttatgaaggggacacggtcggtctaatccaaacaaatcggctaaaatcgaaggaagggaggagaagacaacctagcccttaccagagagctcaacggaaagagtcgacgaaagagaggggcatagcagagagacggagagagcgaaccagtggaagagagcgatggcggctagcgaaagagagggaggatgcagtgctgacgacgaccggccctcccgccactcgcgagtcggcggaaccctagctttccactggtttggaacaaatgaggagggatggtggtactggtgagtggtgaccccatccatggcttctgcaagagcaggcaaatctgctgggaaccaaacacgtacacgccctaactgaacaccacagtgaaatactcaaagttgctagtattataatggtactaatccagagatccaaatgtcaaatacgtgtggtctctacatcaagatctattgtagccctattgggtgtcttggcttgcgcatgccgccgctgaataacaccataaaccttacccgagcgctcgcttgacggcgacgtggtgcgctaagaagtttggatttgatccctcacaccacaaacaaaggggacaagactacaacagatatctaattaagcaaaacagggttccttaccaacaaaagaagaaatcaatccaagcccggatggatcttccagtccaacccaatacatgagatggggagcaaaccggataagagttccttgttggcgcacctagaaattagaatcacatggtaaaagaagtagatttagggctttaagaagtgagaaaagccgaaaaatcacatgaaaaaaagagataaagctcactagaaccctaacatgtgaaaaccataaaaaaatccatagaaagaagaggagcattttggatctgcgtgagagaaagattgagaagtagaaatggttaagaaaatggaagaaaggaaatacctcgcggcggctctggattggggcacgagattggtttgggtggcaccaaccgggattgggatgaggcctcccgccgccaaaacaatcccctctattaaaataaaacaaagatttcacaaaacaccccatagaatgtctcatttgctaattttattcctttgtacaacaactagcgaggagcaaggcagctctgctggaccactgaggaatatatgtgaaaaataaagaatcagtgggttggagagtaaaatgcaccaaaaggagggaaaactaatttgggcgggcaaccttggcgcgcgtgtagcaatttagcatatccttcccgcgaaataggcgtgcctatacatatcatcattttggtgaaaaatgaaagtttcccactgcctaaggagttttttcttaggaaaaaataataaaataataatggtcgtgattatttagaaatctataggtgcaaataatcattaaatgagtgggtttcatgtgtatactatgttgaggctagtttgcgggttatcgaagatcataatgattaagagacagttaattttatgttttcctggtttaatggaatttatctattgcaagcaaaatacctgtgtttcatgaccagtgaagaaaattataactttacataccttgttttgccattcatctctccatatgaaacacacctgtgatacctttgttccgtcatttatgtattcgtatgaaacacgccagtcaggttaaagaataagcctgtgagactttgatactcaattttaacagtacagagaagtttatgtgaaaatacatataaactcaaggcatgcattaaaaaataattgaatgaataacttttcataatattaacaaaatgaaagggttaaaatgaaagattgacaatgaatccaagatattttatcatctaatactcatagatagaatccgtttggtgatgcatggtagaggcattatccagcctctctcattgcagctcacgagggacggtggtggtgctcccctagccaaccagcccctctcggcacgcaaggtcctcccttagcgcgaggtagcagtg

SEQ ID NO: 7599 - DNA, 12652 bp, Oryza sativa
ttgaatcaattcaaagactgatacattgcacatactccgaccggacgagacgcactgcctcatccgtgtcgtttgagaagcactcacttagttgtttcaaaaaggagtttaaataaaatcaattgcaaaaacaatagcctttcctttgaagcctgcattaaacacttaattcccatggcttactgagtactcatgtactcacccttgctctatataaataatccccctccccgcagttgctgaagaagatgaagtggatcccgctgacgaggagttcttccaggagcaagtcggctacgatgagttttagggtttcggtctagttcccaagtcgcgcctgtgatgattggtccaagtcttggcttccgctttcccttttgtaatgcagttgtgagctcgggatctgtccgcagcccaacatgactgtactcctactatgtaataaagagacctctgttgctgtgatattctatcttcctgtgataccagcactgttttcttggactagtatcgattaacaggttaatttggagcgtcacgggctagtttcgttcggggctagttcggggcgtgacaattaataaccatatatgtgttattaccgtattgctttcatgctttgtttgtttatgcatctagcaaacaaatcaaaagtgtcttaaataaataaagactggtgagtataagacaaataagttgtttgtaatattccctgggatttgtccatattattgattcttctaatatttggtataaacaaaactttcttagtacactaacacgctatcttattgcagtatattgtcgatatctttcgaatctttctgagagggactgcaaatcttaagcacatgtacaatgcaaatgaaacacagtgctggtttgaagaaatcgagtaacacgtaagcatggatactcaccatctccttctccggctctctcttcgtggaggacactagttttgcctcttcttcagtgtgagtatacccaacttgctttatactgctaaaggtagctgaagtcattgcttatatcttaattctattattttgagcatttctcttttaggattcaacaaactttggtcacttttgtcctttgcattgtcctgggcatgaatagtgctttgctctgatggtgcttctaggtggatagcattaaaatgatactgcccaaacagttggtaacagctcacaattggtaacaagtggattaaaggaaccacatgggaaaagaaacatgcatttcaagttgcagtaggaaagcatcctactgcaacttgaaatacatgtttcaggcatttcaaaaaaaaaaagttgcagtaggaggaagcaagagattttgattcaatctgcaaattcgatcttcctttcttaagtagtcaaatttagaacaagttacatgttatgttagtcccagtcaatcgacagtacaattagtgactacagtctcatactagcttcttgagttaattcgtcgatttcacttgaattgaaacatctattttcctacatgtcaaatagagctcatcaccttgaactatgaagaacagatcataggtgtgtatggcttccagcagatccggtcgagagcaatgacgaaagccatgatcatcgcacaatctacattcggttggacctcaagactgaaaacatcttcagcaagagtcagtgacaacgatgctgctccagccttcttcctcgttatccttgcgacttcctcaccgacgctgttgcggatcttgcaacttcttctcctgaaactgccctcgattgagaagcctggaacatggccagtacgatctgacgaagcatgggtacatcctgacatgtgcacttctgcttcatgactgctttgcataactgagcattttctcattgagaagagttgttgtgatcttgtcctcttgccttggccttcttctgacgctctgtaacaattccattggtcatgcatgctgataatctgttgcaacagaagaaaggaaaagaaaattcttagttcttacttactccccatgggttctattaatggttggtttctgttctttggcccatctgctgcacttgtaataagaggtaacaaaacttcagtcggaaagtagaatgaactagcggataaatcaaactctgtattgtaacctctccattttttaagttttgattttaactctatatgggattttgggcaaattaaagcaaaacagcatcagaataaccgaggctggaacgatgaaagcaatgcattttagtctttggtcagctgattttgtctgcaagtgtttagactaattattttcctagctagatgtattagtggaggtagttgatagcatttgcctaaaaaccgtcggcatgcacgataatttgccttaaatctttttggtgagctatggtatcttttagtatttgtgagacaaatagacgagacaaacatatatatacttgtgatttggtgaatattttgaggaaacagtgaaagcctggagatacattttttaaaaaaaaatcgagaaaatgaaagatcgggttgatggacgaaacactactctcggggctctcggcaaagcaggatttgcagtatttaaaagtcttcagtgaagttttggaagcaaacttggtgatcgttctatatcttgagagaagatatgtaaaatgaagtctacattcggacgaggatgattgacgagcagaatataaacgatttttggttgaatgtatgatgaattgacgatcgatcggttgaatgtatgatgaattgacgatcgatcgacgatcgttcatgcatgctaacagctaactcaatatatcgaccgaaaccgtacgtaaatattatactgattgtcaggtgtcaggtaatactagtatacaaccacaaagatgcatgaatatagcctataggaggtaattaattaattaattaattaattaattaattaattaatctgagatgcaaatgcaagattttgcaggggatgaatcatgaatgattagaagatagacaagtgtatatacctgtggggtgagggcgaggagaggcgagccatgtccatccatgagcagcaggtcgccggagaagagcttgcggcggcgggagtagttgtcaacacggaaggcgagggtgccggcgtggtcgtagacggagaagccgtcggtgccctggaagcccatgctggacctcttccacaccgtgtacaccgccgctcgcgctgctgccgttgatgcggcggcggcggcggcggcatcttggcgttgattcgaagggtgtatccgactcatcgatcttcttcctcgctgcgatgcgatctacctatctatctgcagagagagagagagagagagagtttggcgttggacgagagatgtagtgcgcgtgcaatgcttaactcgtcagtgctgacctcgtcattgccggcctcacctgcttatatatactcctccggtctctgaataaccgatatgacaaatgatgcagcaacgactgatgattccttttcagagttcgaccgatggatggatgcgcctcttttaaccgtgtgtgtgagtcgatcgtgcgtgtacatctatctatctatatatgtggctgcatgaatgcgtggcatctcaacattctgaatgtgcgccatatattcctctgcctgcttgcaaaggaagaacaaccttacctagctagcttctaacaaaggaatgagccgcggaacacggtttcatttggtccactgttaattagtactacttgtgcttgtcacaacgtgataatacttgggtaaactgcaactactcagtcaatgcacacgctgttatactgacaattaatttcttttttactccaacatgcctgcatgcatatgaccacactgacttgattcggtcagttctaactgttatgtagggtgcaattgagtgtcggaaacttccaattgatctttccagatgtcctaagtttaatttcttgcgattcctaccgtccatttcatcttcctacaagaacagttgtcttgtataaatagtccaatgtcactcatttgcactaggctgctctccatcgctgtgtccatcttagcatacatctcattatttccccaagcacgctgctgatctctccttacccagtaatcagtaatcgcttggaataattactcgtgcaattgttaaagcccaagattctgctaaaccaaaaaagaagtaattttgctttagtgggtgggtgaagtggagtattcctagcaaggtcacagtcgcgcatgcgtaacatcgatctggttaattgctcacaatatctcaacagctgtcaataaaccctcgcttttcgcatatgaatgcatggacaattcgctagtggccgtaacttaatccaattctgtggttttggatcctttattgcttgctaattgctctttgaaaaacatggatgaaagctccttctacagctatgaaaagcatgtcctgagtcctgacaatgcacaatttggccatggaaggatcctcctaagtcctatatattcctagccatgaatttgatttcatcataccccacacactcccttgcgatgctcaacaaaggattaatttattcgacaaccaccggcctatgctagtaagttacagacatttctatatctaggttacagaatccgaaacttggaatgttatcttcctcgtgatgatttatgtcaagatctgttgcttgcacacacaaaagttggcactgccacttggcattgataatttgatatgcaaatgatcctagtgacacaattctgtattccatctctcaataacagaaatatctaatgagatgcacttgatagcgcagtagcaaggggtatgtgatttcaacactacggtcccgtgttgaatccacaatacgctcaaaatttctttttttttaaaaaaatgtttggaggaatgtccctccctccaaatctttttttttaatctaaagtaatgaaagtactaaactttcttgcaaagttactatggccacgtcattgaataaacatgagccgtcggatattcactccagacaatacaaaccgttggattgttgaatcggttcacgaaacttctttttacaaggagatccttccacatccctacggtaaaaagaaagagatcttgattccaccgcatcgtcacgcccctacgctcccgaagcccacgccgcgctcctccgcctcattgccgcctgctcaccggctcttctcccgtaaaaaagaaagagatcttcttttttttttttgtaatatctagtgaaaagagaatacaggtttaccaccaaattaaggtttgcgaacaatttgtcgactgatcatacgtactactttcgtcagttgatgactgagatgaacatgccctgccgccctggcatccatgagctatggaagagacagagactcgtgaacagagcataagtgagaattgaaccatttggtgaatcttatgacaaattaacacagcaaaaacccaaatgcacgtctgtgtttaattctgactctggccaatgacaacgagacaagattcgttaagttgcagctctcgcacattacacgcatgattaatcacgctagacaacacaaactccaaaccaaaataatgacaaaaggttaggttgaacaggttaattagagttctaataagtaatcgctttattggatccttttacaacttgatcataatctccttagtttagtaattaccagtgcactagccaaatggttagttagcgcttaattacaattagtgaactagctacttaaatggcggaattcgttaaagatgtggtaattgttatttgcaaattgcagttttaattaatcacatcatctgtcgtatgtaacgagtcggacataataatgatcaattgtcgatgatgcaataacgtgtcgtagggtttattattttgttggtacgattgatcatccattttaggggctagtaaaaaacaggaagcgttcgcgaaaaagaaaacaggcagaagaattggctccatttcgtttgtagaggaaacgtacaactccaaaacagcaaaactgaaaagtctcgattgttttccgaggaaagtcaggaaaatttaaatccgatgttgattttattgtaaataaaactgaataaaatattttttttaaaaaaaaagacttaacgaccatagagtcatacgcactctgttaataaaagtctaatgcgtgtgtaggatcgaatcacaataactaagccaaccaaagggggggtgaatggttggtatacccaaaaaccgaaaacttttagcggaaataaaagttaccctcgaaatcgacggaagtcggtctgaccgggtggatgccgccggtctgaccggtgttgaatctccggtctgaccgccgagatcagctgccgctcgctgtcgccgccgccggtctgaccgccgtagtcccgccggtctgaccgccgcgatgccgccggtctgaccgccggtgtgtcgccggttagaccgccgatacccggtgaaacacaactcgaagaactcttaaagtagatgacgactttattgattctctttgtgtttacaaagtgcaccaacagcactccttacaaaaatttcgactaaactcgaaaccctaactcaaaactcaactcaattgctctccaaaagcgataccgggaagcctcacgctccccctctatttatacccgaggtaggcagcctaaagccacgaaccaaactcatactaggagtcctaaacaccttaggaaaccctctagtacaagaaacaaactttacataaccaatcataccaaatttagactccttccaaattcgactccgcatcccatacgcacacaataactccatcgtatgccatatggaatctctatcaaccacgtgcatcaactctagcctaagtatcccgcatgatctctgaccaccacgaacgtcgtattatcgccaagccgactcccggtccatcaccgcaaatactctcccgaggcatcgagtcacctacacatgaaataaacaaagaaaccatattccgagactaagctatcacaacttgactcattagtagcaaacaacagtattatatacgtatagtatccatctagaagccataatcatgaaataatcacggatatccaaacaaacaacccgaaaccgaaaccgacacaaagtcggccggtcagaccgcgggctggccggtctgaccgcgcgcatatcgtcggtctgactggctaccagagcccggtctgaccggtcacatgaaataacagaacatgcgattcacctgtaaaatccaatcatctccaaaaccacttcgtgaattaattccaaataacaaaaccataatctccaatgccaattgttcatcacagaataataataaaaacacctttgattttacagcgtgtgcgcgtcacttaagtgaatttatcataagcacgtatttacatttcttattatacaccaaaactttttttcacatagaaactttattatacacaaagttttcctcgagaaacattttcgaaatgcatgtatgcggacacatccaattctgatttagctatgacattttagtagaaacttagattctctataaaaactttatatatagaaaattttaaaggtatgtgtgctggatgtgggccaggtggggtaaaagttgtaagccaattttttagtccaactcgcaaaaggtttgcgcaaaccggccggcatgaatctattaaacccatcgttgatactattattaaaaaaatcatttttctacttaaatataataaggtatattgtttcacaggttataattcaaatataacccatgcatgtaaatcttaacgcatatctatctatctatctatctatctatctatctatctatcatattattaaaacaactttgaaaggaggcatcacgttcgctgtggggattagaaattcccatgttattcggagaaaaagaaaaatatatgtgtcgttggatcgtatttgtctagattttgatggtctagatcaagcaggaaaatacgtgagttcaaataaaaaaaacatctagagagactgactaggaattggacatgcatgtatttggactaatttgactaggagtcggacatgcatctatttgcatgcatgcgtatggccatttgagcctgtaaatttgtagtgagatttgcaattggaatcggacattcatatggcgttagaggtaattagagtcatgcatgttcatccacgaaagaacaagcataattaaacgctcaaaggtagattaaaatatattccaataggttatggtaggactaaattacaatgctataattttatctatagaaacagaagataagtgttgtacactaaatctaattatacatgcatgtataataaaatatttatgcgcttaaattgtgctatattcgctctaaagaaattatcacgttaattaaacaaaataaagaaaataccaaccatgcataggattgtggtatacctgaatattaactattaagatttaattaaaatttaaaaagttaaagagatgaaacggataagagtgtgaaaccgtatagcaattgaaccaattgcatgacatcctgacacagacactgaccttgcctccaaatcagaataggaaattaatttttgaagtgatataaacgcgaaagtttgttcacgttaataagagggaaaaggaaaaaaagacaaaatatatttctaaatagaaaaggttttataggaaatacaactatacgactataatactaacagtatataaatagaatagaaatctaattttctctctgattaagctaagtcgtaagtcggtaactgagtagtaatgtaatgacttgtaaaactagcatccgtgtctgtctcatgcaccatacccatgacaatatgatgcgtgcacacatgaaaaacaaacgacgataacacatgcatgcgaggtgttggacgcatccatcttattgactaaacccaattagcacatcaatgagatgctagcagcttagcatgtcatattactctctaaacctacattaaacaaacagtgaggttagcacatattagtatattaccatgggaagttcaattattggaattatgatttattttaatcttcagagtaatctataacacataatgagattaattaattaacatgcctataaaggagtagagtggtggcggttgatgggatatctaaaaactattaataaaacaccaaatggaatgctaatgacgattaaaaggaaggatgacagagaagtcgtgaagcaaaaaacccaatgataatcatatttgatttttaaaatatcaatgataataaaaatgagaggcagcggacgaatcgtacaggagtacaatggcagagctgccgatggttggtgggagttctagaaagtaaaaaataaattccaacgataattatattcgatttttagaatcccaatgacaataaaaactggtcagcagacgggtcatagagaaatatagtggcagcgtttgacgggatttctaaaaatttaaaaaataaaaccaaatgagacaataaactctaaaaactaaaaactataaggtccaatttttaaaggtccgggcttctaaaaagtaaagaaataaaccctaatgataatcatgtttgattttaaaatctcaatgataataaagaaggtaggcagcaggcgagccgtagaggaatacagtgacaaagtcgttgacattttggcggaacttctagaaagtaaaaaaaaagaactaaaacaataattatgtttttttaaaaaatatcaatgacaataaagagaagaggcagtggatggctgtagaggagtataatgatagtgtttgatgggacttctagaaattataaaaacgagcccaatgggataataaactctaaaaacaataagatctaatttttaaaggttccaagaagaataaatagaaatcgtggtagatcgagcaagcaaataaagaaggatatgacagaagtaaggggtagcaactaatgtgacttttaaaaactataaaattaaaaacacgaggataataaggtttggtcttgcaaagtcttaagacaacgagataactatttaataaattttaagtaaaaccatattaaaaattatataattttgtatagtgctagccgcgcaattgcacgggccacccagctagttttcattttattccatccgttttaaccaattggagtaaaaaaccaaattaattaactaaacttatctcatattctcaagacataaggggaaggatataccataccgaaatttgtttaccattgtgttggcttttaatcccatactacgtgcatattaatgtggaagtattcaacaatttacatgctcagcataaaacattctcctatgcatcattaatcaaattgttgtgctgacactcagcagtgtccgtacattatgaacagaagaagaggagaaatagtttcagaattgtgaaagctaaggccattcacagtgtaagctatgaaacccatagccttagcctcaaaacttggtccaagtacacccatcctatagtgcaagcacccatagttagagtaccaaacccacagccggtggaccccacgaaaaggaatcatcgcatcgagtactacttcatcgcctccactttcccgaactgcactcgcctcctctcctcgagtactactcgcgctgcctctcctccttctcctccctcgcagcgacgccgatgggaagcggtggcgggagacgtcgccggcggcggcggcgggagtcgtccccagcagtggctggcgcggcggcgtcggcgggaggcgtccccggcagcagtggctggctgacgagacaggtaggagaaaggaggcggtggacgctgttcttgttctttttgttcattttgttctttgggttcttgatttgtttccccaccttgatttctttcggttcttgattaacaggcatggatttgattggggaaatcttgggatatcggtggagcggacgaatcggtggcgggaggaggagattagctgcggtgggagaggattttttagggtgaatcggggatttcgcgatggggattcgacgtgagggtacgacgcgtctgggtcacgtgctccatagcgcacggaacttgctgcacgtggactcgctgcgagaaagttcctcgcgtccttgtttgggaccaaggggctctgctagggcgcgcgaccatgctccacgcaagcacaaatcctcgctggtgcggtgtagccctggtccacgtcactacactctgagaggcctaactagctagctatttcagcattgctgcttttcccgcgtgattgcaactttcgtttgattgcgttgcgaaccacttgatatatactagtatcaaattaaggccataattaaaaagaaaaaagcagatcataaagaaatcttgaactacgtaagcactgtacctgaagaagttgtccacaacttgtatctatgcatgtcgaaatcaaaactgtttgagcttgtttgagctttttgggaggcaacgcgagtgcatgccactgtgccgagaaattaaagattgaaatgtatagacatcaatggtgcgattttaattattcttttaattataatctcgtgattcctgatcgttcgttctgtaacctctatataattggttatactcctactgttttaggttttaagatgttttgactttggttaaagtcaaactgctttaagtttaactaaatttgtagaaaaaataataacattttcaaccaagacaattttttatgaaaatacgttcaactattgatttaatgaaactaatttggtattataaatattattatatttgtctataaacttagccaaacttaaaatagtttgactttgacttaagttgaaacggtgggaaacggagggagtagtttttttagaaaaagtaaagactaaaatgaattctattatctttaaggaaaaaacatggatagtgtcttatttgttcatatgggctcaattcaaaaggtgaagctttcggtaaagaggaagggctaaggcccatattaatggacaggccttccgtgggccaggccactatatgcagatgggctaaaagctccctactatagtactagtagttaggaaaaagtacaccgaatgtcccttaacttgtcatcgagttacaaaatcatccaccaaccacaaaaccagatatatgatacccctcaactacaaaaccgtttattttaggtcctttggtggttttggccttggtttgtccaacgtgacggctaactcagcgtggacccatgtgggccccagaagtcagagtgtccacgtcatcgccctccctctttcccctcttctctcccttcctcctctctctttctcactcttctcatctgggattctgcagggcggacggcgagtggagaggaggccgcgggtgaggcgggagagcaggagggcgttggcggccggcgacgtgcgacgcggcggtggcagcgacgcaggagaaggggagacggcagttgcaggggccgcaggtgcagaggagggcgtcggcggccaacgacaggcgacccgaccgcggcggtggcggcggcgatgcaggagaaggggaggaggtgactgccgccatggcctcgccctcctcgacgagttcccctagagaagggagaaaaaag

SEQ ID NO: 7600 - DNA, 25780 bp, Oryza sativa
  unsure (1)..(25780): unsure at all n locations
cttccagtaacagaagagatgaaaacaatccgttcattagattacagctaacaatggtgtgctgttgatacttgtgcagctgacaatggtgatccaggagacactccgattgtacccaccagcctccttcgtcgcccggggaagctctgaatgacatgaaacttgccggcatcgacataccgaaaggaactaacatctggatcccgatcgcgatggctcaccgggatccttcagtatggggtcctagtgccgacaagttcgatccggacaggttcgccaacggcatagcagggacctgcaaacctcctcatatgtacatgcccttcggcgttggggtccggacatgtgccggccagaatctagccatggttgagctcaaggttgttctgtcactcctgatgtccaagtttgaattcaagctttctccaaactatgtgcattgccctgcgttcagactgaccatcgaacctgggaaaggtgttccattaatttttagagagctctgacttgagattcttgaaggttatataaaatgtttcccttttccctttgttatatctgtttggtatgtgtttgcaacaatgctgcaactcgagtgtaaacagtagtatattctacagtctgcagttctgtacactgattgaagtgttacttatttgtggaatgcaacttttacttctcgtctgtcaattaatagtttacataacatcaggtgaaaaaaaaactgaggtcaggatggccgagtggtctaaggcgccagactcaagttctggtcctctaacgagggcgtgggttcaaatcccacttctgacattatatatatatatatatatattttaatataattttcattcatggactgataaacctacgtgcattgcccttcgtttatgtattacacacgaaaatagtatttatgtattacgcatggttttttacgtttggccatttgttttatcagttgacttttagacatacgtttaactatttattttattaaaaagattatgtaattattgaaaaggaggtgaaattaaatctttccaaatttccattaaccctatctcatctagtcatcccaattccaaatctaccgatcagagccgaaagcaaatactgcaaagatcgggacctcgaacatagatggcgtgaacgcttcgtgctatgttgcccatatttcttggatctcatttgatagtagttgatagcgatttttagtgtcaatttatctaaacaaaactgataaaaagcgtttgtcacacttttcttcaccaatttgaactagctaatggtgatatgtgcatatttttatttgttttgaagtatatttgcttgagtgtattttggaagtttgtgacaaatggaacactcgtggtatttggaagtttctaatgaatggtatactcgtgataatattgtaggcaataacttattatgttttaactagtccataactacgtactactcacgaatattctctatttattaaggaaattatgtgaaatacattttcggaagtttttgcactagaaagatgggcataaaccaacgaaaacagacaaagacccaacaagataggctaagactggtggagatgggtgaacgctgaggagagtggaggaagacttgtagatacgtgtgaagactcacggggacttcataggaggaccggcaaaggtggatgaagataaggtggaaattgaactagttacactaccaatagttttgagcgggcaaaaggcgcctaggtgaagcactaggcatggcctatgatagatacagttccatctattcgtcatgtaatttggcttaagtgtattctaataaaaacatgttgacaatagaaataaggaaatgacatatatcaaaatcatgatagggatatttatacctgcataaaaaaaatacttaaagcttccgggaattttttttgcccgccgtctagcttttgttcccgtgcatgtatttttgtcagattcccttcttccccgcgtacgtccggatcacgaagagtccacaatgttcccacggcaagcgcaatatgtccgctactgcatccaatccgttcgtggccggctcaaatgcttccaattcgttcatggccggctcaaaaccttcagagttcgaggaaaacaaacatgtccacatggtttccgatccaaaaccttcaaaatttgaggaacatgacaaaaaatcggcaacgagaatagatgaagctgcaaacactatccagttatacgagcttttcaccatagtagaagacgagaacttcataataaaataccaaaaattcaaacaactcaataaacacaagaaagtatagtacacttgtatcttagcaagccacctcatacacttgccatcgccgattagggtggacggggagcactgccgtcctcaccgcctatggaggctgctggcgtcaccattgtcgtctactaaggacagaggagcaccgttgcccttgctgcctagggctaggtgagcactgctaccccgcgctaagggaggacgtccatcgtgctgaggggggttggttggctacgggagcaccgccaccatccctcgcgagttgcaatgagagaggctggataatgcctccaccatcactggacggattccatctatgtgtattagatgataaaatatctcggattcatcatcaatctttcatttttaaccctttcattttgttaatattacgaaaagttattcatttaattatttttatgtctgccctcgagtttatatgtatttcacataaacttctttatactggtagaattaggtatcaaaatctcacaggattattctttaacctcacttgtgtgtttcatatgaagagataaatgacagaacaaacgtatgtttattctttggcctcattgacgcgtttcatacgaagagatgaatggcggaacaaggtatgtaaagttataattgtgatcttcacccgtcgtgaaacttaggtattgcaagaaacttgggtattttgcttgcaatagataaattccagtaaacaagaaaaatagaaaattaactgtctcttaatcattatggtctttgataacctgcaaactggcctcaagccctcaacgtagtatacacatcaaacccacttagtttatgattatttgcacctataaatttcagagtgatcacaaccattattttttttcctaaaaaagaactcatttttcacccaaatgatgatatgtataggggtggacgaaaagctcgtgactcgttagctcgctcggctcgttacattttcttaatgagccgagctaacatcttagcgagcagctcacgagctcaacgagctgggcgcatagggagcaaaatcaaacttcagcagataggaggccaacttggtggcagccccatggtccatctcgcccgtggcaagcccaaagacaattagaaacacatgaccagtcatcggtttctccactctcccgtcggctgcatccccttctcttcccgatccacatctagagcgccgcattgagccgccacccgtggccccgccatgccgtcgcgtagatgcgctgttgttcgcgccgctcacaccaacccgtggcgccatagagtctcgcgttgcagcggccggccggcaacgcgctctgctccctccatcctatggcgccggcgtcgacctcgctccccatgcccgtggtccgtggagaagggagaggaggtcgtgctcgtgcacgcgtccatgtatgtatgcatggacggatggaactatcttgttgcttgatactttgaatctgtgagtttgtgaagaatttagtgctagttgcttgatttcttgtttgaactgagacctccacctttaggattttaattttatagtgatataggtgatgttttaagcttctttttttttgtttttggaatttatgataatatgattaaaccagataagatgacccatttacctcatctgattgctgaacggttgttttcagaatgcgttcttgtctgtctgctatctttgaagcgatgaaatggctgtattagctcgcgagatcaacgagctggctcgagtttcttaccgagctgccatttgagctcgttagccataacgagccagctcgagctggctcgttaacctaccgagccagagcgagtcgagccgagccgagctggctcgatatccaaccctagatatgtactactccgtcccaaaaagaatccaatcctagcaacgaatctggacacacatgtgtctagattcattgctagagtttgtctttttttggacggagggggtatagtataggcacacctattccgcgggaaggatctgctatattgctacacgcgcgccaaggttgcccgcccaaattagttttccctcctttggtgcattttactcttcaacccactgattctttatttttcacatatattcctcagtggtgcagctgagctcgctggatgttgtacaaaggaatagaattagcaaatgatacattctatggggtgttttgtgaaaactttgttttattttatggggtgttttgtgaaaactttgttttattttaatagggggaattgttttggcggcaggaggcctcatcccaatcgcggtcggtgccgcccaaaccaatctcgcgcccctatccagagctgctgcgaggtattttctttcttcccattttcttaaccatttctactcctcaatctttctctcacacagatccaaaaagctcctcttctttctatggatttttttttatggtttttcacatgttagggttctagcgagctttatctctttttcctgtgatttttcggctttcctcacctcttaaagccctaaatctgcttcttttaccatgtgattctgatttccaggtgcgccaacaaggaactcacatccggtttgctccccttctcaatctcatctattcggttgaactggaagatccatccgggcttggattggattggattgatttcttcttttgttggtaagtaactattaagttgcatgcaccagccagttgcacctaaaagcctaagctgatagggaaagatgggcaattcactttatacactccaacactccccctcacgcgagaccccctcaagtctcaagcgtggaatattggagtgggctgcaattattttatttnnnnnnnnnnnnnnnnnnnnnnnnnnnnnnnnnnnncggctttgataccatattaagttgcatgcaccagccagttgcacctaaaagcctaagctgatagggaaagatgggcaattcactttatacactccaacagtaaccctattttccttgattagatatctgttgtagtcttgtcccttttgttcatggtgtgggggatcaaatccaaactttttagcagcgccacgccaccatcgagcgagcgctcgggtaaggtttatggttttgttcagcggcggcgcgcgcaagatttgtctcagccaagacacccaatagggctacaataggtctcggtgtagagaccacacatatttggcatttgggtgcctattactctagattggtaccactaatagcaactttgagtatttcgctatggtgttcagtttaacgctggctatagagaatatttttaatcttttatgtatctgccatagctgcatataaacccttgatacatatatagtaggtaaaaagtgtgggtgaaggtcttccaaggagctatgcatagaaagcattttaccttttagttttcccattttacaattagacggtgctttataaaatagatgttgatggttaattgatttctttttacagaagtaaagaaatatatataattgctgtatatatacttggactcagagtgatggttgaacagtttgaaatgtggccaaaaaaaagggttatcgacaaaaacggcttcggttatattagatcagatgatttcactcggcttctaacaagagttctgcttattagtggctgacgactaccttggcgccttgcatagtcttttagaacacattttacattcatagcagttgcagttacatttggggctagtgttttgtcgataaccacttaattttgctttagtttctcttattgaccctttttgccttattttctcctagaaaccttttggactcttcttgggtgtcccttgtttgtttcggtgatcattttctgttatgtcctggttagtttgcggtatttaatttttctattccttatttcattgtaggttttcattttgcaagttacaggagaggttgagtccacattactcccaaatagatcaaggggtggataagaatgttactgataattcgctagtttcaaactgtgatttccctgttgtaaaaaagttggaaaagtgtgtggatgaagaagtttctgtgcaatctccctttgaaaataaggacacaagatcccttggcatggtatatgatcatgaaaataacaagagtggtgttgctgaggtgattagaccagacaaggaagcaattgaatcatctagctcaatgaatgttgcagatgaagatcctttgtatggctgtcagacaccgcgtgaaagcatctttgatccttttgctccgggaccagaggagttagcttgtgcaccaaagaagaatatgatcaaggcaccagaacttcctccacgaaggcagctaagttttgattcaggtgattaccctattaaaaggttaagttttgaattcgatgatgctgaggaggatgatcagtttcttgaacggatctgcaagatgtttattgatctgattgtctcaaatcaagcactagagacgattggaaaggatctgataggttctaattcacctggaagctgtgagaccccttcttcagagcctctacttacaggcattgcagacacctgcccagatgcaccactgaggcgacctcttaaagcagtacagctcagcccaagcatttgtcgaaagctcgactttgattcagtcagtccaaggtgtttattcgttaaagagaataagtgatatcttgacacccttttgatctgcccaggaacagcattttggggcagtttttggctaccaatttcagttgccctgtgccaatatggtaactttgctaactgaaacgtgtaggtagtgatgctaaaggagtaggaggcagtttaataagttatacatgtaagctttaatcagtcttccttttaggtgggttagtcatatacattaggagctgtggtctgtgaccatgtaccttttgtaaatcttaaaatggatagttgtgtctggttgaactagtgagtctgttgcaggttcatgatgtggatcgtctgaatgctattcaatagtagttcatttttccttcacaagaactgggagatggtgtgccgtgcttaaatattttcatttatgtgatgaatgcagtggagcagtgaaaatcatgattgataatgtaaagtgctgcttgcttgatgcgactgttagtgatgaggttaaacagaactgctggaaatggccgtttggtttatacatgtggcttcattatatgttttgaaacctgtaacaatgtttagtatgtttgtcgtttgatcatgtgaggatcctaaatcctagcaactcagtatttgctggtgaaaaaagaagtcagcagcatatgctgttttctgtcctttttttctttctttctttctttttttttttttgcgccgggcctagttttgtgtgtgctggcagtttgccgctgtgggcatgctgtggagaaaggtctgttaaagttaaactgaagtttggtgctttggattaggaatttttggattagtagctagtaaacatgagaatagtgaaatactgtatatgtacgtatatgtcaaaactgacacaccgtgttatatacatgaatcgaatcaatcccaacacccatcaagaaatactgaagaaaatcggaagtcctgaatcctgaattcctgatcttatactatctgtaataacgaactaatgtgccacccgtgtagaatatagtaatactctatgtacttctagtagcagttgcgtggtgtaaacaaaacaacaaaatatggcttctcgtcttgtcccacgtcgcgatgtggcatgcccaccttacgttgcgtgcttggaaacttgcaaattaagttggaatcacatgatcaatcagagcttggtgcggtcgctgcactgctggctacgcacggccatctccgtgacgccgaacacgaaatggcaatccgagtacgccaccgcgtggcgcttgaacacgcccaggatggccaccctcccggggatccgagtgctcgcctccagcgccaccgacccgcccatcacgtccgtcacgagctgcgtgaggtcgccggcgaagcggtcggcctggagggtgagcgccatggtgacgttggcgtccccacggctcgggattcggcccgggtcgatctcggcgtcgccgacgtgggcgcccctgtaggtgaggtcggtgtggccccccgtggcgtaggtgaaggaggccgggttggggttgtgcaccgccacggtgatgaggagcgtgacgttgagctggaccgacatggccgggaaggagaggcgcggggagaggccgatgaggcgggtggagacgaggcgggtggtggggtcgcggacgcggagcaccgtgaggaagaggaccaggagggtgatggccagcacgagtagtaccaccagggtgacgagcaggcagcagcacaggcagcgtcgccggcgccgtcgcctcctggattccaggtcggcgtccttgtgggttctgaagggtggcgccgtggcggcgatggtgtgggtggggaggatgctgccgctgccgttgccggcggcggcggcggtggtggaggccatgtctcgatcgatagaggattgggtgcgtgtgcgtggcgtggaagagaggctagtaatttgattcgattggattggattcaagtagtgtgcggttggctctctctctctctctctctctctcgtgtctcgtcccgcggaagaagttaatgaggagagtattgctggtgtttggaattggttggcgtaataaatgggagtgttgacgcgaatgcgcagcacaaatcagcctgcaactgcaagcatagcatgacgccattgcattgcgtctcagaatttggcatgtccactgctcgcggttaaacaacgacgacatggaatttttttggtaagatgcggccagtgcgtccgctatcatggacacttcatcagtttaattcttcttattttttaatcgaaacggctaaacagaatttgcatcactacagaattactactcttttgctctatcaatagaaattcgtaccgtcgttaaaaaaaaaaagaattactacaagcacaagtacaatcggaagggagtgctttagcattttagtcggcaaagcgtcaccgtctgtcgggttcgactaggcacagacagaccacacataaggctcagctctcaagtcctcatgttccgtttcctgtcaccatccagcactaactatgaacgcctgcctgcgtccacactcatccctcccgcaatcaactccccatccttcattagcacaaaccatcatgggacagtagctgccccaaccacatccatacttcccttccatatcatactttttcgcaactcagcagcatccagcactagtgtttcttcacaacatagtactgcactactcgccgctcagattctccaatcaaaaacacccactaatagcatccgctcaagagtttggagcacgatttatacacaatagtttttaccaaacaagttcatgcaatcagctcaattaccctgcatggtcaatataccttctgcacaaccaaacagctgaattatctgattactatagtttgttacaaacagggctgtctttgttcagctcttcatgttcaagcaaatctgccttccaagttccaaccacatcaaggaaaacaaaggaacagaaacaactgctacagacttcaatttggtgaggactgttagttcaataattctactctagtatcatagtaatactagtttggataaaactccttttcaacaacgctaagacattttggcatttctgcctcagtcaatcagtttacaataacatatctgaaagggagttctctgtaggtgtttgattttacttcagcctacagcctcccaagcgtcaagcacatcaaataaaatatttttgtcaagttctaagggtccctttcaaatttcaattgaaaagatgaattggcaccaatacctcctgtataccataatcaggtgcagcatcactttgacattagtgacccaactaatcattaggaccagtcagctgaaaggttcaggagttagacctatccttcatcaatgtttcgacaagaaagggaattctacagcttcatgtattctgaccaaatggttcacccgcatctatagcaaattagcaacatggaaggacctctagcaactgaagatttgttttccttcttcggctagcaaaatgtgtcggcattccaaatatacttggcacatattgtactagctgcagtttttgtggcatgtcaggcattgcctaacctttgttatgaaaagattgggcaccaatcaaattaacataccataaatcctagcacaatatttgcaaggatgtaagaatgaaatcttgtagctctaacaagtcagtcattcactcagactacagcaagctaaactatcaagtgtacataattgtaaccgataaaacaagaaccatttcacaaacaacttattcacaaggcaaaaccaaaggtaataactgaaggagtagcttctacaaactgtagcagacctctcgtcatagaattatgtagctttgatcccatccccaatgaacaaaaataaaagagaagaaacttaaaggcttactttaagcattcctcaattccttgatgaaatcgagaccgagctatcaaatgcagatcccatgtgattgatgacgaacccgtaaatcttgcacttcaactgctcaaccttatccttagttgtagcctcttctgcaatcttgcctactccatccaaccagtcactgatcttcttgaactgggacagtaccattgttatgtggctgctctgctttcccctacttgcaacattctgatcttcaaaaaggtggaaacccaaatccattgcctcgtccacaaatttcaggaaccacgtatgcatctcacggcacaaggtcgtggcaagctcagccgtctcattcacgccctgagttttgttccatgcgcagctcgctgtagaggtcggtaagacctttgactggacctttgcagaagtcccatgtgattgcctcttggatatggttgttcttggagcttctaccaccgagggagcctttggcttatcagcaccccttttccgagagagcgattcaggtgccttattcatcaactttaggacttcaagatcagttgccaatgctgcttcaacccaatgagtagctgaattctcccatgatgcagtttcagttctattggtggatatagactcagcaattttcttccatttgagagtatcctcatagacagcaaggaagatatcaactgttggaaggggattggaggtcttcgatgctgaagtaagttcagaaaatttactgtggacaatagcaagctgagtgttaggaaaaaccacttttgtgctgaatgaaattccggggacacaagtcggcttttaattaccttaggttcctgattacggattcagtgattaatgcctcctggagagcatcagctgcagcaattgctgctgcgtctcttcgttcagtggcttcctgcaaattcagagaagaggtggtgtttcaaggatcaatgaactgcgacttgatcattgctaacaaagatgaattgggagtgcttacctttcccatctttgaaagcacatcagaaactccatccaatggaatgcttccatcggtccatttaggatcatgaagcataatttttggagccattgctttcgtctttactgcaggtgactctatcttcttccgtggctttggcttctcatctacagatgaatcatcatcgttactggatagttctgttgtaacatcactcagtcgtcttgccattgcttcctgcagttacacaaaaaggtgatgatggtcgcgaagggcacctacatgactccaattcaaagataacaactagctgccattgcatatggaaagaaaataaataccagtattttaaattctctctttcctcaataaacttataaatattttaagtaactgcaagaaaatcatgccatttctcatatatgtactgaatcaagcatttgaagtaaccactgttttcactacgattagcctgttcaaagtagagttgtactatttgtctgttcactacaacaagatgaatgtgcagtgcatgtacaagtatatagcaatagtagcatagcaagcacatttccaagattgcaattgcaacacaaatgtaaaaatgatactgacctgtgtcctcagaatagtactcttatccaccttgaccttcgatttcatcacagagccagccgctgctgcgattgaggtattgtcccagctcttcctccccggcttaacagccgacccattcgtcaaatccgtcatcttggagataccagccaccaacaccccgaccttcttcttgctgctaccttccccggacagcctccgggagctaggagacagtgacgcgcgcctcccaccgggtgcgggcgacgccgcccctctcctccctcctaccggtgacggctgcctgtacctcgatggcacgataatcgctggctccctcgccgtgcggcgattctcctccttggccgaaacaaggctgggcaccacgcatttggaaggcgctggtgacgtcgccctgggcgtgcccctgaccgcaggtgaggacgctcgggaagcgcccttcaccgagggcgacgaaggccgtgacgcgccgcccttgaccgaaggcgacggatctcgctgcttggacggcgccggagacgagaaccgcctcttggcggctgaaacggcgggcggcggcgcggcctcggagacgctcttgggcgcgagaacaatcctcttgacggcatccgttgcatcggactgcaccgcattgccggaactggatggcatgagcggcggcgcggagtcggagtgggacccgggctggatgacgtagccgcgggagcacgcggcggggcgggcgacgagcggctccgggtttcctacgaaggagacgctgcgggaggacgggacggggcggatcccgacggcgcggggcaccgggcgggcgaagcggaggcggtcgaggtggacgaggtggccgacgagttgcgggcgcgcggagacgagggcgtcggcgtcggcggaggatggctggacgtaggtggagtggaggccgtcggagagctggaggaggaagccgttggagggccagagggagtcggcggtggaggcggtgagggcggggactacggccgtgacctggaggacgggggagcggtggtcgccggcgacgcggtcgtcggtgtgcatcgcctgcagcagcttgagcagcacccccggcgtgaccgtggccatggctggctgccggaggaggagcggcggcagcgccgcgatggggaggagggatttgggggaagagtagacgttgggagtggtgaggaggaggatttgaaacggttggtgttttcgaatttcgaaatgccgccttgagttgtgttgagctctgctgcgtgaggcatgtgacaggtggggacaggtaaggcaattgtatatgggctttcagaggccgagatttcggcccatgttgagcccactgtttagtagggcctgaaatggtttgagccaccgtaccattaatcacgatcagaaacagcgatttacatccataaatcgggatccctcgacacggcgccgcggcggcggcggcggcggcggaggcaaattgcactcggaatagtaatttcttcctctacacaatcaagatcacaagacacgtttttctcctctccatacgttgtacgagccccaagagggaatattaggtatcctggctgactggcttgtctcgagtaatcttccttgatcagctctctcctctgtactggaggaatcacgcctcacgcatgactcacaattccaggacttttgggccatttcgctgtggtttatttagacgccaaaccaaccatcccaattgctatctcttcaattcctcttagccaagcatatgaccccatttccacaacatctttgctttccatgcagaaacagaacaattctagatgaagagcaagcaagtctgtttctcaactagtatcgccatcatacaggtacaatagtgtactatataaacaaaaccacccatcgcgcgcgcatgttaattgtggaaggcatcaaagaaaagtgcgcacaaagtgataattaaagagcacaaccagtcagcaaaaaacacaagggaaaaggatggttacgatgattatttctcaacatatcatcatgcaagaaggaccaatctagctaggttttgcgcaaatggttttttttttttgaagggagcaaatggtcttcgaacgtctccatattttctatcttgttaatgcatcttgattaggagatcgaatatgcagtgactgatcttgtaatagcataccctatacccatagtattgagtttactgtctggtttgagaacgtcaccaccagattactgacatcacgtagcatgacgatgtttactcaggagtacttcgtatgtagcatgtaaatatattatcagtgaagatgtaaccatgaatatgataactactaattcctccgtttcatattataagtcactttaatttttttgaagactcgaaactaagagttgacttacagaagggcacgtactatggtactagtacgtatttgtatggtatggcagcttccttgattgctttgttcgtgtgcttttgttgtaagggcattcccaacccaatgactagaatggtgttcatagcattaaataagttgtcacctaggacaaaaaaaaatgatgtagcaagtgaataaatgaggaaagagaaggaaaccatgtcttacatgagacatgatttctacacaacatccaagacatcatgtgagataagtagcattaaattgaaatatgaaatagtggtgtttgcattggaagagttgtgtctagtactagtttcttgatgatgtggagtttatggaaaccatgtctagtgttatgggttgggactgccctaatcacgcacatgaaatgagcagatcgaggataacaataagatgactttggcccctccttaaaacgtactgcaagcgaacgttttctctggagagttgggcaatttcggcggctaaaagcgcaaaagttcaccaaaggtcagatgcacgtacagtggcgcatgcaggactgaaaatgacactgatcaatattggatgagtgagcagagaaattaagtctagcagccatgcatgcatccattatgtttctatacagcaagtacttcgatgaatttgcctaaatttttcggtacgaaaaagccgtgctaccatctctcaaaaccgtcatttcttgcctctgtttatgtaggtaattgttggcttgttggaaacttggaatggcactccctctgaagtctgacccgtgaattagtagtccatatcagtatcgccaatcaagtcaacatacgtatatgtatcaaacgaatggatcgagtactaaaccaagtagtcgaacgctgaaaaagtgcacgatcctctgttcatcgtcatgtagaaagcgctgaaaaagtgcagagttatctgtttatcgtctgaaaaagtgcacaagaaacgatctggagcatttggttgcaaataaatggcaggatcttcaacagtgtctacggtacggttgaagatgtagtagcaaatttggcaaaggagttgttccaaacgagaggagaagcacgactagccccagccccagagtaatcactttggaccactcgtcaaattagttgggctagctgctcgatcagcttcttggctgttcagcttgtaataatttgttttcctctagtgctctaagctcttttcacctcctgtaattatattgaatggctgagttccttccctttcccttgaataaaataagtgcacatatccagaaaaagttacacatgaaattaccatttaatactttgaagaaattaagcaccctcggtctgcagtcagcaaaagttacacatgaagactgatatattcagggatagctcggtagtctgcatcatgtccatgtgttttgtgttttgcaagggggcggggacactgcatgcgtttgtttttctctctgtacgatgagatgatgacgatgttgagtttgattttctcagctgcatgcacagtctatagacaaaattatttcgtctaattttccatctagctctcatactgtagtactactgtattacgcggaagtgatgaatttctagcgcaaacaaattaaggatcacaccacacggccggaagaaagatgcatgtgtctctgttcatcgagctataagctactctagttgggacagagcatcgacaaggatgtcctcgatcagtcgtccttgaggcatctactgccttttctctctttcatcgtctcaaacaagaatgaatggtgattaaaacgtgatagatactctagatcggttggtagtactagctccaccgcgagatgaacaaggcagatcgagtggctctacagtacagcacagtgaatgagacctgaaacaaacgaactgggattaatttcaagaaatatcagctggcacaagtctgggactaacagtagcaagtcaagtgcatgttagctgctaacatcttgtatgttcagctgaataatgttctgttgtttataatgtgtgttactcatctctgtcaagtgttacgcacttccaagctaagctctgctccatccatcatcgatctgtgtcatatcaaagcgtggtatagcaatatgatactagcagaagaatagcctaataataaaggattcccacttctaaacaaaataaaatattgctggagataggatctgtttgctactcacatcaggtgtgtttagttcatgctaaaattaaaagtttggttgaaattgaaacgatgtgacgaaaaagttaaaattttatgtgtgtagaaaaattttgatgtgataaagaagttaaaagtttaaagaaaacttttgtaactaaactcggcctaacacagaaatggtctcaagtcgctcggatagacggtcaagtactcacaaactgaacatgctgctgtatgggctagccgtctataaaaaaatactctctccgtttcttaatagatgacgccgttaattttttctcacatatttgaccattcatcttattcaaaaattttatgcaaatgtataagatataaatcacacttaaaatactataaattataaaacaactcataataaaataaattataattacataattttttttaataaaacgaacggtcaaacatgtgagaaaaagtcaacggcgtcatctattaaaaaaacggaggtagtaggaaggaaaaggagaagcagttccatttctccatctaataataaacaataatctttgtaatattacatccggggaagaaaaaaatgaactcccctgtagctgtatatatgtactgtcctacttgtgctttactttcacaagcctgtattaatcctgcttaattttcctattaacatggatgattcttaaccaaccagtagctagctacaactaaacaagatatagatgtaaattcctctgttgtttgcctgggtgtttagtgctttgcatctaggtagactctgctgctgagtcgctgacaggtgggaccccgagcttcttatcccagcaagcaaggaaaggaagagatgtggtctaggcggagcaagtcctccgtagcagcgagctgccgccgcggaacatctcgtcgatggcgatgacgatggccatggcgagcggcgcgcccaggcggggctgcgccacgaggcggaacacgtcgtccccgaccgactccttccgcctcacctccgccacggcgtccccgcgcgcgtcgcgcaccgcgcagctccggcgcccgtacgagccctccaccacgtaggcctccgggagcggcagggaggaggagagcggcgtgacgtgcgcgatggccttggacttggaggcgcggaggccgacgcggcggcggcgcacggagaggagcggcgtggcggtggaggtggcggcgccgtcgccgtcgtagatgatccagctgtcggagaggctcatcctcttgcggcggatggtgaggagcggcttgccggcggcgtccatgaggacgaggtcggcgcgccttgagctggtggagtcgtagcagtcgaggcggaaggcgaggttgcccttggcgtcgaagacggtgaagccgtggcagttgaagaggagagacttgcgccacaccgtgagcaccaccgggggctcctcttcttcttgttgttgggagacgatgctgctaatgcagggtggctgtggcgcggcggcgacgttaggatgcaccttggcggccattcttgcttgtaaatttcttcttgtcgattcgatggacagaagaagagaaggagcaagtgcagaggaggtgtgttgtttagaaataggaatggttggggttggggaatggaatgagtggagggcgcggggaatttataccgcgcgaggtggtgcgtgcttacgtggtttgtgcgtggacggcagccgctagtgcgtgggcggggaggggggagcacatgaatgaatgaagccgaaaccgatcgaacgatgcagacaaatgctgcgcccgcggctaacactaacagcggatcgagtattattagctttggatccgcttaattcgctgtggtgggattgggtgccggcgcatcttcatctgcgtgtacatcagatgcagattttagctttgatttttgtttcttgtaaaagcttgtatataaagttaatttaaaatatcaattaatctatttttaaaatttgtaataatctatttttaataatatcaaataaaaacatattttttaaagtttatatataaactgttgtttccatgtggcatgcaacgcgcgagcggcacgtaggatccgaatggagcgtggtaattagggatcggaatgataattctatagtatgtaattaacttataatatacggagtaacttgtttgtatgtaagtactgaaaaatatataattttattcattagagattacaatgtagttatattataattacattacagtatattatatttatatttaaaagtttttacccgaaaacgtacactaattttttagcagttttacacgtatattctatctcttagaaacaagatcaaaatgtatcaaagtcacgacagaagtcttgcggtcacgataaactaacctcatcaccacacttgactagcacaaatttttttctctgattgatgattttatttgcatatctctaccggtttttaatcttttgtttaaggtttaaggagccggttttctcggttggacgcatggggcagcggcaagatcaggatggatatatgcgtcataggcggcggtggacgaacatattctttgcatgcctagataagacttagccacacaccgacttaatccacttttacttctacaatcaactcaaagttattcccccacagtcttctaaagtgttaaagagcatgtaaagctataataattgaatggcctactgccaaaaataccaaagcaccggcttgtcaaactacatctcgcacatactacgtactcaattcgacatctctaatctattatataattaaagaaatagaaaaagaagcctccacgttcgctctcatggtctagaaattctcacattaatcggagaaaaagaaaaagacagagtccatatagaaatacaatttaaaatagctgaaattcggaattaaaaaataagaaatattagaagaggagactagagtctatatagaaatacaatttagaaatagttgaaattcggaattaaaaaataaggaatattagaagaggagactagagtccatatagaaatacaattaggaaataactgaaattcggaattaaaaataatgaatattaaaagtagagtatagaggccatatagaaatataattaggaaataactgaaattcggaattaaaaataaggaatattagaagtagagtatagagtccatatagaaatacaattagaaaataactgaaaatcgaaattaaaaataaggaatatttgaagcagagtatagagtccatatagaaatacaattaagaaaaaaagaaattcggaattaaaaaataaataatattaaaagtagagtatagagtccatatagaaatacaattaagaaaaaaaatagaaattcggaattaaaaaataaggaatattagaagtagagtatagagtccatataggaatttaaaactaactaaaatatagaataaacataataaaattaaaagtagagtttagagttcgtataaaaatacaatttacaaataactaaaattcgaaattaagaaaaatatgggaataagagtttaaagtcaatacagaaatacaatttagaagtaactgaaattcgaaattaaaaattaaagaatattgaaagatgagtttagtgtccacatagaaataaaattagaaataataaaaattcagaaataaaaacaaatagtattggaagaagagcatagagtctatatagaaatacaatttatagaaaattcgaaattaaaaaaagaaatattaaaagatgagtctagagtccatataggaaatatataatttacaaataactaaaatttgatattaaaaataattaataactaacatgtatataaaatacaatatgaatattacacattagtagttttgtaaagttattgcaaaatttaaaattatgttgtcattttaatatatttgaataatataatgagaaaacatatatactattatatgagagaaaatataatgctgctagccgcgcaatctgcgcgggccaccatgctagttaaatataatattttaagcctttacaaatatattgctatattctgataacatgttgatttctcttaattaattgctattcgctaagcacataatttgtactaatttatatttagaccttctaatcttcattctcgttgccgattaagatctaccttgatttgtacaaataaccatatttaaaccggaaacacatcatgtgtatattagtttcacgtgtaaactaactaacaaatgtgaaaaaataaagaagaaatacttaaatagtgttacatctaaagtcttaatcttaaattcattatattttagccataattaaaaattatgatatttttaagactataaatatgtcggttttgtttattttgttgttctctatgtacgatgaatttaaagatgggaatttacacgtagatgtaatactataaattatagtgaaattacatgcatgtataattttttatgatatttgttaattggtatgcatgatatgtacatatgacgacttgtatgtataggatacgtttatatttaaacccatctagacaaattttagtagcactgattacatagttgtattttcgaatgtttttctttcaataaatatactgatctatgctctatacccaagttttattaatgtgatgtagacgtatgataagacttgtatgtatatatgtacagtaaaacatggataaaaaaatagaaccatctatacattgcgtaatccctctcccttcttaaaaaaaaataagtcacccctctgccatcttctccatcttcccatgcaaccatcctcatggagccacaaattaaatccgccttcaccttccattctctctcctaaccctcatcttctgtattctcgccttctcggacttcattgatcgtatctccatcctccttcgactccggcttttcccgctgccggatccgtcagtccgtcaccacactcaaaagacacaagagcttcctccccgtcagcgggcccaaactgtcccacactagtgatgagctgcaattatccaggatatttatctaagcaagggaacacctccaattagctcattagagttcgctggagctgcaaaattaaggttgtgaagcacgaatcttgaaacggatcgatctgaaggttaattagacattaacgtgatttcttctcttaaatcacacgtgtgaggtagtattttcacatgaaaattgatatggatgaagctagagtactggaaactaaaaacagatattcccaagtgattaacagtttttttttttacaaaatatggttagctcggcaagatttataggtggagaaaaagtgtatctattgtttcggatgtatccaagtccttgcaacaaatgacattcatcctaattctttggttaagatgcgcacaaataaatcttggaagatgcatggtgcatctagaacaaatgcttcatgatcagctagcagctggtccggcatatgctggcaaaataattcaatttgattcagatgagatgattcagggagatatgccggccggggacatcctatactttggaacaattgaatagttcacacaagtagctactagatcagaatatttctacatcttaaataaccatgtgagccttatggatactgtccacgaaacaagtacgtatggttaataagctagccagccagccaaccagccatatatgttcttttcgcttgactaccatattattcttatttttttaaaagaatatattttaaatgtctatatatattaattatgcagtaatggagtgcatgtcttctccggtaagccatagcccatagggctataattgctctaacaactaaatcgaacatagcctacttgctttgcactgtataggtcctgttagtttccactcagtggatgtaattttgaattttcatggcacgtttttcaaactactaaacagtacgttttgtgtgaaaaatttctatataaaagttgttctaaaatatcagattagtctatttttcaagtttgtaataattaaaactcaattaaacaccaacatactccatgactccatctacaaataattaaatccatatatatcgcgtaattgataattttaggttttctctcctcaaagttttgaggttaatttataactatactcctcatactcatacttaaaatatacctctaaaaataagtaaaaaaataatcttacaggtttaaataggatcaggaaacatatattgataacttcttgcattttttaggtgtatagatatttgtgttaattaagacagctatataccttcaccttggagctatacacctctgacctccgaacgaacaatatgaggtgacgataaaagaaaattcttggtattgccaatcataaacttgctttttaatggtttaattttttagctctcagacaatgagagtatatacctctcaaggatgaaagaaaacctctaaagattattggatgcatttggaagaatattgacaattgacatatcgtgtagtcagagtcacttgcagtagtgtggtgggcaaatgagaactattctatatatactattaatctattcctgagaatatagatggtaaaataacgcgtacaattatttattcttgtttataaactgctggtgcctatatttccactagcgttaatcggttatgtttgtccgtatataccatactaatttgttcgtgtgagatatactatggtcagctagcatctgtcgctgttgctatgggcatatatatgcattacatgtttgatcgatgcaacatatatactacacattttgtatgtttagacattaaatcatataaataccagtcgtggatcgatgcaaggggtgggttggctacagagttcgaggtaattaaccggagtccaatgatttgtatgggttaggcaaattcagagaactcagacacatgaagtaaccagaagatgtgtatatatgcagtatgcatgtgcaactcttggcagtatgttaactaattgccttctcgatatgatccagttaacatatactagtgagtagacattggaatggagttcgacaatagtatatcctggatagcttgttcctctgcaaggggggcaaaagcagagttcttctccttctatacactggctgcatgcctgtgttgaaggcaaagatggagacagttacctaacaatttcgttcatgtgtgtctgatcactcaagtcatgtgctttgctaagcatacatctctcgttgatacttcctatgtcctaaaataaaaaaaagagtaaaactagataggatatttcctaatacagatttatagtactatagaatatcatattcgatcctaggtacttatattttaggacggaaagagtgatatttattgttttgaatgagtttgatatcaaattataatttttttaactataaataatttttaaaatatttatcttataaatatgaagactaggtatatatagattcgtcttaaaatgtacttcaataaaatcatatatttaataatttttctatatgtattataataaaaaaacagtgactgaagttgttttttagaccgtgtttttctctcaaagcaataagtattagtattaacctagagggagcagtacctaaattgtcttcgcaaacggcttaaaatccttatcataacacatgtaatggcagtgtgtattagctcctaaaactaacataccattagctttctgatctggaagtgaagaggcacgcatctacagctccctgcccccacatgaagtttttgggcttatttggtttgataccaatttactaccctaccaaaattttggcaacttcaatagtagcaagtggatgtttggtttgctaccaaattttacccaccatagttcaaattgaatactatctaatttggtagtgccaaaatttgccaatgttttggtactatccagattttggtagggcaaaaattggctccaaaccaaacaagccctttgtttttcctcttgaaagattgtagtactgaaacaccatgcatatcgtatcgttttgatatgcttttgaagtattccatccacgctatgtagctatcttttttgcaaactgcatatgcatggttcgccacatgcatgtcatggtcgaatgatatttcgctgccgaacaaattaacccaaactctaactgtagcttaaagctagattgattttggactgcacgggggctgtctcctgcagagatcttggcattttctaggtcatgcatgcatatggacaactttgattcatggttgatatttatttggaatgttgcaattgctcattgctcatgtgctagctgctcaattagttgcttgtccaaggtgcttaagacacagaataggcatgcatgcagctttgcaggtttgggagggaacaaataacgccatcaaaagcacaccatccaaactgggccatgtggtcactccagcttagctgagtgtatatagttaaatatccagcaaaatcttttctttttcggttgtgatgatcgatcagtagtggtagtgaagctgcaatataatgtcccaatagcttttccacaactgtcaggttatatttctactatatgctacatgtgcttgcacagttcacccctatcattccggttacagtgcaattaggctagaagccacactgtcatattttagtacttcctgtttgtttccgggggggggggggggg

SEQ ID NO: 7601 - DNA, 4311 bp, Oryza sativa
tataagtagggtgcggatggagttgttgatagtgcgaagaacacactcagctttgagaagtgtatggacaagacaagcgaagaacggtaccgcagctagcgaaaaaagaagtggtggcatgattaacaaactctgtaccgttatcggcctgaaagcacttaatgggcatgctgaactgggtcttgacataggcaacaaactcgacgagatgctggtgaacatcggacttatgacgaagaggaaaagtccaacaaaagtgggtgaaatcatcaagcaacactagatagtatttaaaaccagacaaactcaagactggagaggtccatacatcgcaatgaacaagctcaaaaggggaagaagtactagacgaagacctagaaaaagaaagacgcgtgtgtttcctccctgctcacgcatgacaaagcttattatcagaccgagtacaagaaggaatggctaatttatgaagagtttgaactgcagctggactggggtgaccaaggcgacgatgccataaggtggatgactcggcaaggaagctgtggaccgtgatggcagggacggcagtaggtagagtgtagaggtccccgcgactattgcagcgaagaatcacgcgccgggttcgaaggttcttaacagaaaaaccaaactcgtcaaattcaattgagcatttgttgtcacgggtaaatcgacgaacagaaagtaagtttcaaaccaaggagggagcgacaaggatgtttgtaagagcaaacctagtagctcctataggtagaaaagaagtaccacgacatataaccggaatagtatgaccattaccaatggtaatgaaggtatgagagttagggaggcatgtaacgagaataccgtcagtggaggacatatgcgatgtagctcccatgtcaagcacccatggacttggactgttcacagacagttgattgagagcagcaatgagaccagcttgatcccagttgggctggacttgcagcattggaggccatcctggagttggtggagacacataggaaccggcaaaagctgtgtgagcttgaggatacaggccaaggtagccagcactgttgccaggattgctgggagggcgccatgtagaggcctgcacagcccatggattgaagcagaaccacgggccggcagggcgaaaaccggcctgctgctgttggtaggagttgccacccgaatttccgtaaccgccgctgccggagttgttttggcgaccattgctgccaccgccaccattgttccggccaccattgcgacgctggttacgcttgccattgttggaaccaccaccaccaccgcgaggttgggacgaaattgtagtggcgcaggtaccggaggagcaagagaaagcagaggaaacagctgccaccatggctgtttcagtctgaaccttgtgctctttggcaaggcgaagctctttcagcaacagagtattgcgcgcagaggcgaaggaaggcagaacgggagcaccggcaatgttgtcggcagtgttggagaagcaggagttaaggccgctcagcaggttcaggacgagctaggactcggtgacggggtggccgacgtcatgtagggcatcagcagcagtcttgaccttctggcagtaatcagcaatggggagatcgccttgcgtcatggagtggaactcgtggctgaggtagatggcgcgtggttccttgttcgcctgaaagatgtcgtcgatggagaccctgttaggaaacgataggcgaacaaacgataaagaacaatagatcaatcacaaaaaacacgagatttaacgtggaaaacccttccaaaacaggagagaaaaaaccacgggcgccagccagcaaaatatcttcactatatctgaggtaaggttacatcgccgcacggcggcttacaagaggtatatatatagtggagccctaaaagggatgatgatccgtacggcagaagctggcctttattaagtgcaaatgaatttagatcacaactcaacagacccaaagatcacgggctgtctggtccggttccatagcgacatcaagaatcgcgttggaaacagaaccgaaaagccaaccccggacacagcaatcagcttgttcccaagccggatcttcagggcgagcaggagcagtaccatcaatatgagcgaggagtccggacttgccgcacatggaagtgaagaaggatttccatctgttgaaattaggatgcttaagctcgagggtaatcgggatgtgtgtcttgacattgacagtggcataagggttgatgacgatggcgccggcagaatctccagtggtgccggcggaggagccggacgtcgaggacgacatggtcgcggaagcagtggtggaagcggtagacatggcgcagaggaggaagcagcgcggctagggcgcggctggggcgtggcgcgagcgagggtgcggctgggtcgcggcgcgaagtggggcagggcgcgacgcggcgtggggcagagcgcgcgacgcggaaggcgcggcgagcagggcgcggcgcgggagcggcagaaacgcgtcggtagggcgcggagaaaaatcgcggcaacgcgtggagagaagccggcgaattaggagaggagagggaaaccggtatctgataccatgtagaaaattatgagacgccacacttcccaacgtggggggcgattatatttatatagccaaatacaatagagattacaacaaactcttaaataagagatatatacaaatacgagacatacttagactatacaaatctaatctaattctaatacatataagctatttaaattactgtaaattcttttgttgtatgttctgtaaccatgtcctaatagatttatttttagaacatcgacggatgccttgtgcatttcatatttaaaattaaagctgataagttcctgaaacattgatgttgtgttaggttccatctacctgtattccactggaagcatacaagttttaaatgttactgatccaaacatggtgaaggagctagccaactgcaaatctttggatcttggaaaaccttgctacttgcaaaaagagcgtggagctcttcttggtatgggaattctgacatcaaatggtgatctatgggtacaccagagaaaagtgattgcacctgaactattcatggaaagggttaaggtaattatctgcaggcacttgtattgggccatggatctctctgtcaaaaaacaatatttttcttggagcaactttctagtacactacatgtagcatatactaaaactcaatttattgttaaaatgacatccacagggaatggtgaatttgatgatggaggctgcaatgtcaatgttgaactcatggaaaaatgaagttgaggacagaggaggcagtgcagagattgtggttgatgagttcttgagaaccttttcagctgatgtcatatcaagggcttgtttttgaagcagctttagtgaaggcaaggagattttcataaaaatacgacaacttcagaaagcaatggcaaaacaaagtatgctcattggtgttcctggaagtaggtatatttcagaaactacacatgtactactgtggcacatatttcaatttgagacaatttaaaactcaaaagaatgatgtctttgaactgctcaaaatcctctgttgagctcttgtgcttagtttgaatgatttcaatacccaagtagctgcccagattcaacttctgaaatcactataattcagataatgtgttactgttttggtttgcagcagtatcagaataaccttttggagaaatatacagcttctattttgtctgggctaacttacatgtcccattttggtctgatctacctgcaattcctacatatcattctaaatggatataaggcctaaaaaatgatattttatctagaatccgtgagatactacagtagatccaagagtatcataacatgtattttccaatccatgccattgcatgagaataattatatgaaaataagtggcttctcatgttttatcatcttattgtaattggttaatcatttaaggattttcctttatttttgtgctgggccgactaggtatttaccaacaaggagcaatagagggatctggaatctggatagtagcatccgtaccctcattttaaacatatcaaagaaatatgaacatgattcatcgacctcagtaaacaaggatctcctgcactccattattcaaggttctaaggatggtccctttgcttcatgcacgcccgaggatttcatcgtcgacaactgcaaaaacagctacttcgcagggaatgagacaacggggtgca

SEQ ID NO: 7602 - DNA, 11914 bp, Oryza sativa
gggggggggagggaatgggatacagatgtagcaagcatatacaaagtggagtagtaaaaaataattgtgggtattgtgctaccaactttctgaatttgtttttgtttctgttgtatctaacctgatttaaggattttcgaatatgacatgataacactagctagattgctctaacaagtgcatatatattacaggccagacactagcttaatggaaaattacaaacctttgaacatgcaaggtcttaaaaatagtcctatatttccactgctgttgactgaacactatcttgcactagttcattagtattatctgatcaaagtcaaacagcgattgatcccgtgcaagtaggtagtgagagagagagagagagagagagagagagagagagagagagagagagagagagagagtacattagatatagaataataatcaggcgatcattgcaaaacctacgcagaatgcactagcatgaacaagtgatcaagataaacaaacagacacaattgcagattgatttatctcgtcaagattgatgagcatgcagcaacttgtttaatgtcaagtcaccaaacaatgccaatatatgcctgcaaagtgaaggtagcttttcggtcacaggtgcatgcatcatgttcatatgaacgacaaactactttagaaagtacgcacatgatcgatcatcacttcactttgaagtggatttgcatgacaactcctattcgatcaggcagtggacactatgctccctatatgtatactctagtttaattagtttgttgagagcaaaagtcaaaatgattatttagtttatccactatcatcaccctatccacttcactttttcagtaagtcaaccggacatgattgcattttcatcgcggtgtaagttttttttttgtgagccgatctgaagtaggagtattaggttatgttctttactctgtgttcccaacttcacacccaatcgtcttccacggacatgtttctcagactgtatatatttttttcataaattttcaacaggaaattttctttaaaaaatcacattaatctattttttaaataatatttaatatttaattaattatgtgctaataaatcgttccattttattgtgtgggagatgagttccaacccattaagaagaacacagcattcgttacatgcaccactcagctttgggccggtccagacaacaatatgggcttcagatgggccgtaaaaatgcaggcccaccttaattttaggcccataacaactctacattgctttcctcctccgtcgattcgtccgccgacgagacggcagctgatgcttccggtgctctccgccgacctccgccgcgcgcccactcccttctcccttctccctctcgctctcgctccgccgccgccgccgcctcctacccttcttcggcgccggccactgcttctgccgcgagccatctcctcctctacctcgccgccgccgggccaggagatggaggcggcttacaagttcgggccgtacaagatcgacgcgagggaggtgttccactccacgccgctgtcctacgccatggtcaacctccgcccactcctccctggtaataatctcctcactcccccttgctcagttttaccacttgatcgatttactctctctaatcgcctccaatcccccttgttcagtaccacagtacagtcccaaaacttgtagcggaaattacagagacgggttaagtagcttgccattgctaatttgtttgatgaccagttcgcgaatcatactgtaactgccaaatgctaacaagcacgtttttttttcttgaaaagcacaatgtacacgcagatactagctagtctgttcacatataatagtgtttttctgcaattgatctcttcttctgcctaacagattcaccttaatacagtaccatttcaccgttataccatatgcgattccgtcaactttgaccttgctgttgctgcatgcatttaattcctgttatattgctatatattggttggttcatattctgctcttctttcttaaccatatcattccttattgtgcaggtcatatccttcaattgcaccaaaagagactgctactttttttctgcaaactgctgttttggagatatttgcagttgatttctttaacgtgccatactgctagctagttccgttgggattgtcgataaaatgagcttgcttttgctggcttgtgtttgggtaaagtttcatcaatgcattcaaagtaatagtaaatagatgggcctgtggaatttatttattcatgaaaggattgtgttggtttacccttctatacttgacaaatatcaagtctggcttaaggtcaattttgtggattggctgaagaggtgatgtaggtgtttattttgccgcatgtcatcttacttgattgatcatcttagaggatgtcatctttaccatgagattgatataactgtcaattgtactgccgtgttgagcaaatcttacataaatttattggttagccatcttcttttgatttatactgtggtatattgagaatatgatatatcttatatgttgttttcccttaacaatatacaaatgttctagtgtgccccaagcgtgaagtgaaacgatttgctgatctaagttctaatgagattagtgacttatgggttaccgcaaaggaagttggtatacggcttgaacagtaccacaaagcgtcttcacttacatttgctattcaggtaaggtctatgtatttatgccactgcaattagtaggaatttgtattttcattatttcaatgcttaatcataccatcaagaggagtaccatatgggttttgcttattgggggtctaaatatgatgatcttattgtgtgtggaataaaaaaaaaccattttcccatacaagtattcttaacttttttttaatcatttgccctagctataactttgcatgtctgtcttgaattatttttttaatataatagtaatattaagctatttactcattagttctagtgcttacaggatggtccacaagctggtcaaactgttccacatgtccacatccatgtcatccctagaaagaaaggagattttgagaaaaatgatgagatatatgatgcggtttgtggcatattcctcaatcgacctccttttatccaatacttgaacccaatatttaccacaaaattcttactcagttgctttctaatagattgatgtcaaagagagggaattgaaggagaaacttgatctggacatagagagaaaagatagaaccatgaaagaaatggctcatgaggccaatgagtaccgtggtctcttctcttagatgtaatttttgcgataaatttcttgtaaactatctctaaattgcagttactcttctccagaaattatttttgtaactgtttgtcatccatcatgggaattcaagtcttcgaatgatattatgaaattatctaatttggtacgatacttgtttgttgtaaaatgtgttctttcttataaatctttatctttgaaactagttatgccacggtgtggcagtagttgtttgttggaaaatttatatttttatgacagatgcccctgtaccatatgaaattacacagccatatattatcagtagctggctgggtcatactatggtttcacaatctacaaatagtaacaaaatacattgtattacctttcagtacctatttgaaagcctacttaaaagaaagaaggatcattcttttggtgttttggatcaaatagagttgcaatccatgctatcaacacattgcattaagtttcagctgaaaaattgacttttcttgagatttccgctgctcttcagttattcagacacagtattttggtcctttgatcatgctagttagaaagtgtgttctctcatgcttatgcggattgctgtgataaattatgtttttgtcatgttttgttgagagaaaagccagaaattcgacatggcatagtagctgacagtttgttagacaggatggataactcaactttctatctagctctttgtgctgagtcaaagtttttattccttctgccgactgtccataaagtttgtggtttagcagaatcttgcctaagtctaccatcttggatgcgatatattgtttttattaccttgttactgttagtctatgcatctagccaacattggaaaagttaacctgactcattaatacaataattctggcaatttgtggccaatggccgtagtcctggctaaactatatatcattctgacgcacctttctgataagatcatgaaaactttaatgatctgattgaaccatgaaaatactactttaattttgtatcattgtgtagtttttaccttttttgctgcttgtttttgtctcctgtgaacttttctttggttaagggactgttccatcaatcccatttaatctaatgttattagaacataagaggctctgattttgattagtctccagtgttaactcttgtgcttgctttacgcatatacattctggaagatagctcaagtaaagtaactggttagctcttaatctctttttgctgatttttttttctgggacttgagcacctttggtcattttcatctttgcatcatgcttgctaagagggccattgagatgataagatgcactgaacagaataattgattatgcatatatgccataagttgcaattttgatacgcctgtagctacctttgacaagtggtaaagaacaatttgattggcaatttggctggttgtgttctgaagtgggatgtgactgttgcaccagacctgaggatttggtaacggtaagctatctggagcccctcacttgttggctgggattgttgccggtgtactaggtaatcaacaccaagtaagcttctgtcgtagtcgtgtgacctggtttgcttggcttgcataccaaccactggttgtctctgctgcgtagaggctattgttgtgttgagtacgttgttgcaaatattcgctggcatatataggtagtatgcatgcttcatctccatcagcaggagattctcatctgcaaatgcaaaagtagttctttcggcaaaaaatatagtgcctcaggtatccactcagaatagcaagtgcttgtcgttctcttgctagaaatgtgcactctgaggtcacattatgcgtactctttataaagcctgaacttttcgcaaattttcttcatgtgaaatagttgcaaatacacaaaatttagcacaaccttagttacatctcggctgcaatatataaaatttacagcaaactactactactgcggtttagatggtatttttccttggatttgatgatttctccactatgaactactgaatttccagatgatgaacacgccattggtgtgtagggcctccggcagatacggtccatgacaacgaccatagccatgacgaccgcgacatcgacgcctggcctgacgacgagggtgaacacgtcgtcgccgaggctgaccggtctggacatcacgccggcgttcttcctcgtgatccgcgctgcctcctcgccgttgctgccacggatcttgcagctcctcatggagaagcagccgtcgattctgaagctggggctgggagaagcatcaggtaattggctgtcaccacttgttcttgttgacatgaaaacttctgcttcgtcgctgctctgaagagctgagctcttcctcatggagaagacttgctgctgtgacactgaaggagagctcgtgctgtccaagccttcttcctcttgtgctctgtaacagttccatcgattgtgcaggctgagaatctgtcacattagagcaatgaagattactttttaatttactctgattatctgtttttacattgcttagtttcaaaaatagcggctgaagaaaagttgacaacgaatcatgcagatcatgtttcttttattacttctttgtcacttaactgaaaattgcaagttgcaaatggagagatctaatgtgaagcacataaaggttgaaaaacaatatataatatgttattatgatagaagcattttgtttgcttgtttcaggatttggttgcattttgcttggacatgtcctactcgatagactaaattaattaaatatttttatcaatagtacaatatctttcacattagagcgatgaagattactttttaatttacgctgattatctgtttttacattgcttagttcaaaaatagcggctaaagaaaagttgacaacgaatcatgcagatcgtttcttttattacttctttgtcacttaactgaaaattgcaagttgcaaatggagagatctaatgtgaagcacataaaggttgaagaacaatatataatatgttattatgataaaagcattttgtttgcttgtttttggatttggttgcattttgcttggacatgtcggcctactcgatagactaaattaattaaatatttttatcaatactgtacaatctttcaattattatagagaatgacgcatggaacatactagtatatagattttctttctttggtttgactggtcaatatctgatcataaaagattttttaagagttaattaggaccgcatatgagatgaatacagtaaaatttgtcgtttgagactttcaggactcaaacaattggatttttttttaatcaaatcatcagagaacggaaacaaggaagcaaagctataattttatacattggagattaagcatatgtatatccaacggttggattccaacctcgaataggtaacgcatgtttggctgcatgattaatatagcagcaaagctttgatcaaagcaacaaataataagactgaatctttaagttgagatgcaaacttgatgcgcatgtatatatggatattgtagtttgatagattatataaatattgcagctagctagcttgtaccctgaaatttctttatctaagtaccctaaatttttggactgaaagcaaagcagaagcagtaagcacacggccatcgtctatatattatggtaggaaagaattaaagtgagaaatgcatgaaagagaattaaagacgctaatcccaggtcccaacctatcttaagatatatacatgattccaaactagcaaactaaactgatcgatcagtaaacaggtcgctgctaaagcaataaacgagtggagctagagaagaagtaatgaagtgaatgagaaggtgatcgacctgcggcctgagggagagaagaggcgtgccgtggccatccatgagcagcaggtcgccggcgaaagctttgcggcggcgggagtagttgtcgacgcggaaggcgagcttgccggcggagtcgtagacggagaagccatcggtgccctggaagcctatgctggacctcttccacaccgtgtacaccaccggctgatctgccgcctgacgacgtgcacggccgccggtgccgccgccaccgccatgagaggggtgtatctgtatccttctcatgctagctatagcttgatgaggctggtggaagtaattaactaagtttgagagggagggaggaagctataggctatagcttatgttacctaggggaagcacaagctagcaaagcaagatttagttgggccaattagatagctaatcggtcgatcgatgggcgatgcaacgtatggacgtacgtggttgcctagctttgcctgcactgcagtctgcagattgggttaattattaatgcaagagagtgagagcagctgaaatgggccggcgaaaaggacatgcagcttaatttgctactagctaggaacgaatagaagtgaaggtgtagacaaacagtgcagggcacgttggattgggatttggcttagcgtgagggagctggcatgcatgcatcgccctacttattattcacaaagcagaagatcgcagggtgaccaggtcaattcagagtggaaatcagatagagaaagtgacaaaattaatgggcctgatttgaatagtagtagtatttctgatgggctttctttgcttctactgtgggagggagagcccatcaagatcattgacttgacttgacccggccccacagtcccacaaccattgaccatttgacccaacgcaactcaactgcttcttcctcttttccatctccatcgccgtcgccgtccaggaagagatagaagatggatacggtcgcgggaagcaagtacaggtttggtccgcacgagatagacgagcggcaggtgttccgcacctcgcccctctccttcgccatcgtcaacatccgacacacccgcccaggtacctagctatttcctctcctcagaacaaatctatcattcctgattgctctctccctctttgtttgttcatcatgctattccaatcttgcccctgcaggtcatatcctttatgtctgccaattatgtgtttgcacagctgctttactcttctctctcatttagtgccttctagtatctacttcacattgcggtaatatctgctctcaacttctcataccttattattattattattattataaaagagaaaaaacttctcttgctattcatcaatgaaatgtgcctctgtttcaaaagtaaaaaaggaaagaaagaaagaaagaaagaaagactctgcactgaactatataagtaatgtacggtatcggttcattgaaaaatggcagtggagtacatcacagtgctcacttgttttttgccttccgaaggggtattgtgcatttgtgctttctatttcaagacaattaatactacctgctttaccgtgttaatttctggtcgtgctaattacttcagttaatccctggtgacaactggcaactcagctctttttgcctttgtcctatgatggattactatgtggcactgcaattttgatagcctaagacttttaacgcccccccccctccttttccttaacttaaattatacatgttcttgtatgcccaaagcgtcttgtgaaacgatttgctgatcttagtcctgatgagacaagtgatttgtggatcatggcaaaggaaattggtgcacgtgttgagcagtaccacagggcttcttcgctcacattcacaattcaggttcgatttatcttgtaacctgtgaggtctttcactttgaatttaagaaatgttataactaaattcgtgtgagcatgacaagtatgatgttgctcacaaaattgtggtttcagatcacaatttagtatgttcgtaacattttttaatgaaaagttgtaaaaactaatgaaaactaactttatcttctattgtgtatgatatgaagttgaataaatttttcgccgggcatgaagttgaataaatattgctacttatcaggacggacctcactctggccaaacagttccacatgttcacgttcacatcgttccccgaaggaaggaagattttgagaacaatgataacaataaaggcatggttagtgatgctgcttggaacaactctcacttcatctgatactccatcaaataaatctgaataatctctctgttcataacagatgaatgcaaaaaatgagacattggacctagatattgaaagaaaagatagaacgatggaagaaatggcccaagaagccaaagaatatcgtgctcttttctcctagaaaatgtctatgtatactacttaactttgtgtggatttcactattcctctagcattcagcttcacagctgcattttacatattacactaatttgttgtgtttttatatcagatgattatactaatcgtattgtgcatactacctgatattctgttgtaatatatgtgtagccgttacttagtaatattgaactccttatttttcatctcatttattttgcattgtgtacatattttactgccagataatatgtttattcctttgtatatgctcaatgtattaggtacagagaacacttcttctgtaaatgataaaccaagtagtacggatcacaccagccctattcgaagggcattcttttgaaatctgaaatatatcatgtcagaatataatgcatatgagtaaaagctgtgtcagtactgtttatgtagcttttggggggtataatacgaggtattatggaatttttttgttgagatgatcactgcaacatgggactttatttcctgatccatgcgggaaatgaattgctttatgtaaagttcctgaatagtttctgtcttccaaaggaacccttaaacagtgacatttcattctactttatatgtaaattaagaaacagagtccttaagtatagaataactcttttgtaattcatacatgttggcagcccacctgtgacattgcccacaaatataaggaattacactagaattttgacataattctacaatattcggttgtattggtgtgctgcactagtttcagtctccccgtattcagcaatatatctactgggttcctctttcattctaccaattagaggctggatcctatgcatgtcgcttccagaatgtattatgtgaacttgtgaatataccaatggacgttccgttcatccttaactttttagtgatcagaagttagatagaagacttagattttgcaaaactcaaacaatgatttctgcagagttgctaaaattccttccaccttgatcaaactattcattttaatttgtatacttagttgttaagttgcttcttgctgatgggaaaccattttattccttctgacaactccgtattaatgtagcgcccgttccgtcgtggcgcctagcgggaaaatttaaattctaaaaaccctaattgcgaaatctatttctttgcttgttgtcagtttccgtgccaatccttgatctcgaatccccgatctatcgtcaaattcaaattccgaatccaaatccttcccaaatcaaattcctccacaaaagtctattttgcctcccccaggttcggtgggccgatttcctctcagcccatctctctctctccccccctcagccctcctctccctcaccccgcacgtgcgtcgcacgcgcgtgcgcgtgagccgacgccaagccgagcgccatctctctctctccgctttctcgttctctcgctctcccactccccgtctctctctccccggcgagccccgcccccgagttttgaatcccccgcgccgttgcttcccgcgcggagcgcgccgtggtggccgaccggccagtcgccgccgccgtcagcgcttgccgccctgtagctgcgcccttccaaaccgcccccgccgtcatcgccgtcgtcacgacccggccccgccaccaccgcgcatgctcccaaggattggaggcagagctcctcccactgcctcgtcgccctctctctccttccttcttttcccaaagtggcaagaggcaagtctcctttcccccttccttttcttcctttttctccccgccggcgtcatcctcccaatcgccgttttggccgcgaccgccgagcgccagctcgctccttgaccgccctaggtcggtttccaaaccgacattgccctcctattaaaccaaggcgccctcccttcctttccctctcccattctccctcgctccaccgcgccattgccgtcccctctgtctctctatcgccgaccgccgccgtcgcgtgtgccggaggagccggtgcgtgctaggacgcggaaggggactccgggcgctcgtcttcttcctcttccccagcccgaggccggagagatcactcccgtgcagtcggcctctcgtcatagcgccccgcctcgtctcggtagggcatctccccgttctccctcctcgttcctcctcttccccttagttttcggtagaagcttgtatagcctccccgtagctagctggcgccgccccgaccgctgccaccgctcgctgtgtgctcgccgccgtcgccgcccgtgctctatagcgcccgcatgtcgccgg

SEQ ID NO: 7603 - DNA, 6630 bp, Oryza sativa
ctcctctccgtgctcctctccgcgctcttcggtgctagccgtgtcgacgacgtcgagtccaccctcgcctccgcggagtcctccttcggcgtcgtccccggccgcgtctcctacaacgtgctcggacgagtgagaacagcaagagagacggaagaaagaagggagaggagaggggaaagaaaggtgacatggacaccctgacatgtggggcccacatgggtccacgctgactcagccgccacgtcggataaaaccagggtcaaaaccatcgaagaacctaaagtgaacggttttgtaagttgacggatattatatatctggttttgcggttaggaaatgatttcgtaactcgatgacaagttgatggacctttggtgttctttttcctagtagttattgaggtaggtaagcttgttttgacattgagttatgtctctcttaattaacctattgacagggagtagtaaaaagcagaggagcagcttgaaacaactcaccctcggggtgaaaatatgtaatacaaactagaaatataccgttgaattatgaaatgggcgcctaatatttgtccgcgttatcgagaataaaaattttactcgtaattcaaccatgagcaaaaaattgtctgggagtaaaattttactctcgatgatgtgtataaatctcaggtgttcatttttagatctaaaggtagtttacatattttcactacatatgtgttttctacaaaatatttttccaacaaacaccgtatccattttgcagtatatataggtgtgctgtacgtggagcactgcaccggttgatccgtggcgatcccggcgaccatacaatacatgatttgtctgcaaacacaaagctcaaacagatggaagttgttagacaaagctaaccattcctcgtagctagttcagatcagtgaaaccaatgctgaatcatcggataaaggagaatttgaatttttatttgcaaaacaacagtggttgctcaggcctgacagagatgtgttttctagggcgatgatcgagttgcatgtcggacacttacagacaggcagacagagtatcttcatcttatatattagcaccttgattgctgtgtgcttaatcgtgctgaaatgagtaccctcgatcacgtatgtttcagatttcaagttaattcagagtaggtttaggcgtttagctgatgagctaattaagctactaacattgtgggtttgtacctacaattcatttgcatttccacctaacaagtgattgtcaaatcaagcgtgtgccggcctgtgactgcccaacttgatttctagaccatccaccttgctgaatgctgatcatttatttggcacgtactgtagtattcaggctttgaaaggggatacaaacaacaacagtgttaggtactagtccaccaatagtcaaacaaaacagcggccttttctctacagtctagctagtagtctacacaaccatatccatacatcaaagtgggttctacagcaattaatcagatcacaccctaaaattaactctctaataagagagaatgcaaaaccagatttaaagcacgaataaattgtttgtggaactggtagatcaagaattaatccctttctgaagattctatatgcagttaaacattcagatatcaacatgcccgtgtcaggaacaatgacatccttaagcatatctagtcccaagaatctctgaaaaaaaaaacttaatacgtttgcaatcgcatcagaaaaccgttgaataattcaggcgcatatgcatattgatcatggaagagatcgaattgaattagcagcagcaagaggtgtgtggtcatggctgctggctggtgcaattggtggcgccacagtcgcaggtgtggggggagaaggcgcagacgccgaagggcttgccggggatgttgcagtcgatggcgtagcagcaccgggtgtccacgcagctgctcgcgttcgacgacgcgcagcaccggcagcccatgcacagctcgaacggctcgtacgccgccgcctccgtgccgatcgccgccggccggtacatcaacctcttcaccggcacgtcgtacttcatcaccatcttcttgtctggtcctgcatgcatgaaaatcaattaatggaatccgatcgacttttggaaggatcaccaagatgcatgatgaagcaggtgaagatgaaggtgtgtacgtaccttgggcggcctggaggaaggaggagctgaagatgaggaagacgaccatggcgaggccggtgagagagatggagacatgaggatcttttgccatggtcaattactttgtctctctggaaagaatggaagaacactgagatgcaatgcaaagggggaaacggttgggttttgggtcagatatactactactaatgaatagtactattgtttggcaataaggcaactcgacgcctcaagtcaatttcactcgtatttatataatctgcaaggcaacgcacctacacatgacatggctaattgatagctccaattccccttgaaaaaaaactgcacacaattttactaatatgcttaaataactagttaattgcatggatgcatgatggttgcaaattaatcaactcggaaatgaaaaatgtgacctgccaagcagcttggcaacaaagctgcttgctgctttcctgcttgcttccttttcagctaacaagatattgctactgcatacatgtgtcaactagctagcggtgtggctgttcaccatcgaaaactaaaaaaagaatcgcggatgatcgatgagatgaccagtcggaaatttctggaactctgtatgcggaaactagattcttgttctgaaatttcacaccattaaagcagagagaatatgcatgggccggggaagaagaggattaaaaagcatcagcgtttcataaagttaattagcagttgacagatgaagcaaccgttatgcgtgccagttaatgagagcgattgatgttcctttgtgtcaataccaaaggggaatatctttctttaggtagagatacgtcatttgctggctctctaaagttgcatatatcagatatcaccagcaaacaaatatggtttgcaatgcaaccttggtccttgtcgcatctgatctttgtatttttcgctcttctgattattttcttttatgaacttagtttaattcattctttgtcctccaaattaatttgtgtgcacagccgattctagtttaattcattctttgttctccaaattaatttgtgtgcccaaccgattctcgccaactctctagcagtaactagataattaaccaagtcacatcctatagagattttcctgtatgttggaacttggaaggatacggttttaattgttttgtgacgaaaaaccttgcttgtcaacaatggaacagtgcacttgatgatttttcttgaaaatgattgctcactgattttcatgcatcttttagttatgacatgataatgcaccaacattcctgtccagtcaggcagtcagtgcaccaacaatttgtgacacttgtttgattaatgagtggttcttcctttccaacttccttccaaggacgacacactttcagattcattaattattgtccttgcagaaaaagctataacagacacctttcatttgctaattgaaatgcttatccctgctctctctcaaaaataaaaacattgaaatgcttatctggcttgatccacgtcacacacaatcttttgccttaattctaaaaccatctcctaatcactccttcgacgcaagtgcgagtgatgatggtgatgatgaccatggctcaagggcaccatgtgaattacagtacaataagagtgtatgtatttttgtgactgaaaatgactaccactgttgtctatatatgcttattactactctttactgcagcattatactaacagacaggtggccatacgcttaacaattttttgccttaattctaaaaccatctctgaatctacttcagacagtatatacatggttatagactcagaaaaataactgctaattaatttggtttaaaatatggttaattagactgaagttttcagttgaaagattaagcggaatctatggttactgtattttagcactctgaagtgctgtttgttatcagtgtcccgactgatgagaccaaacatttatcatagtgctgcatcaaagtcggcatctttagaattaggaatggagtaacatggtggatgacagatgacaagacaatgagggctccttgttaattacaaaagcaaaaaaagagaaaagataatgactggttctgtatacaataaaagaacagaaagacaatgagtgaaacagagtgttgacgtgggaaaacacaacacctggagtgcaaaactgacgcagccttgaatacgagaaacactgataacatcatgataaggtatataggaccaaattatacaatgattcacagcagcaatacagatgaccactacgtcaggaaaacaaacacaccataacaccagcaatttaatatcagaaagtaaagctcaacaaaaaatgcacaaagaaagtaggcaattcatggaacaagatacagatgacagacaacgtttcagtagcatagcaaccatcgttgcactcttagttcagcctttcatttctggggttaaaccttgccggttttggcagggcaaaacacagtcaacaacacataagaccactgaaaattagagggccttacaagcaccaccatgcagagcaaatttacaggttgaaaactgggggagaaagccaaaaaaaaaaaagaaaaaagataaaacccaaaagcacacagcgcaggtgtgcacactcacgcaccatcaacggtttagacttgcaatgtacaactgaacctattccaggagcaactgaaacagcacactctcatctcaccctgcatgctgggacagcaggggagcacttggggttcggaagcgccctacagtggactctgttcgtcattagtctgcggtttactctgtagctcggaaggccactgccaagaacagattgaacagctccatcacttccaccactgccctgcaatggttcaagagtctcaacgacgtcgctcataagaggcctcgcctttgggttttggctcaagcagtagtatgctaggctgcaggctttgtgggcagctctaactgaatactgtccctccagttttgggtcaatgatttggagaagcctcctcttgtcgttcagcttcgggagggcccagtcaaccaagctatgctccctgctgggccgtgacttgtcgatggacttacgcccagtcaagagttcaagaaggacaacaccaaagctgtagacatcacttctagcagtcaagtgacctgcccaataggtatatatacatcagatgaaattgcaagggcaaaacagaaactgcatacttgcatatcacttagtaaactttctggtcacattttgatgaagggtaataacgctattcagaaaaaaaaaatgaagaaaacttaaaaaagataaaatgaggagagtaccagtcatcacatattcaggggcagcataaccatatgttcccatcacccgagttgatacatgggtttgatcgccttctgggccagcttttgccagaccaaagtcagagagtttagcagtataatcctgtgtaagtgcaaataaaagataaatgctattatgaaaaatatttacatattcccaacagatgcatagaagagaaaggaaaaaaaacaagatattggcaagaaatgctactcaactgagtccagcagaatatttgatgtcttgaaatccctgtagataattggcctttcagcattgtggaggcaagctaaccctttggcagctcctaatgcaatcgacatcctagtagcccacgatagtggagtagctgtccctgagaagaaaaatgaaaagcacagacaatgtcaggaaatttcctactctcgaatacaatttcaccacaatgtacaagaaaaaaaatatagttgagcataatctttagtcagcctaatattcagtgttgggcctatttggcatataatttacttaacctacaaatgaattgatgaaataccgtgccaacatttcaaatcatacatgccagtattcaatagtattcatatattttggaagaaaaaatacagaagatatttagcagataagtatgggtagctcgcatactctatgcatggtagttaactatcacgaatgattctattaagtataccaacaaagaaaatcattcagatggttaactggacactttgggcaatcttgttaaaaacacgtcaataaggttttccaagaatgataaatatgaagagggcctaaacttactgagggtctagcagcgaacagttaaatcggttgttcagtcaaaaagctctggacaatttggaatccttgtgaacagcaagtcgaaatgaaatcctaccataccaggttctagagcgctgatcatttgctcatatcaacgatatttaatagaacaacgttgcaactctattatccacaatatggtcaacttcagctatggtgcttgattgcattatagagagaaacatatatatttaaaaagtgtgatcacagaaactattcagccatgatatcattcatgaagtga

SEQ ID NO: 7604 - DNA, 2880 bp, Oryza sativa
tctgacaaagaaacaaaagatgagttacttcttgataattcttctaacataacgacaagaatgaaaaggtaatgaatttccaagttaataatatgcccggaaaactggcaaaattgcttagtcaaattcaatatatcatgtttcgtttatggacatgttgcttattctcctttaaaaaagaaatagaatttcacctattccgagcatgtgtagatacactgttctatttgtagcatgtgtagatacactgttctgtttgtaaacattcaagaaatatgctatttaacagtatgactcagtctacatgcattcggccaatgaaattaatactttagccttcatcaacctatcaagtgtgcacatttttcttcatgatacaagcccaatgaatcattctaactatgacttgtagcttcttgagaaattttctattccaaaaagggaacaaactaagaaacatgaaagcagaattttgcatggtatatttatttgctagcgtacttgttaacttgagtataactaaatgctgcatgtgccattgttgatttgttgtgaaatacatagttagcatcaacaaatatttttccataatttacataattaagatatatcatgttcttgtacgagtaattgttaatgttccgcgtatccatgtacataacggacatcagcaaccatagtgaatattgaacaagttggcaactcacaagccattctctgtgtccttgatgtccatctttgttgagcaccttgactgcaacaggtagtgacttcagaccaaccctgacattctcatctatgtagcccttgtaaacagtcccaaaccctccttcaccaagaacgtagtcagcacggaagctccttgtgatagtctcgagttcaaacaatgtgaagtcaatcacatcattgtatatggagatgttcttggcatcttcaattttcctaggtgttgaaggatcactcatatctgatgagatgcgggtgtgcttcctctctgcaacagcattcttgacaggatgttgtaacaaatggagctgctgaactgagaagatgacatttcaacaataagaaagaaaaaatagttaaggtataaacgaattaaggttaccagaaattctcgtacaaacaaaataaaaggcaagctttttttttcatattgaattttcagcattcacagagatggatggatgaaagagagctaatcctgctgaaatacgtttagggaagctataatcacaaactaacaagagaactactggaaacgagcgttggcgattcctagcaattataatatggtattctacctaaaaatactgtaaaaaagtacatacatgggcaagttgattacagaaagaggtaaacaggaccaggagaccagatctactgcagagttgcatgcaataaaaaaagggctccaaattgcttaaacaatgcagcaaactgcaagaagtgattatgtttttccaacttgcaggatcataactctattttctgttaaactgaaagtcaacagtgcctcagtgaagcagagagcacagaaattgcagcactattgggggaagtgcctgtaaattgtcccgatgaacataatgaagcagaatttctgatacagcaaccaagaagataaggatatgcagcagagaagaaatcacagagcaaccacaccagaaagattaaggggatgagggcttccccgcaaaaaaaggaaaaaaaaagatgttgagcaaatgtagactgtaaaccaaaatcccagaatccccatatgcaacaaacagaaaaacaatgttgaacattcatatgcaacaaacagaaaaacaatgttgaagatttggagcaaatgttgatatcagattttaatcaaacctaaaccggagagtaccaaaatgccgatttggaatagccctaacaagaatgaacatttgcaaccaaaacacccatccaaaggtcccaataacataagtcatcatatatagcaaaaaggaaagacagtgcttttgtcaattccccactgaacccaccaacctagagtcctagagatcaggggaacccagaaataaccaccaagatcaattttttttgatgaaattcagatcatccaacccgagatcccatcccaacaaccagcatcccaagaaaacaatcaccgggaaatcccccaagaaatcaaatccgaggaagcgaagaataccttgggcgtgcgccgcaacgacggcattctcctctcgcgtcccgcagttgcccatctatctacttctcctcctgatgttcttgatggtggtgggtctgtctctatctcttgtagtggaggcccaagctctcattcttgggcgggggcggggtgggggcaggcgatgcctatgccatgcgccgccggtagaggcgatgctgcgtgctcttcatcctccagtggcctgtgggggggcagcggaaacgaagcttgctttggtttggtttggtgttggtttgctttgctgtgtgcgcgtggaagtgggatggacggtggtgggagagcgagaggggggcagcaaccgttaactggaggaggaagagaagaaaaggctgtgctggtgtgcgtgagattgacagacagagacagagatagatgggagcaagagactctgctctctgctgctgtttggtgtgggtctcctttaaaaagcactgccatttcactacactatggattggttggttaatcaccttttaatactaaccacatattaacaagtttaataacccataacggaattgctaaatggctgtcgaatgattttttgagctcaaaatcatgcagattactaaccatgggatttgctctgcgattcgtgctccggcgaccttagctcttctcctccaactccggcgacaccttctccaact

SEQ ID NO: 7605 - DNA, 3421 bp, Oryza sativa
cactcactcctcaaccaaacacccataaaagtagattcgttccatcccatcccatcccatcccatcccctcaccaaacactacctctagcttctggtgtttggccatcacgcgtcaatgattaagtatatcatctgtgtcttaataattagcttccgcagatctgtttggccatgtcgacaagctggcacgattcgccgatagtaggtttaccctgagcaggagattgactgacgaagctacaaaggcatctgtttcccttggacagctcaaggcctttgcgtgtcgctccgcagcacgcggcaatgacagcaggatctcaactaggatttgttggattgaaagcatataaacagcgatcgctaattgtgtttaatagggccgtgccgattagatcgtcacagctgggacttgcttccgactctgcttgcagtgtgatcatcaacaccagcaaaatcaaacccctaggtgcccgggatttgagcaccatatgcctctctttctcctgttttgcgagcaaaatcgatctcaaaatgtctatctaactctagggcgtgcgaatgtgattgtgcatcacctagcctttttatagactttttaatgtcgatatttaatttgattgatgtgcatatatgctagacaatgaacctgactgctgcctgcaaggatggcaaaaagcgcatattaatggcgtacgtacaaatgtacaaataaggcaaattaattataattaatacaaattgattatatttaatgccaaaaagatacactatccccatttctcagggttgctgtctttagagcaaggctaataatacaaccgacctgctagttagggcatcaccaatgtatatgacaaaagtggtctatatagatgggacccatataaataaactttaactatagcaatccttacaatgtatatggatacaatgtaatattaggagaagagagagaagtagagatatataatattatttatgtcatatgggtagtccatatgcatatggataccttttgctatttcctttatatggactagttgcacaatgttactagatggctgaatggaatagtttattccctatggactacttttgtagtatattgtggatgccctaaggtttttttagccttctcttatcctactcatataatagttagctctttacaattaatatagagcccacttttttctctcacagagtttcttggttcttgtgtccaagccgactgtaagtttacagctcgcttctcctctctctcctctattctctcatccatctcagcatttagccggcttatagtctactattatacttgctcttagcgagcacgcggttccaatgaacactttactttctctcttttatgttttggattccatctcttctttctatttgccatttacgacccgagaattctcaagtagacaagataagtcacaggatatgtcgatcctcccggtttatttctcgttcacaatgaacctagactgctaccaaaatggcagcaagtgctatgatcgttgctatcctacttaatggcgcacatatgtgtgaaaactgcaaataatatgaattaattggatttaatgcaaaatagatatgcctatccccatccatgtttcgcatattcaccataaccctcggctcgtaggacggagcagactacaagcgacaacgtactacagaggaggcggcaaaaaccctagattttgtttttgcctatgtgttgcgaggagatggcgactcgatttatataaagataacaagacacgtaatcaggatacctgcatgatctccataacatataaccgaaccggataagtcgcaagtaacatatccggactccacgccgctagctgcctagctccatgcaccggattattcagagtgttttcaaaagactatgtttccaaaaacaaacactaaatttcgcagcaaaacaaaacagtaaaaaaaagatacatccacgcaaggatgagaaactaattatggcggaccattcacgctcacgtcgcgtacacgcgccacctggcctagccaggcgagcgagcatgtgtgtgtttctcttgtcctctccaccacacatgcctcaacctaagtggctaggagagcactctccctttgaaggaggtcaccatctcatataataggtaaggttatactaaatatcctcatgcatatatccccatgaggtgggattttgtgatttttcaaagaattaatctccaaatagaccttagcctatatatgaattctaacacttccgttgtagggtagataccagtctcaaattgctgttctccataggatggcccatggctagcccccatagaaggatgtcgcacagagacgccgacgtcacctatgatgccaccgaccaacttaatctcactacaggtagtgacggcggcggcaacgtcccagcagctagacctgtcgccactagcctcggccctgctagctgtaacgccccgattttcgttcgggattaaaaatcatttaataatgcattttttagaaattaaataaaagttaaagcaatttaatcaagtgaaataatgggagaattaaaattttcctttaaaaatcattggccaagaatattttgtaatattctttgttacctaaaatactctccggatttttccgcgaattttcggagctcaagaagtaattttaatagcactaagttcattgaatcaattaaataaaaagaaaacaaattaaaatcatccttcctctctttgggcccctttcggcccaatccctcctttccccttctcggcccgcttgcccctctccccttcccctccttccccctctcgggccgtcggcccagctcgctcccccttcgcaagtctattttgcctccctctcccgtctctctctccctctcttcccgacaagtgggacccgtggaccccacctgtgatcttcctcttcctccttcggccagccgccatggccaccgaaaccgccccactctgccgccgcgcccatgctcccgcctcctccgggccacgtcggccacgcccgcgcatgcgccgcacctcccgcacccactctccctcccgctcgcccgcacctgtgcccgagacggccgggattcgaaattcgaatcccgcctctctctccacctccacctccccacgttggccggcgaaatcgggccactcccggccgttcccgacctccccgcccctataaaatccatccccgcatcctcctcccctcttttcctttttccgccggcctctcccgagctctccatcgctcccgcaccgtgcacgcggccgcctctaactgctgctcccactactccggccgcctctaaccgctgctaggttcgtcgcagcaccgcaccgctaccgccgttgggttcgtgtggtcgaggtccacctcgtccacccctcc

SEQ ID NO: 7606 - DNA, 10263 bp, Oryza sativa
agcttgcatcaagagcaaggccgggacgtggcaattaaggagctctccctcccttgttaagctctcgaaaagcaggcagatacgatttcctgcgatctgaatatctgatcctccttgatcggatttatagagattccatctcattacactgtttgtactaaactcttaactttttgtaataataacgagtggagtacaatggcaggtatgcctccaagtaatagtatagcagccaaaattgcatggctgcagaggcgtttctggtcagcaatgtgatgtcgtgtatcgtccgctacttgcatgtagccgttataagttggtcgcttcttcagttcagtttccattttcctgcaactattctgaacttctgctcactactcttcgctagcttccatcttgatgatggcaactttgtccgtcaaactaaacagatcatgttcactagtacgtgccatcagcatcagacttggtgttgatcaagacaaggtgatctgaacttctgaaccatggaatggaatgaatagttcttgcacggataaatacattcacaaagctacagtttgcaatattgcaactctgatccactgttgataatagtcattgatagtggtgctaggctcatctccgtccacgcaaacgatcaatgcagtactcttccaagaaattagtgggaataagaaaagtggacgtggcttgggacttgccacgtcggaggatatggtttgggtcccacaaaattccgtacaccagttgaacgaggacacgtgaggaaatggtggggacgggtatcctgtgatccatcgggataagtccaaaagatacggacatctacgaacgaattcaggtatacagagaatgagaaagttgaagagatgctggagctttctcctttaaacgaaagttgaaagatgctgtttgcttgcactgatgatctaagctgcatcatgttcatgtcaaagaatcttgttttgcttttcattcaactttgcacaatgaaatttggtttttaatcctagcttacgaacaagatctaattcaatttcgttcaattcgtccattgcctggtgtacgttgcctgcacgtacgagatcgaagataaagaagaagcaactcgaatcgtgtccgacgttggcctatggtgcaaatagtatgaccccacatgtcagagaaacaacaaataacaagccggctgctctactacttgggctctgggaaggatttaggcccacggccacggcgattggaaatcgcaggagcgcatgttgctgctttgtttttgctgggagagagtttagtaccacctcggctattcagctgggagaggcggtcgcgagagctataaaaggagccggagggctccgtttcaactcatacctttctcggccttttggctaagatcaagtgtagtatctgttcttatcagtttaatatctgatatgtgggccatgtgtccactttgatattaaatttattttttgtgggggagggtccaccacagtggcttgccactggggccctcgcgtgtcgcccaggcgttgcactacagcccgggcctggcgcaccccaaccaaatcaatcttaaatttgaacgacaataatgtataatgtctttaaatcggtttcaaatctacttctctgattaagtttaaaattttaatttaaaaaattagtctaaagaggtgctctgcaaaatattcatgatttggatttgtagtgttcttttgcaaaatttgcctccttccattagcgcaggaggccgcaatgaccaagaaaaagccacacccaaaatgaaaatgttactacttgtacaatagaactagattagcttatctaataaaggagtgttaacactttaatctcttcacctagctgtagaattttacattttccctgcccatcttttccttgtaaaatgcattcatgcagtaacaagagcaagcatgcagtttgatgatgattcaggaggcagcagcgtaggtgacagatgacgccttgtgcctccgcctgctgctcatcatcatcgtcttcccgccaccatccgacgaccactgagactgcgagtgagagctcttcttcgtcttcgtcttcctcctcctctccgctccgccctgcgcccccaccccgagcatggcgatcctcccgatccctcgcgagatcgacgccagcagcgcccggccgtgctccccgccgccacggccatcccgcatcccctgcctcatcaccccctgctcccgctccagctccgtcagccgcacccgcatccgcgcgatctccagcttcagctcccggttctcccgccgcagacacgcgtagttgtcccgctgcggcgacacgcacgagctcgccaccccgctgccgccggtcatcatcatccgctgcgacagcgacccgccgcagccgtcgccgccgagggaggtggtgtggggggtagttgacgacaccgtggacttgaggcggagctgctcgaagtagaggacgcgcaccaccgtctggatggggaggcggtcgttctgcgccgcgtggctcgacgcgtcctgcgacagcttctggcagtcgatcagcttgcacatcttcttgcactccgactccgtcagagatggatgagcctgtttgttatcacaattcagttttttgtcaccacacacagcaagctatacatcatcggacactatacagattgcaaatggttctaaagattacatccagaattgaaagtattcgtgccacattttcatcaacattgaataatgttgtaatgctgacagagtggcagttactgaatttgccattggacataatcagaaagagttatcaaggtttgcagtacagttagcttaccttcaggtatatgtcaatggcacggtagagtccgtcatcaacaattctcgcatagtccggtaagagttcgatgagagccatgaacttctgcagtttcagatatggatctggtgctatttctgcaaggtaaccatccatcagtcttccaaccttcagaaccgagctgtggctcggagactttagtccatcatcagactcatatccgcaaggtgataagttccctgaatcatcttcctctatcctttgcaagaagttcaccaatatgcgatggacagtgtcgacatcaaacatcgagtcactcgtctgcgttgcagggatcagaagatcatcaagtgatgccatctcaagctgaagtccaatccttttctcaacttcaatcctataatctagtcctgcatcaacttctattgccattctcagcatgccaaacaagaatgacaaggtaaccgatgtgatcttttctgttgccaacagatcaatgagcgtctccacaatcactcgttggttgtctccaacaagaggacctgagtcccatacatggcgcctttcgatacccttcagagctgtttgagcatagtgcacaatggatgtgccaatactctctggcctcaccccagttcttctcattgcgacgataacacgctgataatagtcaattcttagtgcagaaagatcctcaacccaccaatcttgacaatgcatgcgcaactttcctgatccgacatcacattccaaatgagccaagcctgaaaccagctgctccttgcttgcattcatcgcaattgcatcgacgcacatgtctacaagtccaacgtcttccactgttggatccaatccatcacaagcacataggacttctagggatttatcaaggttcttgactacaatctcattcaagtatgtctccgtccgaacaatgagattctcctcttggtactcttctgtcatttccaaatactctgcaatgcaccggagatgagccacattgacagtattaatttcaaaattactcccataacagaacttggcagcaagttcaaatgctaaagctccccctggtacatttactagctccaactttgagagatctggatccttggattcagctaccattcttcgtattcttccacacctagagactagagggaactgcaaaattggtacagaagtatactatgatcccattttgcaactttacttcagactatataatcttatattagttatgcagagataaatatgaaatacattttccttgctaataccttcctatgaaagctccttttcaccaaaaaaaaaaaaactccatatgaaagctcaaaaagcattactaatgtacaaaagaacatatacaaccttaaccctgattttcccgttaaccaattactgctttgtctccaattacacactcttatattgactaacaccttcagcctatatgatcagaaatccctgtcgacccccactaagaaagatatatgccttttgcagagcgctacatttaagaaattgtgaatattgaacactaacctacagtacaaaaaattatatgcttgtataattatcacatcagtaaggatatacattatgatttttatgtccccaaattgtaataaggtgttcacttcaatcacattggttctcatgttaagcaaattaatatggaagtcctactccacttataacattgtcaggtaattaatcttcctgcaaagacaatccaactgcccaactgagcaataaccccccaaaatatacttggcaggcttgtgcagtagttgatgactaatgataaaaaaaaatgcaacaggaaaaatgacaggctacagagaatgggtaagatgaagctattgaaatagataaggcaccttatgtagtagaaaagattggccatccaccgatactgttaaatctccagcaacatcagaaaatatcctgcacaacaaggaacattcttgaagttttagacaccaagaactgcatttgcatttgcagcatgtgaatatcaagtttgatatgcttctcatggtagttttgctacactcttctgggaacacataagaattgatcacatccctttttacagaggaatggaacaaagccatggtaactgctacagaaatcaaatagctggtgcagattatttcagtccactaagacatactaccaatgtaggttccaatcacaattcacaaatcaatcaaacatttcgtccaaacaaatcacataagaagtagatcctttgagttaaattgctaacgtttgcaatttttttctcccaaaattgactgcattttcttttaggaaagagagacagagaagggggggaaaaaaccttcattgacttgttcagaggttgagaaccagatgcagcataagaaaagagaatgctgaggtagggacctgaatctagacaagtgacgggacgagataaaaaaaaaagtgcagacgttttgtgatgcccgggaccatccgatattccgatgaacatttttaaggcttgccactgctttcttcagtaatacaggggataacttcagatgtcatctgataatctgaactctgaaggtagcatttgcgagaaaccagtatttcagcgggttcggagaaatgaactccgacccccacctcccgattccagtatttcaggggttcggagaattcgactccaaccccctgttatttttcaagggattcggagaattaaactccgaccccacttggccgagctcgaacacctccggcgtggcggggctgagattctcctaccaccattacacaaggcaagtgaccctctccaatctcctctcctcatggagtggctgcacctgcacctgcacctgcactgcagcagccagcagggtctatgcctttctctgcttctttcagagtcccagagaaatgtaacatgaacaatccaaacttgcgcagcaaaatgaacaaaaactagttgcaactgatctgaactgacaaaggacaagtttttgccaaaactagcaaactataggaacaccagcatgcactcgccattgcattttgtgcaaaagaataaaccgcggcaaaaccacacccgagctcagaaatggaagggaaaggaacagcattggtacaagttacctcctgctgatggggttgcagaagcgcggcgaggcggcgagcttggcggcggagaaggggaacgacgcagggctgtcgctggccagccccattgctcagcctcagataccaaaccctcctgcttcttctttcccttccctttgtgtagaaaagaaaagctctgggcaatggcggagcggcgatgagtgaggacgaaacaaaagaataacggatgtgtggcctgccatcattaagatactagtaatattttaaacaaatcattaagatactaataattcaattcaatgacagacattcttccaaaaatccattctttaattctttcgtctacttttcttcttgcacattgcacatttgccaaatttgccaataggcccccctgtctggctgtctctgctttccctttcttctacaggccactcagctgcatgactgcatgtctgcagataggaagaattgcatctttcaaggtgtaaattagcaaagagggtctgtgtgttggattagctgagaaagtgacactgatggaggaacagttggctgactaggggacaaaggctggtctactgtcagcttgtggatgcttcaagaattcagtcttcatctcatgtggccatactactagtgcctttgcttcttgttttttgtattttagatgtgttacattctaacatttattctttcttttctccttaataactaacttatggtatattttttactggttcccaagtatgttatgctctgtatctgttttagaggtgaaatttcacaatgtttcaagtgccatgtaactctagaaaatccatgctactgcaatatgtagcagcatgcactagagagtggagagaggagtggggttgaaggctgtcggtgaaggaaatgattcggatgctttggctgccatggctccttgtccactgatctactcgtactagagtagagagaatggacagctctaacttttcttcctttggcttttacttttgcttttgcagagaggatatcgaggagaagagctactagctttgatcgggctttgtttggtcaggtccaccatgagaaagccacaagacaacccgactcgattactcagcagcctatactgcttgttcatactccattgccggtcagaagcacgaaccgtgccattgatcatttcctctcacagattctttgcattcatgcttgtctgcctacagattttgcacatcaagcaagcatccaggctactgttgcgctcgtgcaaaacttaccctgttatttgatcatcgagaatacatatgatccaagcagtgattatgattcacttgatcatcagtctctctgtccgtgtgtgttatttccctccctccaaactttctttgtgaaaaatttcttttcagagatgagatagatcaaatggggaaagtacagcaaagtaaaatgcaaatgtgctaaagctttgagctgtttttgctgctgattgatcgatgctttcaaattcctttctgaaaagcaatttacatttgctacaaatactaatagcgctctgtgagggtcatggctctttaagttgtcttttctatatatggcaccatgtaatatcacaaactgcatatactactgtaacatgcctgcgcgtggttgactgtctccttggcatgcaggcacaagttgatcatggcagtggggagtaaaatgttagtgggctggacacgttgagacatgttggcacaaaattcgatgaaagtaagagcatattcagtagtatatgataagaaaatgtgtaaattattttatgaactattgcgacgatacggattactcctctaaattacaaaactaaatatttttcaccctcaactttttataccggatattcttcgaccttcataagaatgacaaaataaaaaaaatatctcgatgtatttctagcctgttcccctccttcaaaattgatattactctactatgcaagaaaaggaggtcgaagcgtggaagcttcatgtgtatcgtctttacatgcacggtataaagttagtagtatagatttgagctgcatgctttaacgacctcgaaattggatcaaaggcttgctttcactatctactcttgcatagtagtatgtgattaattgtacttttgtgtagctcgggatctgagattatatattattcttctgtatgtagtgcagtcgttcatgcagtaccgcgcgtgtataggagaaaatcggtgcatccattggcgtgcatatgtcctagaatttacgtatattacagtgaaattggttacttttgcctagatgtacattcagaaatccattctatgtgacagcttataatcttatcaaaatttacagaaaaacttgggaacggagtcctgtagacatcggataacttctcctagtaaatatctagccctctcttttcacaccaccgattcaatcttatcctctccattatctcttctcttaatttcctctccacacgcgcacacacacactctctctctcacactactaccctcatgagcacggaggcgacgatggcggccggccgtgcggggtggcacgtcgggcgttgaggaagctgctgtcatcgccgccgccgttgctgctggtgtaggtgtgggcggagtagagaagatcgtgaagctatttatggggtaggtgcctgagcacatgatgaaggtgaagctgctcaccatgttccaggatgtggccatcgtcgacaaggtcaccgtcatcaaggacaaggcctcttgtggtgtggatctgtacacccagatttaggcttgtgactctcgagctcttacattggcttgtttctaaggtttagtttggggttttctacatgttatatgggtgtttctacagttatgatgactttttattgagctctttgttgatttttcttgagttctctcttgatacatggatatccttttggatagtctagtgatattctaatagtatcatgatactctagtatatcacgttgatgatatcatgatacttaagtatcatacatgatacctaacaatatcataggtgatacctatacaattatcaggcatggtacctaagtacccgatacctgctacccaggtatcatacactcgataccaaggtctggtacctagtacctaggtacccgatacctactaccaggtactaggtatcggatttggtacctataggtatcaggtctggtatcccaggtatttggtaccaagttgaggagagaagggatgcatgtcgttgccttttggctgccagcgatcgacatgccattggctcttcttctcttcctctcctcgatgtctccctcattccttgcagagttgcagttgatgtggctaagcgaggaagcaagggggagcgttgctgcttcattgtgttacacgtagttgcttaggcaggtagagaaaatagaagggttcattaaagtgtatcattataatgctattccgtactgtagcagtcctccaaaatttaataacaccaaaattcgaaatattataaatcacatataacaaaataggacttgaactactcctgttagcaacggtataagcctagctaaataattgaaaggaataagttcacttgaggtctctcaatttatcgccgagttcgaaagcataaaaccaggtacaacttatccctcaacttataaaaccgtgtaaataacgtccctcggcagtattgtgtctggttttagctaacgtggcgtatacgtggctcatttaacgaggtcttcgttccacgtgcattgacgtgacacttatttgatgttgaaaaaaataattaaaactatgagaccgacatatcatctacacaagaaatacaaaatggtggggccacatatcatcctcactcctccatcttctctatccctctctctcttcttccagcagcacggcgccgctggaaaaccgccttcgccgcctcggcctcgagcgcgtcccgggcgtggtcctcctcgagctccgcgaggcgtgtggccggcaccggcggagcaaaggagtcattagggagctctcgcttgcctccgcgaagccctcgcctcgcgccgcggtggcggcggctgcgacggcatcgtcgttcgcgtactccgcttcgtcgctgcagcggcatcgtcgcccgcgtcctctgccccgtcgctgtgggggaggagaggaggaggaggagggtgggggtggtgcgctccgccgtgcccgggatcgccgcggcggggctgcacaactacgtcgccggctgcgacgaccccaccaaactggagagcagcgaggtggaggccatcgtgagcgagtgttggatttgca

SEQ ID NO: 7607 - DNA, 26238 bp, Oryza sativa
tcgtctgtacttgctgcatttggttgtgtgatttttgtttttactcatttacttctgaaactcccatttgctgttggaatgctagtaaaacttttgttctagcttgtttgcgcaaattgccatgcctataaaattaaaattataaatcacatattgaatgtgtctctcttactccgtcaaataattccttttactgtcaattattcttagatacggcgttagcacacaggatgccctctgcccggcccgccactgttccgccttcttcttgcagagttgcagtgcaggggtagagagaagaggtaggtgtgagaatgacatgtgggtcctacggttttaattatttttctgagatcaaattgccacatcaacaccacgtcaatgccacgttagctaaaactgggcacaatactaccgaggatctcgtttgcacggttttgtaagttgagggatgtgttgtacctggttttatgctcaagagacgaatttcgaactcgacgataaattgagggaccttaagtgaacttattcctaattgaaaaggacgtactccagtttcggcccactaggaaattatgggaagcaagtcttacggcgcagaaaagaattgggctcatggcaactatgataatctagggctccatcattatcattaactaagttaattaaatgcacaactacaccgagtccacgatcctcactgtcttgttgccactagttgtggaccacttcacctacactctccatttgtattaaaaaccgtacaatacctgggcattaatagtttcagatagactaatttcaaaacaattgtctcatcacacatgctgatcacgactaatctcctaacaacctcataatcttcaatccgaggttcagttcatactactactaccattgttagtcaacgatttatcaaatgcatataatctacctaccaagtaccaaccagtacatatggtaaccttactcttcaaaaattatcagaagcaggttaacgccttttctatttgaatcttgatggaaacagtagctctgaagctgtgccactatcctgctacccaatggttttacagtcgctccaacaaaacgtgtcaaaccagctgcagtggttaattaacacacaaaaacaacagctcatactccaacacctgatttaactaaacaagcactccagtacagcattacaaagcgaatgcaaccagtcacattagaaaacacgcataatcatgaggaaataggcggccacatgatctatgagctgtgatcagtttgtgtgacagcaaaagattctgcttagctgagacgcaccaccttcaaaaattacctgacacaaaacacaaaaactaccagcacaatcaagtaattatacattcagttcagttcagccatacattcttatctcccattacacaaaacactccctctctagccagctgctggtttctccagccaaacaagaggcttggcacacttgttttccctaggtccctaagcattttgtttgatccatttcagctggctggctggcatatctggctggacctgcccttcagttgtaaggctatcaaagatgccactcacatgtgtgcagggctagctaattaccctagacacatgcttgtcaaagcagcaagtgttactaatttactactacaggttgcttctgccaaacactacaatatcaccacagtacagtacagctaaaaaggaactttcagagaatgtgggcacctaatttgaattgggaactggattccatcaatacaagacaatctacaagcaacagctaaattcttcatgctagcatgatgtccaacataaatttcaagatgcaaaaagagcagctcacgccccctaaaaattcagagcattatccagaactcatttgacagattatacatgcgctcttttgatgtgcttcgcttttatgacacattttgagctacaaaactacaatcgagttcagtatattttcctctttcatagttcagtgaggacaataagaaacaaatgaattatgtaacatattgccactaatttatacagatagaacgcatattgtcttcctcattgatcatccaaatccccaatgacacctctacgcttgacaaaagtagaccaaccgaaattaaaccaaggaaaaagatacggacttattcattttgctaacagagctttcttcaatccctctgtttaattcatcgcctgccatcagattatacttataataaccttatttttctgtttcaaatgcttaaattcaagctgctaaaagagaaatatgatcaacagaaactcaggccaacaggaactaaaaggatatcatattagttctgaagaataattctggtaagtatcgtgtttagacttctaatatttctttagagattggccataatgtctgacctagaagaagataactaggaagaagatgatggaaatttgtcacagcatacagactggtggttaaaacaagcaaggatgaaatctaatttatcagactagttatcaaatcaattaaacaactaaacatgtacaattgtaccttacaaggtctctaaacatgaggagccaaaatacacaaaaacgaaatcgcttaagcttgaacgaatttcactgaagtagcaaaatgaaatgcacaataaaattccctcacctttattgccaagcctatatccttttgaatacagcaatccaaaaaataagggattccaaatctgacacaacaaccatttcttccccattgcttgcttggagatgaaaagagctccccactatgaacatggcaattatgaacatcaacatgagccattgtagaacaaataaccctccaaacaaaactgttaaaagaatgtgttaagtctcatgagccaagactatgccctacatctagcaatttgtgccgcactcattgatatggaacacttgttgcctcatccgaccgaagagcaatcccatgcttgccagcataactggttacccttgttgcctgaattccgctgaaatgtcaagaaaacatctatgcaacatactcgctctcaatcaccggttgtgttcttgtccccagtgctacaggcgcttgtgacctcccaacctgtgccatacgcaatgtctccccagtctctgcattctgttccatcagttccaatttcttatctcttttgtaccttgccaaacaaaccacaagcgacgccaacaggaccaatgctatgacgcccccaaccacgccaacagcaatcttccaccccttggagctgcccttagaacgacctgtaggagtcggtattggcggtgtaatgttgcctgaaggcactggaccaggaggaatcgcgctagagttcaccactatcgagaaatgccctcggcggtacgtcgagcacacattgcttgcctctaagtcccggaattgtggcacaccatccaaatcaaaccacacgcaccgaggagctggaccgcctgccggcaccgatctaacatcactgaaatttatagaaattgggctcccggaggcgacaaagctcagctcctgcaaccccaccgccgacaagttggccgcgtcgtagagaagcagcccgagcaccggcgagaggtatgtgtacccgggcagcgggtagtagtggtcagaccaattgccgagattgtggtagacgagcaccaccctctcgacgtacggctgcacgacgatgccggtggggacggtgaagtcgaagtagtcggagaaacctttcctccgcaggctgccgctgcgaaggcggaccgcggacagggcgacgccggtgaggttggccgggacggtggcgttgtagacaatgccagtgtgcgggtgcacgaaggcccggtacgcgtggtcctgcagcattgcgtccagggccctggccggcgacgacgcctgcgccgccacccgggaagtggccaagaagagcaggtggaggaggcagacgcaggccaagaaatccatgctcctgcagggggatcagggggagtggagcagcagcagccaggagctgaagaagaagaagaagaagaagagtagatcaggaggaggatctcctcctcctcatctacgaccgccggtgacggaatctccaccacttaagtcggggcagcaaggacgagatttggggcggaaaatgctgggaccaagcaccaccaaggacgcgcatttactccctgaacaacacaagggcgagctagctcccagtcccagtctctccctccaaagagaagactttagcagcaaaagagcaatggcgatggaagcgaggcacggacagataggaccgagtccaagatatggtgggagagggagagcgagaggaagacaaatcgggaggaaacaatgcaaaaaaccaagattggattggaaatggatagaggaagtgaagaattgggagggaacgaatcaatcttggagaaatccaatccaagcaagcggggaagctggctgccacagaatttggggagggattaacgcgccccacgaatgattgcgacaaccaagacgaggacttggagagaaggaggaggggtttggggatttgatggcgagagtgaagcaatggagagagagagaggctttagaaatggagatgatggtgagggcttctatgtgaattgcacatttttatgagggggttatatggaaatgtttatgttgtgtttccgggtaaaagacacgggattacagttggcacaccgcccaccagaatttactgctttgcccctggcctggacggctgagttgtgggtccaggctgtcagttggtctgtgtgcgcttttggcgacgtgtcctcttttctaacgtttcgattcttccgaggggcttttgtgcaactccctagtccctattctgcaaggtgagagggtgcttgatgtaaaaagtcctcagaggctgacctgtagggcccacctgcaacttcaaggcgtccagcaaagcaagagcttttccaacgaccagtgagaatgataccgaaccagaacaataatctcttttccaacgttaactgtcgagctcaggggcttttccaaaaccaaaacaaacaaaaaaaataaaagtggttccacgtggcaaagaagctcatcatcttcttgtgcggttggttcttgatcagcactcggaaaagattgtgtgattggcactgctcttctttgtttctttggcactttgaggatttgtttttgctcaagagtgaagctagcattagtgcattatcatggcgatgagatgatgtcttatatgtgacgcaatcaacttgtcatcatctcttccttccatcttgctcgtgtctttggtttcatctttgtctttgtctagtgcgaggtggatctaggaatatttaattggaggtgttgaacaaactatacaaaattatagccctctctatgtatgaaaaaaaattagtgcgagcttttaatcggggctctccacccatggttacaacgtcggtagcaagggctcgagaccccaccgcccctacgatggatccgccaatagttactaataaacaataatattgttcacttcgtatccaagggatcaaaagaagacagcactagacgctaccaaatggatatgcgcatttatatacgtgaagtgatgattgggctcattttggaacatgattcataatccagttggctagaaacaatgactaatcacgcactcatcactgactaaaaactttataacccacttacaccatatgtgacaaaatgctcacaccaataatctggtcgaatgcacaaattaactaatcgaagcgtccggccattacagcttctaattaagcggaagacactagctccgatacaaacgataaataattttaggtaatttgtactctttgaattctaaatccaagtaattggctaagacttataggcaatagcttaaacaatagttagtgctacaatattgtaattgcaagaatgggccgctctagctaggtggttttccggagactttgcagcgaagacttttattgctgactctagtttatcctctacagtgtcttgtgcatcgatcatactttacggacgaacggagtagtacagtactatcagaggaggtcaacttaaattacaaaacacaagtcaatgccattgatgaaacctaattattgcaagaaagtactaattctaaacattaacaatgctcttgataatgacagattgagtaaaggagctggtcccactttgcctcgcgcccgtgaagaattatttatgcaattaatttaacaaatgatgtctatatgaggatgacaacgagctcaaaatcatctgcaatagggagaatatgaatttatcaaaaacagtattcacaagtgaatgatgggttcttctatataaacgaaaatgctatacgtacgacttgagtgtccgaccggcgtacgactgtgtattacacgacgtcaagagctgtgctgctgctgctgttctgtcatacgccgttaagtattgtgccgctcagccgtttcgtcgtacgccgatcggatgacgcagtcgcacgtatagcagtgttcctgtataaattcagacattagacagtaaattactatcccaaccagcaccttaatttgtacgtaaatacaaccatagtggtccagaacatgcaggagaaggtttgatagtggtgttattgcaatcatcaatgtgcaatacatttgatccccaatgcgtggacttatgggtgcaatctatgggtactactagctaccagggtgatcaatcaaaatttgtcatgttcttggccggcctcacacatgcatacatgctggcaaggaccattgtcctcttgttctttctgagagtcataaatatgtaccgatgtacacaagctagcttaggccacaaaattaaggaggagaagtcagaaaccattctgctcttcaaaattgcttttacttccccaacttgatcaagacagagtacgttttaagcagtgaatatacggggtgtgaaaatggtaggaaaataggtttaaccatttccgtaatcatttcatttttctcggaaatgaaattaaaaaggtagagcccaaaataaaaaaatgggaatattagaaaatcataagcagaatgacagaatcatactggtattgatcataaaccgtgtcaaaaacattaaaccgtaaaatcacatttgtaatttattgtgactatataatatgaccacgtaaattcaagttcacacctacgtaatttacaaaccttctcctttagctatatactcaaattagagatttagttgaggagtcaatggacctctaaactatgagccaaatagagacattgaccaaagataatatgttatttttagaaatacggtatttactgtattatagaaatggtaatttccacatctaaagtattgaaagaactaatctttcttgcaaaattaatgtgccacgccatcaaagaaataaggaccgttcgattctcgctctagacgttggtggtcgttggatcctctaattggcatagtatattctagacccttgatgaaactcctatctatttctagtccttacacatccttatacctcttttgtttttcgggcctgttcactttgatattattttcaaccttaccaaattttggcattgccaaaattttagcacatgcaacttgccaaaattttggtaggatttcttatatagttactaaaatttggcagcaaactaaatgtagccacttttttagtaactttatctaaatttaatatggttgaaaatgacatcaaagtgaactgagccattcattttcacccttccccctcccacaccgtgagacacccaccataacgctctgtcttctcgcactcgccgcgccgtctcgcactcatcgtcgaccttggagccgcccgccgccgccgctgcctcatcgactcctctccaagactccatcgccaccgctggccccctctccatctgcactgctgcacagtacgtatcctcccatccaaaacctccttctgtccagcggcaggcgcggcagccacacctccttatgtccttcagtccttcccatccaaaacgccaccacgtcgattcattccctcctggccgctctctagctcctcctccatggtgatgtctcctggtggcttggagctggcaacaccggaggaaggtagtgatgaagccggctcaagaaggcccaaaacgccggtgtgacgaacaatgcgtcaaatccgatagcggacaaagacgattgtagattaccattaagtaacttgagtacagttgaggaactatcaagtagtagtatttggatttgtaatatggatgcttatgttcagctgaagcatcaacaattgcaacttgctacttctgaatatcactatgagtttgtcctgattagtgtcggtttcggatgaaggtgtctgaacctttgtgtagacaatagaagggaaattcgatgaaaaataggaaaatgtgcggtttaattttggtttcatatagtcatcctgatttttaataggattattcttacatcagagtgagttagtgtcacaatgttaacccctacttatgtaattcgtgagtttctctgcaaagcttgagcatgggtcaaaatgattgcaatctatttgatgtatataatttttttatcaaggattggggcctcactaccttaaaaataatttcattaggaagcagcgaattcatggttgccagtaatggctatcatttgtagatcttttgaacaaagctgaagccatatccagaattaaccaatggatacagtgcattaggagaagggttttttttttggtggatcatggatagttgaagcctctatgttgagagtatgtcattatttatacttaacaggagagcttgctactttgcttgatatgccattattctttatttcctatgccccttcccttccagagcataaatggtcttttagtttgaatctactaagcatcttctgctattgtcttttagtatttctgcaattggtttattacttataaaatcatggtgttaaccacctaatttggtttacataatttctctctcatgcataatccttttcagggcaatctactgcatgaacacactggtagcagttgtacgtatatacctggtcctggtccaaggtaatactccctccgtttcgaaatgtttgacaccgttgactttttagcacatgttttaccgttcgtcttattcaaaaacttttatgaaatatgtaaaattatatgcctacataaaaatatatttaacaatgaatcaaatgataggaaaagaattaataattacttaaattttttgaataagacgagcggtcaaacatgtgctaaaaagtcaacggcgtcaaatattttgaaacggagggagtagctgattacacttcttatatatccacctcagattgcatgtttttgcagagaagccatgtgaaagtgttcctggagtttggtggatatgggcaaagtgatattcttttaagaaaatcaaagacatggtgtgtatcacagtgagtccaattgtcaattttcttttctaactcatgttgtgaacggagacatgcatgttagtggaaatcctgagctatcacgcaggttatgaattcctcattcaagttgttcgtgatagaaatactaaatacttcacctttttatttcaggcgctacaagctgcagaggttccatttcaccatgtattgtacgttaaaagtcagtgtttccaatgtaattgttggccatacaaattgcaggatggttgcagcagagcagtagagcaattttcaaactacataatagggtaatcaaccttttctgaacctccatggacgtgcttgctgcactactcaacattgaattagcacggatgtgacagagacaacgagggcagattaattacatgccatcctttcttgatatttctaacaataatatttcattgaatcatccaaaatttcctcactaactcaaaattgatcattcagatcattgggcattaaataggtgccgctcaattatttttcctgacaattcctacatgatatctattcacgatgacaaaatagagaaggtacttcttttacaatgttttttttttgaaatttacttcttttacaatgttggtattgctatttttgtatagaagagcagtagacatcaatacaagtcacagtaaagacattttcctcttttatctgtctagctttcttaattattttactgcagttcagcactctgaagaaccggacaggaatttcatcagcacaaaacaataccagattggacaaaaactggagatgaacagagactttaccggttgtaatcgccctgttatttcactacccaagtatggcatctcctgcaaaccaaatatttcagtaagcatgacatctcgtgcatcgaacagtaaaaaaaatttagactaatatgatcttaggctgcttaaccatggggaagcttctaactgctttgctccataccatcagcgtatgttatgtaacagtttatatgtacagagcttttataacggtatgtaaaaagtcgcgcaaagcgtgactaatgtggctagtaaatatgataaaaataaggaaacagaaggtagaatagcaaaattatttccgtattgtttaccacttatatttttatttttattggttatcgtttcaaaatagttcattcgagagaacatcggagacgagcctcgatcggtcagaaatttccaataccattttcgcccccatgcaacacagcacacgatgatccttttgatggccgacattgcgaaggaacttgctaacacaaactgctaaatccttttgtgtacgtagtgaagctggaattaagcaggtgactatgttcttcttggcaagcctaactagtttagttagcatggcgtactgaaagtctgaaggaaaaccaacggaaagtattctacagtggtttgatctcgcaacggatctgatattcctcacctaacaaatgcaagcatatatactctacagtggtctcatctcgatcgatcaatcccctggatgtgctgaatgtcggcaaataatttatcaacagctctgtctggtaacaaatgcactcctgcttatcaggatgggcttctgcacatacaggtgtaaatgtggcctttactccctcgtttttggcccaatatttatatttggaaatgttggttcgagccatcagcaattacaagagcaagcgtatgtatgtacttgtaaacagaataatggatcatgcaacttgatatgataaccaacaggaaatcgaacaccagaatggaagaatatagattcaaagggtctagattcatgcacaatgtgaagtgacaaaactgcatacaaaagatacgcattttgcgtattcccgaaaataatttgacaaaactgcatttcattagcttgatacactaatctcgatatacaagtggtaaactcacccttgaaaattttcctcatttcggctattcacaccagtcagttgtttcaccaacccaacatagaactcaaaccatatactgagaattgcagactttatctatgtattcacaccggtcaatttcaccaaacctagacagaacccaaaccatacacaaaaccaaaaatctataattaaattacatttgcaaacaaatgtggataaagaatggacaaaaaatatatgcacagcagtcacaaccaaaccaattccaggcccagagaggacaacgaataacattcgtcaatctgtgtcaggtaccaatgcatttggctttgagacatagcttggtaaattggcagcactgcttttagaattgctggatttgggggatgatgactcacatgagctgaggattggagattcaggccttgaggggacaggagatagttcttcacggtctaaatatgcttcaactaccggaaacatatcttccgagtaagtgtgattgctatcttctcctggtatactgtcttccatgtcatcatccaagggggcaacatcgtgggtggtgaattgatgaaaatctactatctcacgcaagaaacgattttcgcgtgcgtacatggaattttcctgcgccagtcttgatttctcggccaataaggtctccagttgcacacgaatctgttcaatagcatgttcttcaggcatgtattttaaatatgcagaagacatgttgtactcattacttaacagtgataagtaaaaaataactaaagtctgttgtacacaagcaatgaacctcttctaagtatgaagttagggacaatcgtgttcttgcccttactttaagttgcaattgtgattttgcccctcttttttagggtttgtgattttattttttaaatgaagcttcagtttgcccctgctttagatggcgttaggtgggtccagattttgtaagataataaaatagataaggtaaagaaaagaatgtttacaaaatatagaaagactagtgtacccctgtaaaaaacacttaccagttaccaccacctaagccatccaacccattctcctctcccattccaaacaggtggatgcaagcgacggagacggaggtggcggcaccggagcaactcacgagcaggctgcgacggcgcaagtggcagcgctcaccagcgtgagcagcggctgctcggtagagagggagcaggcggcgctgctcggtcaatgcgcgagcaggtggtggctcagcgacgctgtagcaggggaaggggtgccttagcttggctcagcaatgctgtagcttgctgcgaacatcgttcagagtaggagtagcagcaaggacacacgacaagcaagctcatccacgaggccaatgcaagggatgctgcctcctgattttcttttttttcccatctcatagttgatagtatatatttgggagaattttgtttggtaaatatttttttcttgtgaatgcgatgaatccttggtgaattttttgcgccctgtgcaacttctgtaaaagtgatatccaagctctatcaaaatttgtcaagtttggtcaaatttgagagcaaatgtgaagggtatatatgtcttcttgcagctcatttgacactgttagttggtcttaacagagtaagggcaaattgaaacttcgtttgaaaaaagtaagggcaaaatcacaaaccctaaaaagaaggggtaaaatcacaattacaatccaaaataggggtaagaatgcaattgccctatgaagttaataatcagcttaaagtactgaaagaccaagaacaactataggggggttgaatatagtaattcaaatcttgcccccgaaaatactcatcaagccggatttctcaaaatccttactagaaccccggctattagagaagccggatctagaaaagaagaaagaaggaattcccgaaactagaagaggaagagaaaaggaattcccgaaactagaagagagatgaggaggagatagcaaaactcatcatcgcaaagttcaaattgcaagcggaatttaaattgcggaatttaaatgaacaaggcaaaaacgaaatctttcaaatcatttcattcataggtgatgcaaaataaccgctcaactaggagcaaacatacaccttcagaggaacattaatacaaacttaaaatctctcggacaaacacactccaaactaatcctaatacaaaagcctctcgggcaaacacactccaaactcacaccgaaactctcaccgagcatctcaaaaggattaaaaaagagcaacctccacccttgcatccatttctctatttatagcctaagaccccctaagacattgtcacaaatgcccttaaggcaaaccctatctcagatgcaatcctggctgttcgttcttccttacatccgaaggaaacctcctggatgcttgccacggcgttgatccaaagcttcacatgcaaatcaatctgcgtgctccctgtcttgacgaatctgagtgcgacacgttgccgcgccgaaatcccgcgcacgcgagaccgcgctctctcctccatgtcgggcccgcatgccagcgagccacccagtccgaagccgctcccgcgcgcgctccaaatttcacgtgggtcccgcgcccgcgcgtgaaaccgatgccgcgtcgagggagaggagcgcaccaatccaaaagcgccgcgcgtctcgccgatccaatcccgtgcaccgtgtgggtcccatgagagaccgcgtctcgcgcgtctccgcttgcttgtcgaacaggagaccaccacgtgtccttgtgccatacgatctcccgcctccgcgcgcgcatgcacctgccgagccgagctgggccgtcgtcttgtctagggctgctcggcttggcctcctcccgtacatcaccttgggccagccacgtgccagcccacaagccaaatggccagctcgggttggcctccctgccaactgagcccatgcatggctagctagcttgacttttccaccgagccatgctagtagcaaccggtacagtgcaagctcctccttgcacatgtacagtacgtgtacatgcatgtatgctagctacagtaagtagcagcaatgcacttgcacagttctttctccttccgattttttcgcgaatcctggcgcttgcacacttgaccttgcgaagcccgttgcgaagacctcctcacacggtgtccgcccaccgtgtgcaaccttgtgtctaatcttgtcacccggcatccttgatcgttctggacctcaacccctccctgagtctagtcccgatccaccgttgaccaagatcgactccgatcatctgcacacacatgaaccaaacaaccgttgtctcggcacagatgtcgcaatctgaccaatgttagtccacgcacacacttcttgcacttccagtacttgtcaattttccatcacaaaagaactataaccacacatggttttacaagtaccaatgcttaatagtttatccgacatgatatagtggttcaaattttcatcaccaatacatcaggctttcatatcaaccaaccacattgtgcaacgtactgcaaaatttgcatatctttttcaaaattgtccagaaatgcaagggaaagaagaaatttcacacttttcaatggtcatagccagagttttgggatgagtcatcacaaattcaccatcaagaagaatgtagttctgataactttatcatgagaataaaataattccagggttgcttgcttggaaaacattaacataccaggtcatcatcctcttcagttttgctccctttctgctttgcttctcgcaagaacttgttctcctcttctagctgagcacatcgctgcttcgcaaaagctagatcagcttttactgtttttagttcacggagcacaagttttgctttagcagccattgcattagcaacctgaaacattttggggggatatgagaaaggcatcactaatctgaaaatgtttgtccaaatacatgggaagaaaaaaaaaggtcttatttcaagccatattaaccataaaaactgataaccaagaacttagcaaaaggaaaataagtattaatactttttaagtacaagcatagcaaaggttttgccatattaaaaaggtccaagtttctgtacgttaaacttccactactagacccagcatgtggcaccttacatcgcgagaagcttttaattgggtttcctgggctgcagtttcagcttgatcatgtgaaagattaggaggtcttaatgtatcaaatgctgggttcggcatataagaattcgaattggcttgcttccttctaatttgtatcttctttgtctcctcaatgatattggatgtcttattgtccacaattgtgagtccttcctgttaaagaaagaagagaagaagaggttattgaaaccaatgtgatactaaacgagagaaaatggaaatcccagaaaatccagaacaacagcaaagagagatgtagagttgagaaatcaatcagatgggttgtgccattagttatactaaatataaagagctgaattaagctaaaaataggacattacttccaacgcatctctgattcttccaccaagttggttgacagaagcagcaagagcttccgaccttgtccgggatccagtatctcctgtcctgctgtggttttcaaatgaccagcgagatcgagattcctaataaatatcacaaattttgagaacaatgtgaacataaatacaacttggaacatcaagatatcctacttattctgctttgtttttctaatacttgccacctcacctgagctccagtggatgaatcaaacttgcgaggggtcttttgttttgtgtactcgtcagacttatgtgctgtgccatcctcatcaagaattcccttggcttttcttgccaaagtttcccatagcccaagcttgggctcgttcatacttttgattgatgtgtaactgtacgatgaagaagagccctattcagagaaattgacatgcttaggatacatcatttgtgacttgtgagacacacacagacatctgaaaggacggtgcaaagtgatcattagagaccaacatcagttagtgatttcttttatccttttggaacaaaatgttttgtttatctgtaggtgataaacaaatgggatgatttaaggagtttgtacattaaggaacaaaatgatcaacgaaccagcgaggagccgaaggtggtcgaatcagcacatggtggtttcttaaggaactgtgatgatctgatcgataggcctaagaaattgattctaattatctcacaacaaaacaagtaatcttgcggttattttttttcccagagtaaaatagtagtaatctgcagttaaacataggaggattactgtactggttaaggggaatcagtgtccttttgctaaacaagcttgtcctcaaataaattaagatgcacgatcaatcaaggcagcgacaaaaaaaaaatctaatttgatccgatcaacagggattgaaaactgggatatactactacagtactagaagcaagctgaagagtgagagacaaggaggggggagaggggcgcatgcctgcggcggctgggggtaggagctccggcgatcatcggcggcgatggggccctgcttccggcggtaggccatggtggcggcgcggcggcgggtcgtggcccggacccggagtaggagagcaaccaaccaactctgaatctccctgatgcctcgccaccttcctccctgcaaactgcatcgatgcttttgcatatgaaaccctcgcctctggataaattaaattatttaccaaattaggtacagttacattttgtggggaagagacattcaaattcagtggatctccagagaaatgaaccagctggcggatagtttggcaaaatcgacaatttccaagccaaaatcaaatggcttttgactcttctgatatttccaatatatgtgaaaggtctgattatcatgttaaaaaggacttcttcttactcctaagggagatgtaactatagattctgttttaaaaccttttattacataaataaatatcatgagttctaaaaatattgtgattggataagaagtataggtagttaaaaaaatttaatagtaaatggttatgatcggttaagaaaagaatattggtacataaattgttatattttggaataaattctaaaagctaaaaaataatatttttttagaacggaggagtaatacatagtaataatcaaatatgaaatatccacaatgttggtaatgcaatatgcgaggaagtagtgggtgcagatgcataaacataaaaaggggaaagggaaaaacaagagagaagaaatgccctcctcccttctgctggtttgctttaaaagctggcaacagcgatgacagtaatctggagcgggaggtggggctccactccacgtaccgaacccaatagcaaaaagtacactgaagtccctcaacttgtcatcgagttacaaaatcatcctccaaccacaaaaccagatataaccgcttacttttgatccttccgtgtttttgacatcggttttatctagcgtggcagctgagttagcgtgggccccacatgtcaggctaacagcgtcatttcccttcctctcactttcccctctttatctcccttcctctctctctcatcatctcctctctgtgtgggctggcccccggccggcgggtggccgggtggggaggaggtcggcagggcgaggcgagagaggcgcccggcgacgggcgatgtggaaagaggtgctcgcgtcgatgcggtcgtcgtcgccgccggcaaggtggggggaggtggaggcagggaaggggaagagtggagggagtgggaagggcggcgaccggcggcgagagtgcatggagagggaggagacaaggaagccagcggcgagcgcgcaggtagatcctcttcatcgccactttgggccgcctcgtcgcccgcaggaggtggccaagtcgatgtcggcagttctacgtcgcctccatgtactggttcatcaccaccctctccaccgtcggctacggcgacatgcacgccgagaacaccggagagatggtctacaccaccgcctacatgctcttcaacctcagcctcaccgcctacatcatcggcaacatgaccaaccctgtcgtccatggcaccagccgcaccaggaaattcgttagtagtcactttctttgatcgatcccttgctgtttcttgatcaacagcaattctttggtgttctatcttggttcagtatactctagtactcacaagtcacatcacatgatggtttcttggcgtgtgttcttggttttaatcacatgatctcaatgtgatcatgtgatttttatttctttccaattcttgttggatgttcgtgaggagtagttgatatcttctgtggtgtaatttgagtgaaggtttcagagatgaatgccgagtactttgcgccgagagaggatatcatactgcagaatgaagcgcctgcagatctctacatctgaagtggcggcgagcttggagagctggggtagggctcctcgcggcggccggcccggaggcaggaagccctacctcgcgcgccggatgcgggcggcggggaatggccggtgaggtggtatggcgcgtagagcgcgtcatggcgccgatgaggtcgcccaccaccgctccgtcgccgcggcgaagaatctcctcacggagctccacccgttgcccacatccccgctgccacgccccgcgctgctcgcgctccccgccgcgcgcgcccgccacatcggcctgttgtgcccagctgctctttgccgccacagcggcaccgcccgtggaagagaggaagaggagaggggagaggaagccgaggctgacaaatggggcccacgtgggttccatgccgactcagccatcacgtcggataaaaccggagtcaaaaccaccggaggacctaaagtgaacggttttgtaagttgagggatgatatatatctggttttgtggttagggacgatttggataccactagctcgcgccgacgggcctggcggcagcggggcgagcgacggtggcagcacggcggccacggcggcgcgaggcttgcggacggcggtgaccggccgggcggctagtaatgaacgacggcggcggtgccggtggcagccgcggctatgggaggcagcaacggcaacacccgtggtggcagcggcggtggctgacggtgcggaggcagaggcctcggagctcgtcgcagcggtggtgtcagcggctggacgacggcagcagcggctgctgtggcacggtgggaggaggcacggtggtgcgttcggcagtagtggttgcggtggcagtgaccgcggtggtaccggaggcatggcggcctcggacggctagccgagggcgtggcagacggctgcatttggccggtttacaaccctgtagggtcgtaaccaggaaaaaggaaaaatataccaccacccacacaccgacaacgtcaacacacaacccgggataaggctagcaccggaccgcccgctgctaagcgtgaccgaccgccactaagcgtgaccgaccgccactagaccaacaaaggaacacagacgagatcgccccctaggggatgccaaaacgacgtcttcaagaagagaagcgacggaaaaaaccgcctccgccgtccgtcggggctcaaaggagccaagactgggcttttgcccggcaaccgcccttgaggagtcagacagcacgacaacaccctcagaagggggaatgaaccatcgttgtcggcccggccaaggccgggctaggttttcacccgccgctcacgacctgtgaatccatggctaacgcaccgatgctccaccaccactctagctctgccgacaagtgagactcctacaccagcgtccctcgccggctagccttcgtgcgccgaagactgcgccacacccatcgacagttcctcctcacaccaaggtcacttccaccaccgctaaatccattaaaaaaggacaaattttagcggagggggctgctacgggcaagttgagtactcagattcggcgcttgcttgacatctctctttgaattttggacaaagccgaccaggaatccagctgaatgacacgagttactctcccgagcctcctctttattcagaaatgaaaccaagcgttgagaataagtccttcccttttgtgtgaattcccgccggccgcgcctctcgcgctaagccagcctccatctccgcctcccgcggtttgaagccaaattttggcatgcctaagaaaataggccatttcaatattgaacttaggctattttggcttcaatccaaacacaactttacctcaccaaaattaggcatgccaaaacttaccaaaatttatcaggcatttttaggcaaaccaaccctcgatgacaagttgagggaccttcttcgatgtactttttccaacccaataacgtggaccgggccgacagatctggcccataactagcatgcattgttttccaggccttggatgggcttttgtgaaaatacggcccactcggtggatgtcttgtctccttatctgcaacgtgcccacccaccagtccacgcagtctccttgctgtgattgtgtttggcgtttgcttctgcagttctgctgccacattgttgatttgctcccaaatcccaatccgccgccgccgccgtcgtcctcgacggtagccagctccgacaggaggttccccgtgctatccctccctctgcaatactgtggttttgctctgacttccatcggctagcctaggcgcaaagcaacccaccatggcctcgcagccgttgctcttccggtggatgcaaccccactgcaaggtactcctgccactaatctcctctgcactcgattcaactcattcccaactgatagctggtgttcgtaactatgtactcctatgtgtttacgcctttacggtagcaggtccaatcgctatagtaaaaatactaccgtgtggaatttgctcagatggtcaaactccaaacactctggctaccatttccattcatttctcattagaggggaccggccagtgatggtctggtactgttaagacataatttttcaaagctatgagtgtagttggcatttgtttcatttgatggtatatatggcaaaactgttgtatgtgcacgagagataatggttgtctcacatcttatacaagctctcttaggtttactagaaccaaacttttctactttgatatcatcttttttttccctctgtgctcttgcattgttcacatgctattaactcacttactcacagatgttttacttgcttcaatattggatattttcaagggagattaagactggatattttgttgcccaacgattacaacagcgtacaatttaggaagcagactgtttttctgaaggattttttttttaataaaaggaaccatactgttaatctgtagtgatttggttacacttgtagttttcttgtctttgcagttcattagatcaaatccatgtttctacatagaatgactgaataacttattttaaacatgttttgctaaagatagagaaatacataatgctttctagttatacgcttcctctgcaaagtactaaaattatttccatttcccattctacgctactagcaggatttacacagccactcattcatttagtacttgacatgtttttgagtagttcgtttctgctttggtcatcttttcctccttctcttcgttaatctagttactttcatggagtataagctgggcatggttttgtttgataacgattcaaatttgcagtgtgtggatgcagattgatttttcagtttgcttcttccgttgggaccccacacaattgttcagtccagaaaatgtgagtttcctgccttgcagttgatcaggtcaatgccgatgcatctcccacgctccctccaatacccaccctcgactccacaccctctacattccaccgccttctcccacagcctccgccctcgccgtcccaatggtcctcccccagccttcgcctctgccgagttcccaggtaaccatcttctccattgtggaagacttgcagcatttggataggaggttcttaaaatgggaggttttgaagttgatgtgctctttgcaagtagaatgcatgttttcccccatttaaaatggcttattattgcgcccttcttttcatctgggtagcagaactagcaccaacagctaaaatgtccccaaaactagcagaacagctttggcactactaaaccctacaactaatgcaggttcagttccagacagtgcccagatgccaccacgacgccgccgccgccggagtgtggctggcattgaccaggacgatctccttgaccccgacgccctcgccgacccagacagcagcttctacgagatcaatggcgtaagggtccaccacaaggtttgcacccatgaggattccagtgaccaatctccagactctgccatcacaaacgcggaccaaaaccaaattggtttgcccatagtgctattacatgggtttggctcgtcggtcttctcttggacccacatcatgcgccctctagcccgcattgctggtgccaaggttctagcctttgatcggcctgcctttggtctgacatcccgaaccatctggtctggtgatgacaccaagcctatcaacccctactccatggccttctcagtcatggcaactttggcattcattgaccaactcggtgccaagaaggccgtccttgtcgggtacggatgtaacacaacatgtgttgttctatactttaatctgtgtgcattacttgatgaattacatgtgtgtgatggtttggattcaggcactcagctggttgccttgtggcagtggaggcatactttgaggcaccagaaagggtagctgcacttgtgctggttgcaccagccatttttgtgccagttttcaggaggaaaggtgtgaaggagaatggtgtaggtgaacaagaatggcagaataagaaggattccaatgattcaaatttgcctacaaatccactcaataggatttggggaaaattcctcgagctatgcttgtggattgcagggtttcttatgaatatgattagggcaataggtggtgttgttcgatctttgtattataaatctgttgttgctgttcttcgatcatcagttggcgtgatgctggtaagttttttttaatctctagtgttttagctgatagcctcttcaatggatactttagtaaatgtgtcaacaaaagtaagtaaaaattagctaaacttgaattatcaactctcactgactaactgaatagcagacttttccagttcacaaacatttctttatgaattgaaaatagtcaggttgaattcttttcttgattggactttggtgacataggtaagattgatcatggataagtttggtatattggctgtccgcaatgcatggtatgacccaagcaaagtgacggatcatgtcattcaaggttacactaaggtgacttatatgtctctgaaaattctgcaactatcggatccttatgcaaagactgaaaactatgtcttttcttcagccattaagatccagaggttgggagatggctcttttggagtacactatatccatgatcatggattctatatcatcatcgaaagtgcctgtctcagaaaggctttctgagatctcgtgcccaggttttcatatacactctacttttgggatccttcaatgatatacaaataagcaaaaaaaaaaactatttgttatccatgtttgaatttgcattcaggtttaccagtgaactatcattattttggacaaatggttggaattatcttgcatgtggctgataaatgatgttactttctggatggtttgtgtgtgtttaccattgcagtgctagtggtgagtggagacactgatcgccttgttcctcgttggaataccgagcgcgtagcacgtgcgattcctggtgcaggatttgaggtgatcaagaactctgggcacttgccacaggaggaacgacccgaagaatttgtctctgttgtcgaaaggtttctgagaagagcttttgggagacccaacaacgagcaagagcaagtgttgcaagcagctgtatgatatgaaaccagtacctgtagataagcatctagtactagataaccaatacatgtttagatgcgttctgtactagttctctgtaagccgttaaattttatttgctaaaaataatatcattaagttaacatttgaatttacttttatatggttatgattttagtacatgggaaatttaaagtaaaaatttagctttggagaaggtatcaagtttgaccgcaccttatttagtgggacggaagtatacaagattagtagatcacaataatctaatcaaatcaacttgctttttagcacaaaaccatgcttccaaacttaaagtgcaatccaccaacccccacgactactccagccatggttttcaaaacagcaaaaaaaaaaaaaagtaaggccagctacatgaaacaccccttgttttttttttaggggggggggggggggagcttagttaagaagtatgcctttcttccgtaaattagaacgagcaggaaacattggaacatgaaagaaaataaattagtcatggagcacagtttgtggggagccacgtgaagaaaccaatgttattaatatgaccaatcaacagccgaaagaaatgaaattacatactccctccgtttcaaaatgtttgacatcgttgactttttaatatatgtttgaccatttgtcttatttaaaaaatttaagtaattatttattcttttcatatcattttattcattgttaattatacttttatatacacatatagttttacatatttcacaatttttttaatgagacgaacggttaaacatgtgctaaaaagtcaacggtgttaaatattttgaaacggaggtagtatataggtaattctaggtagtgtttggtttcgggactaagtgggatgtgatggaaccatccctgatttttgggttgggatgattccactcacatgtttggtttataagatgggacaatcctaattttttgtttggttgaagggatgagagagggaagggatggatgccgtttgcaatcaccgtcaaccgatcgccggatctgccaccacagtcctccccatcgccagaggaagagcaagaggatgagccggcggcgagcaagagcaagaggaaaagccggcggcgagcaagagcaagaggaaaagccgccgccgctccttccatcgctggatccgccgccgcccctcgacttcctcctcgcacgccgccgccgctcctcccccgtgagctcctcatcacaagccgctgcagcacctccccatcgccgaatccgccgccgcaccatcgccagatctgctgccgcccctagacctcctcctcgcacaccgccgtcgctcctcccccgcgagctcctcctcgcaagccgccacagtccccatcgctgaatccgccgccgcccctcgacctcctcctcgcatgccgccgccgctcctccccgtcgctgaatccgccgccgctcctccccatcgctgaatccgccgccgcagtcctccccatcgccggatccaccgccaccgccctccccaccactggatccgccgtcgccaaacccccccaccgccgcggtccgcgttgccgagccctgcgtggtcgccgtcgccgagcctgccgctgtcgcacgagccgtctgccgctgctcccgagggcgagcagcgcgagcacggtaggaaggcgt

SEQ ID NO: 7608 - DNA, 66545 bp, Oryza sativa
ccaccatcgccctatcggtatcatcattcatctccaccctttgcaggttcactgacatatataagtgctatccgctctattagcctcatgatctacgacatagcatctacgcacattcttgctcatctgacccattatgttagccatcaacttataaaataaaaagaataggttcagttgtacattgcaagtctaaaccgtggatggtgcgtgagtgtgcacacctgcgctgtgtgcttttgggttttttcttctttttttttttggctttctccccagttttcaacctgtaaatttgctctgcatggtggtgcttgtaaggccctctaattttcacagtggtcttatgtgttgttgactgtgtttgctctgccaaaaccggcaaggtttaaccccagaaatgaaaggctgaactaagagtggttggatggttgctatgctactgaaacgttgtctatcatctgtatcttgttccatgaattgcctactttctttgtgcattttttgttgagctttactttctgatattaaattgctggtgttatgttttcctgacgtagtggtcatctgtattgctgctgtgaatcattgtataatttgttcctatatacctgttctatcatgatgctatcagtgtttctcgtattcaaggctgcgtcagttttgcactccaggtgttgtgttttcccacgtcaacactctgtttaagatatggaaatcactcattgtctttctgttattttattgtatacagaaaccagtcattatctgttcgctctcttgcttttgtaattaacaaggagccctcattgtcttatcatctgtcatccaccatgttactccattcctaattctaaagatgccgactctgatgcagcactatgataaatgtttggtctcatcagtcgggacactgataacaaacagcactttagagtgctaaaatacagtaaccatagattccccttaatctttcaactgaaaacttcagtctaactaaccataatttaaaccaaattaattagcggttatttttctgactctataaccatgcatatactgtctgaagtagattcagagatggttttagaattaaggcaaaagattgttaagcgtatggccacctgtctgttagtataatgctgcagtaaagagtagtaataagcatatatagacaacagtggtagtcattttcagtcactaaaatacatacactcttattgtactgtaattcatggttcccttgagccatggtcatcgtcaccatcatcactcgcacttgcgtcgaaggagtgattaggagatggttatcgtgtgtgacgtggatcaagccagataagcatttcaatgtttttatttttgagagagagcagggataagcatttcaattagcaaatgaaaggtgtctgctatagctttttctgcaaggacaataattaatgaatctgaaagtgtgtcgtccttggaaggaagatggaaaggaagaaccactcattaatcaaacaagtgtcacaaattggatcactgactgcctgactggacaggaatgttggtgcattatcatgttataactaaaagatgcgtgaaaatcagtgagcaatcatagaaaaatcatcaagtgcactgttccattgttgacaagaaaggtttttcctcacaaaataattaaaaccgtatccttccaagttccaacatacaggacaatctctgtgggatgtgacttggttaattatccagttacatctagagagttagcgaaaatcggctgtgcatgacaagatcacaaattaatttggagaacaaagaatgaattaaactaagttcataaaaagaaaaataatcgtgcatatcaaaatattcagaagagcgaaaaatacaaggatcagatgcgaaaagggccaaggttgcattgcaaaccatattagtttgctggtgtcctggtgatatatgcaactttagagagccagcaaatgacgtatctctacctaaagaaagatattcccctttggtattgacacaaaggaacatcaatcgctctcatttaactggcacgcacaacggttgcttcatcttcaactgctaattaactttctgaaacgctgatgctttttaatcctcttcttccccggcccatgcatattctctctgctttaatggtgtgaaatttcagaacaagaatctagtttccgcatacagagttccagaaatttccgactgttcatctcatcgatcatccgcgattctttttttagtttttgatggtgatcagccacaccgctagctagttgacacatgtatgcagtagcaatatttgttagctgaaaaggaagcaaggaggaaagcagcaaatcagctttgttgccaagctgcttggcaggtcacatttttcatttccgagttgattaatttgcaaccatcatgcatcaatacaattactatttaagcatattagtaaaattgtgtgaagttttttttttcaattaagccatgtcatgtgtgggggcgttaccttgcagactatataaatatgagtgaaattgacttgaggcgtcgagttgccttattgccaaacaatagtactattcattagtagtatatctgacccaaaacccaaccatttttccccctttgcgttgcatctcagtgttcttccattctttccagagagacaaagtaattgaccatggcaaaagatcctcatgtctccatctctctcaccggcctcgccatggtcgtcctcctcatcttcagctcctccttcctccaggccgcccaaggtacgtacacaccttcatcttcgcctgcttcatcatgcatcttggtgatccttcaagtcggttctgacttctcaattgatattcatgcatgcaggatcagacaagaagatggcaatgaagtacgacgtgccggtgaagaggctggtgtaccggccgtcggcgatgcaggcggcggtgatcggcacggaggcggcggcgtacgagccgttcgagctgtgcatgggctgccggtgctgcgcgtcgtcgaacgcgagcagctgcgtggacacgagatgctgctacgccatcgactgcaacatccccggcaagcccttcggcgtctgcgccttctctccccacacctgcgactgtggtgccaccaactgcaccagccaacagcagccatgaccacacacctcttgctgctgctaattcaattcgatctcttccatgatcaatatacttatgcgcctgaatcattcaactgttttctgatgcgattgcaaacgtattaagttttttcagagattcttgggacttagatatcctgacatgagcatgttgatctgaaagtttaactgcatatagaatcttcagaaagggattaattcttgatctaccagttccacaaacaatttattcgtgctttaaatctggatttgcattctctcttatcagagagtaattaatttgagggtctgatctgattaattgctgtagaacccactttgatgtatggatatggctgtgctgcctgtgcagactactagctagactgtagagaaaaggcggctgttttgtttgactattgcaggactagcacctaacactgttgttgtttgtatcctgttcttccttttcaaagcctacgtgccaaatacatgatcagcattcagcaaggtggatggtctagaaatcaagttgggcagtcacaggccggcacacgcttgatttgacaatcacttgttaggtggaaatgcaaatgaattgtaggtacaaacccacaatgttagtagcttaattagctcatcagctaaacgcctaaacctactctgaattaacttgaagtctgaaacgtacgtgatcgagggtactcatttcagcacgattaagcacacagcaatcaaggtgcttatatataagatgaagatactctgtctgcctgtctgtaagtgccagacatgcaactcgatcatcgccctagaaaacacatctctgtcaggcctgagcaaccactgttgttttgcaaataaaaatttcagattctcctttctccgatgatgcagcattggtttcactgatctgaaactagctacgaggaatggttagctttgtctaacaacttccttctgtttgagctttgggtttgcagacaatcatgtattctatggtcgccgggatcgccacggatcaaccggtgcagtgctctacgtacagcacactatatatattgcaaaatggatacggcgtttgttggaaaaatattttgtagaaaacacatatatagtaaaaatttggaaactaccgttaaaactaaaactgaacacctgagatttatacacatcatcgagagtaaaattttactcccagacaatttttttactctcgataacgcggacaaatattatgcgcctatttcataattcaacggtagcttataggttttcactatatttctagtttgtattacatattttcaacccgatggtgagttgttccaagctgctcctctgctttttactactccctgtcaataggttaattaagagagacataactcaatgtcaaaacaagcttaccaacctcaataacaactaggaaaaagtacaccaaaggtccctcaacttgtcatcgagttacagaatcatcacctaaccagatatatgatatctctaacttagaaaactgttcactttaggttcttcgatggttttgaccccggttttatccgacgtggcagctgagtcagcgtggacccatgtgggccccacatgtcagggtgtccacgtcacctttctttcccttctctcccttctttcttccgtctctcttgctcttctcactcgcgccgaacacgttgtgggaggcgcggccgggggcgacgccgaaaggcgaaagaggactccgcagaggcgagggtggactcgacgtcatcgacgcggccagcgccgaagagcgcggagaggagcgccgagagggagacgttggagcaggcaacgggcgcggagtcggagaacgcgcggagggcgttgttggggcccgagaagagggagatggcgcgggtgagaagaccaggggacgccagggcggagtcgaggagggcgcagaggagcgagacggcgaggtctaggcggcggaggcgcgggagacaggacacggcgagggaaaagagcgggcgggagccgtggaggcacgggtaatcgtcggggcgggagagcgtggtggcgacgagggagtggatgcgggccagatcggcctcgccgcagacggcgagctggaggtcgaggatggaggagcacgtgaggcgggggtgggggtccaggtgggcagcggcgggtgatcgacatcggggagcgcggagaagcgacggaggaggtgggcggggacgctagcggcgaggagcgggttgggatgccggcgaaggagggagaccatggttgagacttgagaggaatgggggtttgggaattgggatctcccctcttttttctcccttctctaggggaactcgtcaaggagggcgaggccatggtggcagtcacctcctccccttctcctgtcgttggccgccgacgccctcctccgcaactgccgtctccccttctcccgcgtcgccgccaccgccggtcgcccgtcgtcggccgtcgacaccctcctgctctcccgcctcaccccgcggcctcctctccactcgccgtccggcctgcagaatcccagtgagaagagtgaggagagagaggaagggagagaagaggagaaagagggagggtgatgacgtggacaccctgacttgtggggctcacatggtttactcagccgtaacgttggataaaattgggtcaaaatcactaaagaatctaaaataaaataaatggtttcgtagttgaggggtatcgtatatagttttgtggttagaggatgattttgcaactcgatgacaagttaagggacattcggtgtactttttcctaactgctatagtagggagcttttagcccatctgcatatagtggcctggcccacgttaggcctgtccattagtatgggccttagcccttcctctttaccgaaagcttcaccttttgaattgagcccatatgaacaataagacactatccatgttatttccttaaagataatagaattcattttagtctttacttttttaaaagaaactataaccaattatatagaggttacagaacgaacgatcatgaattacgaaattatagcttgatttaaaggaataattaaaatcgcaccattgatgtctatacatttcaatctttaatttctcggcacagtcgcatgcactcgcgttgcctcccaaaaagctcaaacagtttttgatttcgacatgcatagatacaagttgtggacaacttattcaggtacagtgcttacgtagttcaagatttctttatgacctgctttttttcttgttaattatggccttaatttgatactagtatatatcaagtggttcgcaacgcaagcaaactaaagttgcaatcacgcgggaaaagcagcaatgctgaaatagctagctagttagctttcacaattctgaaactattttctcctcttcttctgttcataatgtacggacacgactgtgagtgtcagagtgtcggcacaacaatttgattaatgatgcataggagaatgttttatgttgagcatgtaaattgttgaatacttccagtcggagaatgtttgatgttgagcatgtaaattgttgaatacttccacattaatatgcacgtagtatgggattaaaagcaacacaatggaaaacaaatttcggtatggtatatccttccccatatgtcttgagaatatgagataagtttagttaattaattaatttggttttacagatggaataaaatgaaaatatacgttaatatttgcatgcatgggttatatttgaattataacctgtgaaacagaaaaataacttttttttaagtacataataataggatctactatgggtttaatggattcgtgccggccggtttgcgcaaaccggcccagttgcccccgggtagcctacgcgttgtaggcttgcaactttttgcgagttggactaaaaaattggcttacagcttttaccccacctggcccatatccagcacacatacctttaaaaatttctatatataaagtttttatacagaaactaagtttctactaaaacgtcgtagctaaatcagaattggatgtgcccgcgtacgtgcattttgaaaatgtttctcaaggaaaactttgtgtataataaagtttctatgtgaaaaaatgtttttgtgtataataagaaatgtaaatacgtgctcctgatagattcacttaagtgacatgcccacgcattagacttttactaatagagtgcgtatgacacgatagtcattaagtcttttttaaaaattcttttattcagttttatctacaactaaaatctaatgctgactttcctcggaaaacaatcgagacttttcagttttgctgttctggagttgtacgcttcctctacaaacgaaatggagccaattcttctgcctgttttctttttcgcgaacgctgcctgttttttttactagcccctaaaatggatgatcaatcgtaccaacaaaataatacttcccccgtttcagaatataagtcattttagcattttctacatacatattgatgttaatgaatctaaacatatatatctatttagattcactaacatcaatatgaatgtgaataatgctagaatgacttacattgtgcaacggagggagtaaaccctaaggcacgttattgcatcatcgacaattaatcattattatattatgtccgactcgttacatacgacagatgatgtgattaattagaactgcaatttgcaaaataacaattaccacatctttaacgtattcttccatttaagtagcttagttcactaattgtaattaagcgctaactaaccatttggccagtgtactggtaattactaaattaaggagattatgatcaagttgtaaaaggatccaataaaacgattacttattagaactctaattaacctgttcaacctaaccttgtcattattttggtttggagtttgtgttgtctagcgtgattaatcacgcgtgtaatgtgcgagagctgcaacttaacgaatcttgtctcgttgtcattggccagagtcagaattaaacacagacgtgcatttgggtttttgctgtgttaatttgtcataagattcaccaaatggttcaattctcacttttgctctgttcacgagtctgtctcttccatagctcatgaatgccagggcggcagggcatcttcatctcattcatcaactgacgaaagtagtacgtatgatcagtcgaccaaattgtttgcaaatcttaatttgggggtaatgtagttcatgcctatacctatattcgcttttcactagatatttcagagagagagagagagagagtgatttagagggaggggcattcctctatacattttttaaaaaaggaaattgtgattgtgttggggattgaacacgggaccgtagtgttgaaactacatactccttaccactgcactgccaattgcatctcattggatatttctgttattcagagatggaatacagaattgtgtcactagtatcatttgcatatcaaattatcaatgccaagttgcagtgccaacttttgtatgtgcaagcaacagatcttggcataaatcatcacgaggaagataatattccaagtttcgcattctgaaacctagatatataaatgtctgtaacttactagcttaggccggtggttgtcgaataaattaattctttgttgagcatcgcaagggagtgtgtggggtatgatgaaatcaaattcatggctaggaatatataggacttaggaggatccttccatggccaaattgtgcattgtcaggacatgcttttcatagctgtagatggagctttcatccatgtttttcaaagagcaattagcaagcaagacaggatccaagaccacagaattggattaagctacggccactagcgaattggccatgcattcatatgccaaaagccagcgttttgttgactgctgttgagatattgtgagcaattaaccagatcgatgttgcgcatgcgtgactgtgacctttctagtaggaactccacttcacccacccactaaagcaaaattacttctttttttggtttagcagaatcttgggctttaacaattgcacgagtaattattccaagcggttactgattactgggcaaggagatatcagcagcgtgcttggggaaataatgagatgtatgctaagatggacacagaaatggagagtagcctagtgcaaatgagtgacattggactatttatataaaacaaatgttcttgtaggaagatgaaatggatggtaggaatcgcaagaaattaaacttacgacatctggaaagattaattggaagtttccgacactcaattgcaccctacataacagttagtgtagaatggaatggggagaacaccacacacccaatgggaggggtggccatgtattaatataggaagcacatgtacaggatcctcaattagaggagaatacaaggaaagaaacaatacaatacaatctgtacatatatggcaaagtattcctaatacccgcccgcagtcacagcgggaggatcacggatgcaaaggctggatcgaaaatctgtaaataactgcacaggcaagcccttggtcatgatatcggcgaactgatgcgtagatggaacatggagcacacggacctgtcccagagccaccttttcccgaacaaagtggatgtcgatctcaatgtgcttggtgcggcggtggcgaaccgggttggcggtcatgtagatagcactgacgttgttgcaaaagacaatggtcgtggtggagatgggagcatgcaactcctggattagctagcggagccaacagcactcgacaaccgcgtgagcaacgacacgatactccgctttagcactggagcgggagatcgtcgtctgtcgcttggaggaccaagacaccaggttatcaccgaggaagatgcagtagcctgaggtggagcgacgagagtcggggcagccggcccagtctgcgtcggagtaggcggtcagagacccgaccggaccggtgccgatgtggaggccggcggagagtgagcccttgatgtagcgcaggatgcgtttaaccaaggcgagttgaggctcgcgagggtcatgcataaaaagacacttgttgaacggcataggcgatcttaggacgggtgagggtgagatactggagggcaccggcgaggctcttgtactcagtaggatcggcaacgggggcaccctccgaggcggagagcttggcgcgagtatcgactggggtggcggtggggtggcattcagacatgccggctcgctgcaggagatcgacggcgtactgtagctgggacaggaagaggccgtcgggtgtgcgacagacggagatgccgaggaagaagtggaggtcaccaagatccgtcatggcgaactcggtgtgcaaccgagccgtgatgtggcgaagaagctcagcggaggaggccgtgaggatgatgtcgtcgacgtagagcagcaggtaggcgaggcgatcaccgtcccggaggatgaagagcgatgtgtcggaggccgatggcgtgaaacccagctgacgaatgtatgtagcgtagcgaaccattggtaccaagctcgaggcgcttgcttgaggccgtagagggagcgctggaggaggcccacagcatcgggagcaacggggtcgatgaagccggacggctactggcaatacaccgtctcgtcgagggtgccgtggaggaaagcgttcttcacatcaagttgatgaatcggccaggagcgggaggtggcgatgctgaggacgacacgaatggtagagggcttgacgatggggctgaaggtctcgtcgtagtcgatgccatgttgttgggagtagccacgaacaacccaacgtgccttgtgacgggcgagcgagccatcggagtggaacttgtgcttgaagatccacttgccggtaatgacgtttgcaccaggtgggcgagggacgagccgccacgtgccgttgttgatcaaagccttgaactctttggccatggctgcacgccagttggggttggcgagggtagagcggtagttggccggcagtggagaaatggccgagagcacgactcgatccactggcttgagagaactggtcttggagcgtgtcaccatggtgtggacctgtgggggaggtgtgggtgcagccggagcgacaacttggggcggaggagtcggcgccggtcatcgttggtagtggtacgggaatggcgccactgtgccggctggtcatgaagaagacgtggacggccggatagctggtgacgacggtgccctgcttgaggaagatggagacatggcagccggctgtgtggaacttgccgtcgtcccgcccgtagtgtgatgcggctgcacgtagtagggcaggtgctcgtcctcagccaagggagcacccgtgggcagccactgctcgacgttcacagggaatggagcgtgcggcaggtgcggctgctcaacaccagctagtggtggagcgaccacagagggagcaggagcatcctgcagtagaaaatccaaagaggaagcatcgacgagatctcccgaaaatggaaactgtgtctcatcaaaaatgacatggcgcgaaataatgatgcggcaggtggatatgttgaggcagcgataacctttgtgcgaggaggggtagcccaaaaagacgcaagcagcggagcggggtgcaagtttgtgggcagcggtggcactaaggttaggatagcataaacacccaaacgctcgtaacatggaataattgggaatcttgcgatgaagaagctggaatgggattgagttgtttaccgaggacgagggtcgacagttcaggaggtatgtggcggtggctagaccttcggcccaataggagggtggcatggaggcttgtaggaggagggtacggacggagttgttgagggtgcgaatcatgcgttcggccttgccgttctgcggggaagtatatggacaggagagccgtaacagggaacctctaccagcgagaaaggaggtggtgttgtgattaacaaactcggtaccgttgtcggcttggagacacttgaggcggtggccgaactatgtgtgggtatactcaacgaactcaacaatatggcgatgaacatcggatttgtggcaaagaggaaacgtctagcaaaaatgagtaaaatcatcaaccaacactaaataaaatttgaagcctgaaatgctcataacgggagaagtccatacatcacagtgcacaagttcaaaaggagaagaggtactggaggtggacttattaaaaggaagacgagtgtgtttccctaactgacaagcatggcaaagggaattatttgtcttggagcgaggtatggcggataaatgttggagagtggtgacggcggttggacccggatgaccgaggcggcgatgccataacgtggaggaggtggcgaggttgcagtgcgctgcaatggaaggtgcagcggtcgggagggtgtagagctcgccatggctattgcaatgaagaatcacgcgccgggtccgagggtccttaatagaaaaaccaaactcgtcaaactcaatggaacatttattgccacgagtaaattggcgaacggagagtaaattgcgaaccaaagagggagcaacaagaacatgacgaaggtcaaatctagtggtgccaatagggagaaaggaagtgccacggcaaacaaccggaatggagtgaccattactaacggtaatataagtttgtgagttggggaggcgagtaacgagtataccgtcggtggaggacatgtgcgaagtggcacccgtgtcgagaacccacgagttggggttgtgaagcgttattccattgagagcggcgacaaggctggcttggtcccaagccggctggacagaccctgcagacggtggcgaggagtatggcccggcgaaggtagtgtgagcctgaggatacggcccaagtatctcggcgctgggagcacgccagggttgctgctgtcctgcctagggcgagaagcacacccatggtgcagcttggcatggagcaggggcagagaaagtgctggtgccaaagctgttgctgccgttgttctgtccaccagggcgtccgccgaatccaccgccgccgttgccgccggagttgcggttgttgttgtggccgccgttcttgcccttgttcttgccgctgttgccgccgccggcgcagttctgctgctgcccaccgctgccagaggagtggcaagtgcccccggtgcagttggagtgggcgttgttggctgcgacgagggcagtctcggactggacttgtaccgagttggcgttgcgaagctccttgagaactagtgtgttcctcgcagaggcgaaggacggcaagacaggggcgctcgcgatgttgtcggccgtgctggtgaagcgcgagttgacgccgcggaggaggttgaggacgagctgggactcggtgacggggtggccgacgtcgtggagggcatcagccaccgtcttcatgcgctgacaatagtcggcgacggagagatcgccttgggtcatggagtggaactcgtgatgcagatagatcgcgcgaggctccttgttggcttgaaagaggttgtcgatggtgatccacaagtcctgggccgattgattaggctccatggcgaggtcgaggacatcgtcggcgacggagccgaagagctagctgcagaggcagcaatcggcctgttcccaggcggcgtcggggttggtgggaggagcagcgtcaagatgatcgaggagaccgaatttcccacgcatcgagcggaagaaggccttccacttgttgtagttggggttacgaagctcgagggagatcggaacatgggacttgacggcgatggtcacatacgggttgacgaaaaccggggcgacggtagaggtggaagatgacaccgtagcggagtcggtggcagcggaagtagccgaggaagtggatatggtgagggaagtggggcgcggcagccagggaggcggcgatgctcggtggacgcagcgaccagagaggaagcagcactagagcagcggaagaggagaagaaaacttagaatctgataccatgtagaatggaatggggagaacaccacacacccaatgggaggggtgaccatgtattaatataggaaggacatgtacaggatcctcaattagaggagaatacaaggaaagaaacaatacaatacaatctgtacatatatggcaaagtattcctaatagtttgtactgaccaaatcaagtcagtgtggtcatatgcatgcaggcatgttggagtaaaaaagaaattaattgtcagtataacagcgtgtgcattgactgagtagttgcaatttacccaagtattgtcacattgtgacaatcacaagtagtaatgactaattaacagtggaccaaattaaaccgtgttccgcggctcattccttaatctgaagctagctaggtaaggttgttcttcctttgcaggcaggcagaggaatatatggcacattcagaaaggtgagatcgatgccacgcattcatgcagacacatcaatagatagatagatagatgtacacgcacgatcgactcacacacacggttcaaagaggcacatccattcatcagtcgaagtctgaaaaggaatcatcagtcgttgctgcatcatatcatatcatcggttattcagagaccagaggagtatatataagcaggtgaggccggcaatgacgtggtcagcactgacgagtcgagcactacatctctcgtccaacgccaaactctctctctctctctctctctctctctgcagatagataggtagatccgatcgcggcgaggaagatcgatgagtcggatacacccttcgtatcaacgccaagatgccgccgccgccgccgcctcaacggcagcgccgcgagcggcggtgtacacggtgtggaagaggtccagcatggggttccagggcaccgacggcttctccgtctacgacgacgccggcagcctcgccttccgtgttgacaactactcgcgccgccgcaagctcttctccggcgacctgctgctcatggatggacatggctcgcctctcctcgccctcaccccacaggtacacttgtctctgatcttctagtcattcatgattcatccactgcaaaaatcttgcatttgcatctcagattaattaattaattaattaattacctcctataggctatattcatgcatctttgtctttgtgattgtatactagtattacctaacacctgacaatcagtataatatttacgtacggtttcggtcgatatattgagttagctattagcattcatgaacgatcgtcgatcgatcatcaattcttcatacattcaaccagcaatcgtttatattctgctcgtcaatcatcctcatccgaatgtagacttcattttacatatcttctctcaagatatagaacgatcaccaagtttgcttccaaaacttcactgaagacttctaaatactgcaaatcctgctttgccgagagccccgagactagtgtttcgtccatctacccgatctttcatcttctcgatttttttaaaaaatgtatctccaggctttcactgtttcctcaaaatattcaccaaatcacaagtatatatgtttgtcttgtctatttgtctcacaaatactaaaagataccatagctcaccaaaaagatttaaggcaaattatcatgcatgccgacggtttttaggcaaatgctatcaactacctccactaatacatctagctaggaaaataattagtctaaacacttgcagacaaaatcagctgaccaaagattaaaattcattgctttcatcgttccagcctcggttattttgatgctgttctgctttaatttgcccaaaatcccatacagagttaaaaacaaaacttaaaaaatggagaagttacatacagagtttgatttatccgctagttcattctactttccgactgaagttcttttacctcttgttacaagtgcagcagatgggccaaaagaacagaaaccattaatagaacccatggggagtaagtaagaactaagatttttattttcctttctgctgttgcaacagattatcagcatgcatgaccaatggaattgttacagagcgtcagaagaaggccaaggcaagagggcaagatcacaacaactcttctcaatgagaaaatgctcagttatgcaaagcagtcatgaagcagaagtgcacatgtcaggatgtacccatgcgtcgtcagatcgtactggccatgttcccgccttctcaatcgagggcagtttcaagagaagaagctgcaagatccgcaacagcggcggtgaggaggtcgcaaggataacgaggaagaaagctggagcagcatcattgtcactgactcttgctgaagatgttttcagtcttgaggtccaaccgaatgtagattgtgcgatgatcatggctttcgtcattgttctggatcggatctgctggaagccatacacacctatgatctgttcttcatagttcaaggtgatgagctctatttgacatgtaggaaatagatgtttcaattcaagtgaaatcgacgaattaactcaagaagctagtatgagactgtagtcactaattgtactgtcgattgactgggactaacataacatgtaacttgttctaaatttgactacttatgaaaggaagatcgaattagcagattgaatcaaaatctcttgcttcctcctactgcaacttgaaatgtatgtttcttttcccatgtggttctttcaatccacttgttaccaactgtgagctgttaccaactgtttgggcagtatcattttaatgctatccacctagaagcaccataagaacaaagcactattcatgcccaggacaatgcaaaggacaaaagtgaccaaagtttgttgaatcctaaaagagaaatgctcaaaataatagaatcaagatataagcaatgacttcagctacctttagcagtataaagcaagttgggtatactcacactgaagaagaggcaaaactagtgtcctccacgaagagagagccggagaaggagatggtgggtatccatgcttacgtgttactcaatttcttcaaaccagcacttcgtgtttcatttgcattgtacttgtgcttaagatttgcagtccctctcagaaagattcgaaagatattgacaatatactgcaataagacagcgttagtttactaagaaagttttgtttataccaaatattagaacaataaatagtatggacaaatcccaaggaatattacaaacaacttatttgtcttatactcaccagtctttatttatttaagccacttttgatttgtttgctagatgcataaacaaacaaagcatgaaagcaatatggtaataacacatatatatggttattaatacggagttgacagaaggaataaaatggtttctcatcagcaaggaacaacttaacagctaagtatataaattgaaattaatagtttgaacaaggtggaacaaattttagcaactctgcagaaatcattgtttgacttttgcaaaatctaagtcttctatctaacttctgatcactaaagacggaaccgcgacaaaaaagttaaggatgcacggaaggcccattggtatattcacaagttcacataatgcattctggaagcgacatgcacaggatacattctccaccatgagaaaatcccctgtgtacccttgaaagttcacctaatcccttctgtacccctgaattttgctcaatcccttacatacccctgaattttagtttggatctcttccataccctttccactagttgaccgttagttgaccgttaaattcttatgaaaaagtccattttgccctttggtataaagaagcatataaattaatagagtatattgttggagcatagaaatttgttatatgagactattatgtttatgagatagttatgcaccatattatttgcgataaatatacttttagatatgacataaaaaattaatacttatttattagttattaaaagattttttttagcatgtgttttgaagtaataaacaaatctgttgtattactatgaaaacacatatgctacataaaagaacttttaataactaataataaataagtatcaactttttatatcatatgtaaaagtaaatttgtcacaaataatatggtgcatcacatactcataaatataatagtcccatccaataaatttttacattccaacaatatacttcattaatttattatgtttcttcatagcaaagggcaaaatggactttttcaaaagaatttaacggtcaactaacggtcaactagcggaaagggcatggaagggatccaaactaaaattcaggggtatgtaagggattgagcaaaattcaggggtatagaagggattaggtgaactttcatgggtgcacaggatacattctccaccatttaagggttcctttggaagacagaaactattcaggaactttacatgaagcaattcatttcccgcatggatcaggaaataaagtcccatgttgcagtggtcatctcaacaaaaaaaaaatccataatacctcgtattatacccccaaaagctacataaacagtactgacacagcttttactcatatgcattatattctgacatgatatatttcagatttcaaaagaatgcccttcgaatagggctggtgtgatccgtactacttggtttatcatttacagaagtgttctttgtacctaatacattgagcatctacaaaggaataaacatattatctggcagtaaaatatgtacacaatgcaaaataaatgagatgaaaataaggagttcaatattactaagtaacggctacacatatattacaacagaatatcaggtagtatgcacaatacgattagtatgatcatctgatataaaaacacaacaaatcagtgtaatatgtaaaatgcagctgtgaagctagctgaatgctagaggaatagtgaaatccacacaaagttaagtagtatacatagacattttctaggagaaaagagcacgatattctttggcttcttgggccatttcttccatcgttctatcttttctttcaatatccaggtctaatgtctcgttttttgcattcatctgttatgaacagagagattattcagatttatttgatggagtatcagatgaagtgagagttgttccaagcagcatcactaaccatgccattattgttatcattgttctcaaaatcttccttccttcggggaacgatgtgaacgtgaacatgtggaactgtttggccagagtgaggtccgtcctgataagtagcaatatttattcaacttcatatcatacacaatagaagataaagttagttttcattagcttttacaacttttcattaaaaaatgttacgaacatactaaattgtgatctgaaaccacaattttgtgagcaacatcatacttgtcatgctcacacgaattttagctataatatttcttaaattcaaagtgaaagacctcacaggtacaagataaatcgaacctgaattgtgaatgtgagcgaagaagccctctggtactgctcaacacgtacaccaatatcctttgccatgatccacaaatcacgagtctcatcagggctaagatcagcaaatagtttcacaagactctttgggcatataagaacatgtataatttaagttaaggaagggggtgggggggggagttaaaagtcttaggctgtcaaaaatgcagtgccacatacaatccatcataggacaaaggcaacaagagctgagttgccagttgtcaccagggattaactgaagtaattagcacgaccagaaattaacaaggtaaagcaggtagtattaattgtcttgaaatagaaagcacaataacccttctgaaggcaaaaacaagtgagcactgtgatgtacaccactaccatttttcaatgaaccgatatcgtacattacttatgtagttcagtgcagagtctttctttctttcctttttttttctttttgaaacagaggcacatttcattgatgaatagcaagagaagttttttttttttgcaaataataataataataataataataataataataataataataataataataataataataataataataataataataaagtatgagaagttgagagcagataataccgcaatgtgaagtagatactagaaggcactaaattagagagaggagtagagcagctgtgcatacacataattggcagaaataaaggatatgacctgcagggacaagattggaatagaatgatgaacaaacaaagaaggagagagcaatcaggaatgatagatttgttctgaggagaggagaggagaggagaggagaggaaatagctaggtaccagggcgggtgggtcggaggttgacgatggcgaaggagaggggcgaggtgcggaacacctgccgctcggctatctcgtgcggaccaaacctgtacctgcttcccgcgaccggatccatctccttttcccctcttcttggacggcgacggcgatggagagggagaagaggaagcagcagagaagcagctgagttgcgttgggtctaattaattgtcaatggttgtggaactgaggggccgggtcaagtcaagtcaatgatcttgatgggctcccctcccacggtagaagccaggcaagcccatcagaaatactacgtactattcaaatcaggcccattaattgttgtcactttctctatctgaattggtcagcctgcttgtgctttgaataagtagtagggcgatgcatgcatgccagctccttcacgctaagccaaatcccaatccaacgtgccctgcactatctgtccacaccttcactcccattcgttcctacttgcaaaattaagctgcatgtccttttttttcgccggcccatttcagctgctctcactctcacgcattaataattaacccaatctgcagactgcagtgcaggcaaagctaggcagccacgtacgtccatacgttgcgttgctcatcgattgatcgatcgattagccatctaattggcaaaaccaaatcttgattatttgctagcttcccctagctaacataagctatagcctatagcttcctccctccctctcaaactagcttagttacttccaccagcctcatcaagctatagctagcatgagaaggatacagatacacccctcacatggcggcggcggcggcaccggcggccgtgcacgtcgtcaggcggcagatcagccggtggtgtacacggtgtggaagaggtccagcataggctttcagggcaccgacggcttctccgtctacgactccgccggcaagctcgccttccgtgtcgacaactactcccgccgccgcaaagctttcgccggcgacctgctgctcatggatggccacggcacgcctcttctctctctcaggccacaggtcgatcaccttctcattcacttcattacttcttctctagctctactcgtatacgtatattatatcgctttagcagcgacctgtttactgatcgatcagtttagtttgctagtttggaatcatgtatatatcttaagataggttgggacttgggactagcgcgtctttaattctctttcattcatttctcactttaagtctttcctatcataatctatagacgatggccgtgtgcttactgcttctgctttgctttcagtccaaaaatttagggtacttagataaagaaatttcagggtatacttattagctgcaagatttatataatctatcaaactaacaagatccctattatatacatgcgcatcaagtttaaattctcaacttaaaagattcagtcttattatttgttgctttgatcaaagctttgctgttatattaatcatgcagccaaacatgcattacctattcgaggctggaatccaaccgttggatttacttttgcttaatctcctatgtataaaattatcgctttgcttccttgtttccgttctctgatgatttgattaaaaaaatccagttgtttgagtactccaagtctcaaccgacaaattctactgtactcataatcgtcctaattaactcttaaaaatcttttatgatagatattgaccagtcaaaacaaaggaaaaaaaatctatactagtatgttccatgcgtcattctctataataattgaaagatattgtactactgataaaaacatttaattaattttagtctattgagtaggccgacatgtccaagcaaaatgtaaccaaatccaaaaacaagcaaacaaaatgcttgtatcataataacatgttatatattgtttttcaacctttatgtgcttcacattagatctctccatttgcaacttgcaattttcagttaagtgacaaagaagtaataaaagaaacatgatctgcatgattcgttgtcaacttttcttcagccgctatttttgaactaagcaatgtaaaaaacagataatcagcgtaaattaaaaactaatcttcattgctctaatgtgacagattctcagcctgcacaatcgatggaactgttacagagcacaagaggaagaaggcttggacagcacaagttctccttcagtgtcacagcagcaagtcttctccatgaggaagagctcagctctgcagagcaacgatgaagcagaagttttcatgtcaacaagaacaagtggtgacagccaacctgatgcttctcccagccccagcttcagaatcgacggctgcttctccatgaggagctgcaagatccgcggcagcaacggcgaggaggcggcgcggatcacgaggaagaacgccggcgtgatgtccagaccggtcagtctcggcgacgacgtgttcaccctcgtcgtcaggccaggcgtcgatgttgcggtcgtcatggctatggtcgttgtcatggaccgtatctgccggaggccctacacaccaatggcgtgttcatcatctggaaattcagtagttcatagtggagaaatcatcaaatccaaggaaaaataccatctaaaccgcagtagtagtagtttgctgtaaattttatatattgcagctgagatgtaactaaggttgtgctaaattttgtgtatttgcaactatttcacatgaagaaaatttgcgaaaagttcaggctttataaagagtacataatgtgagtatgtgacctcagagtgcacatttctagcaagagaacgacaagcacttgctattctgagtggatacctgaggcactatattttttgccgaaagaactacttttgcatttgcagatgagaatctcctgctgatggagatgaagcatgcatactacctaggagtatatattccagcgaatatttgcaacaacgtactcaacacaacaatagcctctaagcagcagagacaaccagtggttggtatgcaagccaagcaaaccaggtcacacgactacgacagaagcttacttggtgttgattacctagtacaccggcaacaatcccagccaacaagtgaggggctccagatagcttaccgttaccaaatcctcaggtctggtgcaacagtcacatcccacttcagaacacaaccagccaaattgccaatcaaattgttctttaccacttgtcaaaggtagctacaggcgtatcaaaattgcaacttatggcatatatgcataatcaataattctgttcagtgcatcttatcatctcaatggccctcttgatagcaagcatgatgcaaagatgaaaatgaccaaaagtgctcaagtcccagaaaaaaaatcagcaaaaagagattaagatctaaccagttatttgagctatcttccagaatgtatatgcgtaaagcaagcacaagagttaacaatggagactaatcaaaatcagagcctcttatgttctaataacattagattaaatgggattgatggaacagtcccttaaccaaagaaaagttcacaggaggcaaaaacaagcagcaaaaagggtaaaaaccatggttcatgtttttcagaaacataaagactacactacacaatgatacaaaattaaagtagtattttcatggttcaatcagatcattaaagttttcatgatcttatcagaaaagtgcgccagaatgatataaagtttagccaggattacagccattggccacaaattgccagaattattgtattaatgagtcaggttaacttttcgaatgttggctagatgcatagactaacagtaatggtagatttcatggacagtcggcagaaggaataaaaactttgagtcggcacaaagagctagatagaaagttgagtcatgatccatcctgtctaacaaactttcagctactatgccttgtcgaatttctggcttttctcacaacaaaacatgccaaaaacagaatttatcgcagcaatctgcataagcataagagaacaaactttctaactagcatgatcaaaggaacaaaatactgtgtctgaataactaaagagcaacggaaatctcaagaaaagtcaatttttcagctgaaactaaatgcaatgggttgatagcatggattgcaactctgtttgatccaaaagaccaaaagaatgatccttctttcttttaagcaggctttcaaataggtactgaaaggttatacgatgggttttgttactatttgtagattgtgaaaccatagtatgacccaaccagctactgataatatatggctgtgtaatttcatgtggtacagggacatctgtcataaaaatataaattttccaacaaacaactactgccacacggtggcataactagttccaaagataaagatttataagtaagaacacattttacaacaaacaagtatcacaccaaattagataatttcataatattattcgaagacttgaattcccatgatggatgacaaacagttacaaaaataatttctggagaagagagtgcaatttagagacagtttacaagaaagttatcgcaaaaatacatctaagagaagagagcacggtactcattggcctcatgagccatttcttccatggttctatcttttctctctatgtccagatcaagtttctccttcaattccctctctttgacatcaatctattagaaagcaaacaagtaagaattttgtggtaaatattgggttgaagtattggataaaaggaggtcgattgagaaaaatgccacaaaccgcatcatatatctcatcatttttctcaaaatctcctttctttctagggatgacatggatgtggacatgtgaaacagtttgaccagcttctggaccatcctgtaagcactggaactaatgagtaaatagcttaatattattatataagaaaataattcaagacagacatgcaaagttatatctagggtaaatgataaaaaggaagttaagaatacttgtatggggaaacgaattcttttttattctacacacaataagatcatcatatttaggacgcaataagcaaaacccatatggtactcctcttgatggtatgattaaacattgaaataattaaaatacaaactcctgctaaccgcagtggcataaatacatagaccttacctgaatagcaaatgtaagtgaagacgctttgtggtactgctcaagccgtacaccaacttcctttgcggtaacccataagtcactagtctcattagaacttagatcagcaaatcgtttcacttcacgcttggggcacactagaacatttatatattgttaagggaaaacaacatataagatatatcatattctcaatataccacagtagaaatcaaaagaagatggttaaccaataaatttatggaagatttgctcgacacggcagtacaattgacagttactccatatcaatcacaaccaagtagcagataaatactacatatggacatcatctcatggtaaagatgacatcctctaagatgatcaatcaagtaagatgacatgtggcaaaataaacacctacatcacctcttcagccaatccacaaaattgtccttaagccagacttgatatttgtcaagtatagaagaagggtaaaccaacacaatcctttcatgaataaataaattccacaggtccatttatttactattaatttgaatgcattgatgaaactttacccaaacacaagccagcaaaagcaagctcattttatcgacgaccccaacagaactagctagcagtgcatgcacgtgaaagaaatcaactgtgattctgtaaatatctccaaaacagcgttttgcagaaaaagtagcagtctcttttggtgcaattgaaggatatgacctgcacaataaggaacggtatggttaagaaagaatagcagaatatgaaccaaccaatatatagcaataggaattaaatgcatgcagcaacagcaaggtcaaagttgacggaatcgcatatggtatagtggtgaaatggtactgtattaaggtgaatctgttaggtagaagaagagatcaattgcagaaaaacactactatatgtgaacagactactccctccgtttcacaatgtaagttattctagcatttctcacatttatattgatgttaatgaatttagacatatatacctatctagattcattaacatcaatatgaatgtgggaaatactaaaaatgacttacattgtgaaacggaggaagtagctagtatctgcgtgtacattgtgcttgttaagcgtgttcaagaaaacaaaaacgtgcttgttagcatttggcaggtaccgtatgattcgcgaactggtcatcaaacaaattagcaatggcaagctacaaaacccgtctctgtaatttccgctacaaattttgggactgtactatggtactactcctactgagcaaggggaacggaggcggctggagggaataaagcgatcaagtggtaaaactgggcaaggggaagtgaggaggttattaccagggaggagtgggcggaggttgaccatggcgtaggagagcggggtggagtggaacacctccctcgcgtcgatcttgtacggcccgaacttgtaagccgcctccatctcctggaccggcggcggcgaggaagaggaggagatggctcgcggcagaagcagtggacgacggcgaagaagggtaggaggcggaggcggagcgagagggagagggagaagggagaagggagtgggcgcgcggcggaggacggcggagagcgccggaagcatcagctgccgtctcgtcggcgaacgaatcgacggaggagaggaaagcaatgtagagttgttctgggcctaaaattaaggtgggcctgcatttttacggcccatctgagcccatgttgttgtctggaccggtccaaagctgagtggtgctaatactcctactttagccctctttgtttagacttagacttattggattagacttttaagtcagcttattggcttatatgatttataagccggtggatttaatgtcctaagtttagtggtagagtcatacatcaacctcacataagccaaaaaagcttctccaacctagcatttggcttaatagtgttagagtggcttatggcttcaaaaaaaccaaacaaataagctgcttgtttgtttaggcttacaccttttggcttataagttgacctataagcctaaacaaatagggccttcaaataggctcacccaaaaaaaaatgcaccgtgatgaaaatgtaatcatgtcaggttgacttgctgaaaaaagtgaagtggatagagtgatgagagtggatgaactaaataatcattttgacttttgctctgaccaaaatcattaaactaagagtatacatatatggagctagccagcatccactgcctgaacgaataggagttgtcatgcaaatccactgcaaatttaagtgaagtgatgatcgatcatgtgcgtactttctaaagtagtttgtgtcatggatatgaatatgatgcatgcacctgtgaccgaaaagctaccttcactttgcaggcatatattggcattgtttggtgacttgacattaaacaagttgctgcatgctcatcagctttgaaggagtaagagataagtcaatctacaaaggtgtttatacatatatttttgtttatcttcaattgttcatggtagtgcttgctgcgtaggttttgcaatgatcgcctgattattattaatctatctatgtactctctctctctctctctcactacctacttgcacggatcaatcgctgtttgacttcatttgatgagataatactaatgaactagtgcaagatagtgttcagtcaacagcaatggagataatactatttttatgaccttgttcaaaggtttgtaattttccattaagctagtgtttacaaagcaaaccactatatatgtgcacttgttacttagagcaatctagctagctagtgttatcatatcatattccaaaatccttaaatcaggttagatacaacagaaacaaaaacaaattcagaaagctgccagcacaacaaccacaattattttttactagctacgatcagttgtgttatccaaaccaaagtactagtataacatttcaggctttcagcatatatatgcttgctacacctgtatccccatttttgccctgaaacaaacaggaagtactaaacatgatagtatggcttctagcctaattgcactgtaatcggaatgataggggtgaactgtgcaagcacatgtacgtagcatgtagtagcaatataacctgaaagttgtggaaaagctatatattgggacattgcagcttcactgccactactgatcgatcatcacaaccgaaaaagaaaagattttgctggatatttaactatatacactcagctaagctggagtgaccacatgggccagtttggatggtgtgcttttgatgatgttatgtattccctcccaaacctgcaagctgcatgcatgcctattctgtgtcttaagcaccttggacaagcaactaattgaacagctcgcacagagcaatcggcaattgcaacattccaaattaggcctggtttagttccaactttttctttaaactttcaactttttcatcacatcaaaacttttctacatacacaaacttccaacttttccgtcacatcattccaattttaactaaacttctaattttgacgtgaactaaacacacccatatcaacaatgaatcaaagttgtccatatgcatgcatgacctagaaaatgccaagatctctgcaagagacagcccccgtgcagtccaaaatcaatctagctttaagctacagttagagtttgggttaatttgtttggtagcgaaatatcattcgaccatgacatgcatgtggcgaaccatgcatatgcagtttgcaaaaaagatagctacatagcgtggatggaatacttcaaaagcatatcaaaacgatacgatatgcatggtgtttcagtactacaatctttcaagaggaaaaacaaaaacttcatgtgggggcagggagctgcagatgcgtgcctcttcacttccagagaaaactaatggtatgtcagttttaggagctaatacacactgccattacatgtgttatgataaggattttaagccgtttgcgaagacaatttaggtactgctccctctaggttaatactaatacttattgttttgagagaaaaacacggtctaaaacacaacttcagtcactgttttatattataatctatatagaaaaattattaaatatatgattttatatatgatgttattataatatacctagtcttcatatttataagataaatattttaaaaattatttatagttaaaaaaatttataatttgataccaaactcattcaaaacaataaatatcactctctccgtcctaaaatataagaatctagtatcagatataatattttctagtactacgaatctatattagaaaatatcccatctagttttacgtttttttatattttgagataaagggagtatcaacgagagatgtatgcttagcaaagcacatgacttgagtgatcagacacacatgaacgaaattgttaggtaactgtctccatctttgccttcaacacaggcatgcagccagtgtatagaaggagaagaaccctgcttttgccccccttgcagaggaacaagctatccaggatatactattgtcgaactccattccaatgtctacccactagtatatgttaactggatcatatcgagaaggcaattagttaacatactgccaagagttgcacatgcatacttcatatatacaccttctggttacttcatgtgtctgagttctctgaatttgcttaacccatacatatcattggactccggttaattacctcgaactttgtagccaccccaccccttgcatcgatccgcatctggtatttataagatttagggtttattcggatcagagtaatttcacaggatttttggaggaatactgtacataggaattttttccttttttttattcggatcatgaaaactggttgtaagaaatccaaagtaaagtttcctttgatgctgatttcacaggaaaagtacaggaaaaatccatccaccttgagctcattttttgcttcctgcatgcaaatcctaggcaatcaatttcctgtgatccgaatgctatcaacttttgtattcctttgttattcattcctctgttttacacttagggcctctttgaatcgcatgattgagaaaacgtaggaataggaaaaacgtaggattttgataggaatgtaagtgtaaaacagaggattgtaaaacacaggaaaaacacaggaattggatgagagatatagactcaaaggaaaattagcaagaggttgaagctcttgttaaatttcctccaaaatctctataggattgtccattctataggaatttcaaaggattagataggattcaatcctttgattcaaagggcttcataggaaattttcctataggattgaaatcctctaaaattcgtatgtttttcctccaaatcaaaggggcccttagattcctttcatattcctatacttttcctatctatgtttttcctatcctataatccgaacaagcccttaatgtctatacatacaaaatgagtatatatgttgcaccgatcaagcatgtaaggcatatattgtaaaatcaaaggtgttttttattattattttgtgatgaacaattggcattggagattatcagtttagatatttggaatttatttgcgaagtggttttggagatgattggatttcataggtgatatacaggtactgtgctggattgggtacggtcacaccgggcacgggttgccggtcagaccggcgtgtatctcgcggtcagaccggcgtagcccacggtatgaccggccgactctgtgtcagtttcggtttcgggttgtttgtttggatatccgtgattgtttcatgattatgacttctagacggatattatgtgtatgaatattatcgtttgctactaatgagtcaagttggggatagcttggtctcggaatatggtttctttctttgttctatgtgtaggtgactcgagatgtcgggagagtatttgcggtgatggaccgggagtcggcttggggataagacgacgtccgtagtggtcagagatcatgcgggatactaaggctagagttcaatacacgtggttggtgaagattccatatggcatacgatggaggtattgtgtgtgaatgggatgcagagtcgaatttggaaggagtccaaatttggtatgattggttatgtaaagtttgtttcttgtactagagggtttcctagggtgattaggacttctagtatgagtttggttcgtggctttaggctgcctatctcgggtataaatagagggggagtgtgaggcttcccagtatcgcttttgagagcaattgagttgatagttgagttagggtttcgagtttagtcgaaatttttataaggagtgttgttggtgcactttgtaaacccagagagaatcgataaagtcgtcatccactttaagagttcttcgatttgtgtttcaccgggtttcggcgatctaaccggcggcgcaccggcggtcagaccagcggcattgcgccggttagaccggcgtctacgacaggcgacaggagctgatctcggcggtcaaaccggagatacaatctcggtcagactgacggcaaccaggcgatcagaccggcacatctacttcggtcatatcgcgatccgttgaatttgaggtaacttttatttccgagtttcggtttttgggtataccaaccattcaccactctctggttggcttagttgttctgattcgatatatatatatatatatatatatatatgctcatagcaacagcgacagatgctagtgaccatagtatatctcacacgaacaaattagtaaggtatatacgggcaaacatactcaaccgattaacgctagtggaaatataggcatcagcagtttataaagaagaataaataattgtacgcgttattttactatctatattctcaggaatagatgaatagtacatgatagaatagttctcatttgcccaccagtactgcaagtgactctgactacacaatatgtcaattgtcaatattcttccaaatgcatgtaatagtctttagaggttttctttcgtccttgagaggtatatacctctcattgtctgagagctaaaaaaaaataaaccattaaaaagcaagtttatgattggcaataccaataattttcttttatcgtcaccttatagtatatttgttcataggtcagagatatatgagtaattttacggtccttgagaagatacctagatggagtcatagagtatatagtgaaaagcaagtaggctatgttcgatttagatgttagagcaattatagccctatggcttaccggagaagacactccattactgcataattaatatatatagacatttaaaatatattgtttttacaaaaaaaataaagaataaaaagttttttaaaagaaaatcgtactcccttcatctcattttaagtacagccatgattttccgtgtacaattttacccgtccgtcttatttgaaatttttttaaaaaaaataagattcatgttttatcatctcataacagtaaaaatactaattataaaaaaattaaataagacgaataatcaaagttaaacacgaaaatttattattgcactttgaataggatggagagagtactatttagcatttaaaaacgtgcatgtctacgataatatggtagttcagaagcgaaaagaacatatatggctggttggctggctggctagcttattaaccatacgtacgtgtttcgtggacaatatccataaggctcacatggttattttagatgtagaatattctgatctagtagctacttgtgtgaactattcaattgttccaaagtataggatgtccccggcatatctccctgaatcatttcatctgaatcaaagtgaattattttgccagcatatgccggaccagctgctagctgatcatgaagcatttgttctagctagctccaccgtgcatcttccaagatttattttgtgcgcatcttagccaaagaattaggatgaatgtcgtttgttgcaaggacttggatacatccgaaagaatagttacaccttttccccacctacaaatcttgacgagctaatcatattttgggaaaaaaagaagcgttgatcacttgggaatatctgtttttagtttccagtactctagcttcatccatatcaattttcatgtgaaaatactacctcacacgtgtgatttaagagaataaatcacgttaatgtctaattaactttcaaatcaatccgtttcaagatttgtgcttcacaaccttttgcagcaccagcaaactctaacgagctaattggaggtgttcccttgcttagataaatatcctgtataatggcagctcactagtgtgggccagtttgggcccgctgacaatgagggaagctctcgccgtctttcgagtggttaggaggtgtggtgacggatccggcagcgggaacgacgaaggaggatgaagatacgatcaatgaagtccgagaatatggaagatgagggttaggagagagaatggaaggtgaaggcggattttgtggctccataagggtggttgcatgggaacaccagctgatgatgatggagaagatggcagaggggtgacttattatttttcttaagaagggagagggattacgcaatgtatagattgttcttttttttttatccatgttttactgtacatatatacatacaagtcttatcataagtctacgtcacattaataaaacttgggtatagagcatagatcagtatatttattgaaagaaaaacattcgaaaatacaactatataatcagtgctaccaaaatttgtctagatgggtttaaatataaacatatcctatatatacaagtcgtcatatgtacataccatgcatatcaactaataaatatcataaaaaattatacatgcatgtaatttcaatataatatatagtattacatctacgtgtaaattcccatctttaaattcatcgtacatagagaacagcaaaataaacaaaactgacatatttagtcttaaaaatatcagaatttttaatcatggctaaaatataatgaatttaagattaagactttagatgtaacactattgaagtatttcttctttattttttgacatttgttagttagtttacacgtgaaactaatatacacatgatgtgtttccggtttaaatatggtcatttgtacaaataaaggtagatcttaatcggcaacgagaatgaagattagaaggtctaaatataaattagtacaaattatgtgcttagcgaatagcaattaattaagagaaatcaacatgttatcagaatatagcaatatatttgtaaaggcttaaaagattatatttaattagagatgtcgaattgagtacgtagtatgtgggagatgtagtttgacaagccggtgctttggtatttttggcagtaggtcattcaattattatagctttacatgctctttaacaccttagaagactgtgggggaataactttgagttgattgtagaagtaaaagtggattaagtcggtgtgtggctaagtcttagctaggcatgcaaagaatatgttcgtccaccgccgcctatgacgcatatatccatcctgatcttgccgctgccccatgcgtccaaccgagaaaaccggctccttaaaccttaaacaaaagattaaaaaccggtagagatatgcaaataaaatcatcagtcagagaaaaaaatttgtgctagtcaagtgtggtgatgaggttagtttgtcgtgaccgcaagacttctatcgtgacttcgatacattttgatcttgtttctgggagatagaatatacgtgtaaaactgctaaaaaattagtgtacgtttccgggtaaaaagttttaaatataaatataatatactgtaatgtaattacaatataactacattgtaatctctaatgaataaaattatatatttttcagtacttacatacaaacaagttacttcgtatattataagttaattatatactatagaattatcattccgatccctaattaccacgatccattcagatcctacgtggcgctcgcgcgttgcatgccacatggaaacaacagtttatatataaacttcaaacaatatgtttttatttgatattgttaaaaatagattattacaaattttaaaaatagattgattgatattttaaattaactttatatacaagctaaaatctgcatctgatgtacacgcagatgaagatgcgccggcacccaatcccaccacagcgaattaagcggatccaaagctaataatactcgatccgctgttagtgttagccgcgggcgcagcatttgtctgcatcgttcgatcggtttcggcttcattcattcatgtgctcccccctccccgcccacgcactagcggctgccgtccacgcacaaaccacgtaagcacgcaccacctcgcgcggtataaattccccgcgccctccactcattccattccccaaccccaaccattcctatttctaaacaacacacctcctctgcacttgctccttctcttcttctgtccatcgaatcgacaagaagaaatttacaagcaagaatggccgccaaggtgcatcctaacgtcgccgccgcgccacagccaccctgcattagcagcatcgtctcccaacaacaagaagaagaggagcccccggtggtgctcacggtgtggcgcaagtctctcctcttcaactgccacggcttcaccgtcttcgacgccaagggcaacctcgccttccgcctcgactgctacgactccaccagctcaaggcgcgccgacctcgtcctcatggacgccgccggcaagccgctcctcaccatccgccgcaagaggatgagcctctccgacagctggatcatctacgacggcgacggcgccgccacctccaccgccacgccgctcctctccgtgcgccgccgccgcgtcggcctccgcgcctccaagtccaaggccatcgcgcacgtcacgccgctctcctcctccctgccgctcccggaggcctacgtggtggagggctcgtacgggcgccggagctgcgcggtgcgcgacgcccgcggggacgccgtggcggaggtgaggcggaaggagtcggtcggggacgacgtgttccgcctcgtggcgcagccccgcctgggcgcgccgctcgccatggccatcgtcatcgccatcgacgagatgctccgcggcggcagctcatcgctgctgcggaggacatgctccgcgtaagtccaaaattcttccttctgtacagtagagacattgagctcgctgcaaggggatcagaagctcggggtcccacctgtcagcgactcagaagcagtgttcccgcagcagagtctagctagatgcagggcactaaacacccagaaaagaaaagcacaggaattatgacaaacttattagagttggtgctgtatgctacaatcaagttttagctagctgctgggttacttaagcatcatccatgttgataggaaattaagcaggactgatacagtcaggcttgtgaaagtaaagcacaagtaggacaatacatatagatacagcctagtacaggggagttctttttttttcttccccggatgtaatattacaaaagattattgtttattattatatggagaaatggaactgcttctccttttccttcctttttttttagtgatctgtgtacacggctagcccatacagcagcatgttcagtgtgtgcgtgcttgaccgtctatccgagcgacgagagaccatttctgtgttaatcagatgtgagtagtaaacagatcctatctccagcaatattttattttgtttagaagtgagaatccttattattaggcgattcttctgctagtatcatattgctacccactctttgatatgacacagatcgatgatggatggagcagagcttagcttggaagtgcacaacccttgacagagatgagtaacacacattataaacaacagaacattattcagctgaacatacaagatgttagcagctaacatgcacttgacctgctactgttagtcccagacttgtgccagctgatatttcttgaaattaatcccagtttgttaatttgtttcaggtctcattcactgtgttgtactgtagagccactcgatctgccttgttcatctcgcggtggagctagtactaccaaccgatctagagtatctatcacgttttaatcaccattcattcttgtttgagacgatgaaagagagaaaaggcagtagatgcctcaaggacgacggatcgaggacatccttgtcgatgctctgtcccaactagagtagcttatagctcgatgaagacacatgcatctttcttccggccgtgtggtgtggatgtggtccttgatttgtttgcgctagaaattcatcgcttccgcgtaatacagtagtactacagtatgagagctagatggaaaattagacgaaataattttgtctatagactgtgcatgcagctgagaaaatcaaactcaacatcgtcatcatctcatcgtacagagagaaaaacaaacgcatgcagtgtccccgcccccttgcaaaacacaaaacacatggacacgatgcagactggtttaacacagagttatccctggatatataaaaaaaaaaaggttggacccaaagaaggacttagagtcaatggttttagtaaggaagaggtaaatatttcctgtggtgagcgcgctcgacaagggtcgaacccgggccagcggggtgcatgccagcgaccctgcccttgcgctaatagcgcatctctatccctggatatatcagtctttcaagtgtaacttttgctgactgcagatcgagggtgcttaatttcttcatatcattaaagggtaatttcatgtgtaactttttctggacatgtgcacttcttttattcaagggaaagggaaggaactcagccattcaatataattacaggaggtgaaaagagcttagaacactagaggaaaacacattattacaagctgaacagccaagaagctgatggagcagctagcacaactaatttgacgagtgctccaaagtgattactctggggctggtgcttgtcgtgcttcttctctcgcttataacaaacttctttgccaaatttgctacatcttcaaccgtaccatagacactgttgaatatcctgccatttcgttgcaaccaaatgctccagatcgtttcttgtgcactttttcagacgataaacagagaactctgcactttctcagcgctttctacatgacgatgaacagaggatcgtgcactttttcagcgttcgactacttggtttagttctcgatccattcgtttgatacatatacgtatgttgtggagattatggataccacatgtccacacggcatgtatattcgactgggtatggtggtaccatatgtagatagaatatatttaaggggctcgagttatattcttaacctgtgtatcaaggaaatactcgagattctagtcggttatgattgtattttatctttacttgcctattttgctaggaatatgggctgtatgttataatacggactcctctcactatataaggaggggtccgggtgcctcttggggcataacttttcccccagatcatacgatcaataatacacttggtggatcaatccctgtacatgagtagggtattacttctcattgagagggcctaaacctgtataaaattcatcgtctccaaacccatccacttttcatgcttgatagccacccctttttgtattgccgaaatcttgtttcgacatatgttgacttgattgggatactgatctggactactaattcacaggtcaggcttcagagggagtgccattccaagtttccaacaagccaacaattaccactgatcatacataaacagaggcaggaaatgacggatttgagcgacggctagcccagctttttcatgctgaaaattttaggcggattcatcgaagtacttgctgtacagaaacataatggatgcatgaatggctgctagacttaaatttctgtctgctcattcaatccaatattgatcagagtgtcattttcagtcctgctcctgcatgcgccactgtacgtgcatctgacctttggcgaacttttgcgcttttagccgccgaaattgcccaactctttgagagaaaaagttcggttgcaatacgttttaaggaggggccaaagtcatcttcttgttatactcgatctgctcatttcatgtgcatgattagaacaaaagcacgcgaactgaacaatcaaggaagctgccatacaaatacgtactacggtactagtacgcgcccttctgtaactccattctgagtttcaagtcttcaaaaaattaaagtggcttataatatgaaacgaagggagagtactagttaccatattcatgtttacatcttcactgataatatatttacatgcttctcccttcgtttcacaatgtaagttattttagcattttccatatttatattgatgttaatgaatctagacatgtgagaaatgctaaaatgacttacattgtaaaatagaggaagtagatgctacgtacgaagtactcctaagtaaaaatcatcatgctagagaaatacgtgatgtcggtaatcctggtggtgatattctcaaaccagacatgtacagtaaactcaatagtcaatactatgggtaaggtatggattgagatccggtaaggtatgcatattctcgaacatgatcagtcactgcatattcgatcgatctcctaatcaagatgcattaacaagataggttcgaagaccatttgctgaaaacctaagctagattggtccttcttgcatgatgatatcttgagaaatactccctctgtttcgaaatgtttgacaccgttgactttttagcacatgtttgaccattcgtcttattcaaaaacttttgtgagatatgtaaaattatatgcctacataaaaatatatttaacaacgaatcaaatgataggaaaagaattaataattaattaaattttttaaataagacaaatggtaaaacatgtgataaaaagtcaacggcggtcaaacatttcaaaacggagggagtactaataatcgtaaccatccttttcccttgtgttttttgctgactggttgtgctctttaattatcactttatgcgcacttttctttgacgccttccacaattaacatgcgcgcgcgatgggtggttttgtttatatagtactccacactattgtacccgtatgatggcaatactagtctgactagtgtttgctcttcatctagaattgttgtgtttctgtacagtagtatgcatggaaagcaaagaagttgtggaaatgcggtcatatgcttggctaggaactgaagagatagcaattgggatggttggtttggcgtctaaataaaccacagcgtcctggaattgtgagtcatgcgtgatgcgtgattcctccagtacagaggagagagctgatcaaggaagataactcgagacaagccagtcagctaggatacctaatattccctcttggggctcctacaacgtatggaggaggagaaaaacgtgtcttgtgatcttaattgcgcagaggaagaacaaattcacctccgcctccgccgccgcgccgtgtcgagggatcccgatttatggatgcaaatcgctttttcggatcgtgattaatggtacggtggcccaaagcattccaggccctactagatagtggactcaacatgggccgaaatatcgggggggcctccgaaagcccatatacaattgccttacctgtccccacctgtcacatgcctcacgcagcagagctcaactcaagtcaaggcggcatttcgaaattcgaaaacaccaacggtttcaaatcctcctcacatcttctcttcccccaaatccctcctccccatcgcggctcctcctccggcagccagccatggccacggtcacgccgggggtgctgctcaagctgctccaggcgatgcacaccgacgaccgcgtcgccggcgaccaccgctcccccgtcctccaggtcaccgccgtcgtccccgcccttaccggcttcaccggcgacttcctctggccctccaacggcttcctcctccagctcttcgacggcctccactccacctacgtccagccctcctccgccgacgccgacgccctcgtctccgcgcgcccgcaactcgtcggccacctcgtccacctcgaccgcctccgcttcgcccgcccggtgccccgcgccgtcgggatccgccccgtcccgtcctctcgcagcgtctccttcgtcggcaacccggagccgctcgtcgcccgccccgccgcgtgctcccgcggctacgtcatccagcccgggtcccactccgacgccgcgccgccgctcatgccatccagttccggcaatgcggcgcagtccgatgcaacgaatgccatcaataggacggttctcgcgcacaagaacgtccccgaggccgcgccgccgcccgccgtttcagccgccaagaggcggttctcgtctccggcgccgtccaagcagcgagatccgtcgccttcggtcaagggcggcgcgtcacggccttcgtcgccctcggtgaagggcgcctcccgagcgtcctcacctgcggtcaggggcacgcccagggcgacgtcaccagcgccgtccaaatgcgtggtgcccagccttgttgcggccaaggaggagaatcgccgcacggcgagggagccggcgattatcgtgccatcaaggtacaggcagccgtcaccagtaggagggaggagaggggcggggtcgcccgcacccggtgggaggcgcgcgtcactgtcgcctagctcccggaggctgtccggggaaggtagcagcaagaagaaggtcggggtgttggtggctggtatctccaagatgacggatttgacgaatgggtcggctgttaagccggggaggaagagctgggacaatacctcaatcgcagcagcggctggctctgtgatgaaatcgaaggtcaaggtggataagagtactattctgaggacacaggtcaggatcatgtttcatttgtgttgcaattgcaatcttggaattgcacttgctatgctactattgctatatagttgtacatgcactgcacatttatcttgttgtagtgaacagacaaatagtacaactctactttgaacaggctaatcgtagtgaaaacagtggttacttcaaatgcttgattcagtacatatgtgaaaaatggcatggttttcttgcagttacttaaaatgtttataagtttattgaggaaagagagaattgaaaacactgttatttattttctttccagatacaatggcagctagtttgtaatctttgaatttgactcatggacatgcccttccctaccatcatcacattgttgtgttactgcaggaagcaatggcaagacgactgagtgatgttacaacagaactatccagtaacgatgatgattcatctgtagatgagaagccaaagccacggaagaagatagagtcacctgcagtaaagacgaaagcaatggctccaaaaattatgcttcatgatcctaaatggaccgatggaagcattccattggatggagtttctgatgtgctttcaaagatgggaaaggtaagcactcccaattcatctttgttagcaatgatcaagtcgcagttcattgatccttgaaacaccacatcttctctgaatttgcaggaagccactgaacgaagagacgcagcagcaattgctgcagctgatgctctgcaggaggcattaatcactgaatccgtaatcaggaacctaaggtaattaaaagccgacttgtgtccccggaatttcattcagcacaaaagtggtttttcctaacactcagcttgctattgtccacagtaaattttctgaactaacttcagcatcgaagacctccaatccccttccaacagttgatatcttccttgctgtctatgaggatactctcaaatggaagaaaattgctgagtctatatccaccaatagaactgaaactgcatcatgggagaattcagttactcattgggttgaagcagcattggcaactgatcttgaagtcctaaagttgatgaataaggcacctgaatcgctctctcggaaaaggggtgctgataagccaaaggctcccttggtggtagaagctccaagaacaaccatatccaagaggcaatcacatgggacttctgcaaaggtccagtcaaaggtcttaccgacctcttcagcgagctgcgcatggaacaaaactcagggcgtgaatgagacggctgagcttgccacgaccttgtgctgtgagatgcatacgtggttcctgaaatttgtggacgaggcaatggatttaggtttccacctttttgaagatcagaatgttgcaagtaggggaaagcagagcagccacataacaatggtactgtcccagttcaagaagatcagtgactggttggatggagtaggcaagattgcagaagaggctacaactaaggataaggttgagcagttgaagtgcaagatttatgggttcgtcatcaatcacatgggatctgcatttgatagctcggtctcgatttcatcaaggaattgaggaatgcttaaagtaagcctttaagtttcttctcttgtatttttgttcattggggatgggatcaaagctacataattctatgacgagaggtctgctacagtttgtagaagctactccttcagttattacctttggttttgccttgtgaataagttgtttgtgaaatggttcttgttttatcggttacaattatgtacacttgatagtttagcttgctgtagtctgagtgaatgactgacttgttaaagctacaagatatcattcttacatccttgcaaatattgtgctaggattaatggtatgttaatttgattggtgcccaatcttttcataacaaaggttaggcaaatgcctgacatgccacaaaaactgtagctagtacaatatgtgccaagtatatttggaatgccgacacattttgctagccgaagaaggaaaacaaatcttcagttgctagaggtccttccatgttgctaatttgctataaatgctggtgaaccatttggtcagaatacatgaagctgtagaattccctttcttgtcgaaacattgatgaaggataggtctagctcctgaacctttcagctgactggtcctaatgattagttgggtcactaatgtcaaagagatgctgcacctgattatggtagtatacaggaggtattggtgccaattcatcttttcaattgaaatttgaaagggacccatagaacttgacaaaaatattttatttgatgcgcttgacgcttgggaggctgtagggtgaagtaaaatcaaacacctacagagaactccctttgagatatgttattgtaaactgattgactgaggcagaaatgccaaattgtctaccggagttgaaaaggagttttatccaaactagtattactatgatactactagactagaattattgaactaacagtcctcaccaaattgaagtctgtagcagttgtttctgttcctttgttttccttgatgtggttggaacttggaaagctgatttgcttgaacatgaagagctgaacaaagacagccctgtttgtaacaaactagtaatcagataattcagccgattactacgacaattcagctgtttggttgtgcagaaggtatattgaccatgcagggtaattcggctgattgcatgaacttgtttggtaaaaactattgtgtataaatcgtgctccaaactcttgagcggatgctattagtgggtgtttttgattggacaatctgagcggcgagtagtgcagtactatgttgtgaagaaacactagtgctgggtgctgctgagttgctaaaaagtatgatatggaagggaagtatggatgtggttggggcagctactgtcccatgatggtttgtgctaatgaaggatggggagttgattgcgggagggatgagtgtggacgcaggcaggcgttcatagttagtgctggatggtgacaggaaacggaacaggaggacttgagagctgggcctaatgtgtggtttgggccgactaaaatgctaaagcactcccttctgatcgtacttgtgattgtagtaattatgtactagtaacgaaaattctgtttagccttttcgattaaaaaagaagaagaattaaactgatagcggacgcactggccgcatcttgtattcttaccaaaaaaaattccatgtcgttgttgtttaaccgccagcagtggactacttttaccaccggtgcacaagccaaattctgagacgcaatgcaacgacgtcatgctatgcttgcagagttgcaggctggtttgtgctgcgcattcgcgtcaacactcccatttattatgccaactaattccaaacaccagcaatactctcctcattaacttcttccgcgggacgagagagggagagagagccaaccgcgcactacttgtacttcctcatcttcctcttgctattaatcgaatcaaattactactagtctcccttccacgccacgcacacgcacccaatcccctatcgatcgagagacatggcctccaccaccgccaccgccgccggcaacggcagcggcagcatcctccccacccacaccaccacggcgccacccttcagagcccataaggacgccgacctggaatccacgacgcggcggcgccggcgacgctgcctgtgctgctgcctgctcgtcacccttgtggtgctcctcgtccttgccatcaccctcctggtcctcttcctcacggtgctccgcgtccgcgaccccaccacccacctcgtctccacccgcctcaccggcctctccccgcgcctctccttcccggccacgtcggtccagctcaacgtcacgctgctcatcaccgtggcggtgcacaaccccaacccggcctccttcacctacgccacggggggccacaccgacctcacctacaggggcgcacacgtcggcgacgccgagatcgacccgggccgaatcccgagccgtggggacgccaacgtcaccatggcgctcaccctgcaggccgaccgcttcgccggcgacctcacgcagctcgtctccgacgtgatgggcgggtcggtggcgctggacgcgagcactcggatccccgggagggtggccatcctgggcgtgttcaagcgccacgcggtggcgtactcggattgccatttcgtgttcggcgtcacggagatggccgtgcgtagccagcagtgcagcgaccgcaccaagctctgattgatcatgtgattccaacttaatttgcaagtttccaagcacgcaacgtaaggtgggcatgccgcatcgcgacgtgggacaagacgagaagccgtatgatatgctgctttgttacgcaggtgcactgcactagtagtacatagtagagtattatattctacacgggcggcacattagttcgttacagatagtatcagatcaggaattcaggattcagtgctacgattttcttcaatatttcttactgcgtgttgggattgatttgattcatgtatataacacggtgtcagtttggatatatatacagtaatttcactattctctatttcttcaacgtatgcgcccatgatgtttactagcgactgattcaaaaattcctaatccaagcgccaaacttcagttaaacagacctttctcgacagcatgcccacagcttcaagctgccaagtgccaacactcacagaaaactcggcccggtgcaaaaaaaaaaaaggagcatatcctgacttctttcactagcaaatactgagttactaggatttaggaccctcacatggtcaaacaacaaacatactaaacattgttacaggtttcaaaacatataatgaagccacatgtataaaccaaacggccatttccagcggttttctgtttaacctcaccactaacagtcacatcaagcaagcagcactttacattatcaatcatgattttcactactccgctgcattcatcacataaatgaaaacatttaagcacggcacaccatctcacagttcttgtgaaagaaaaatgaactactattgagcagcattcagacgatccacatcatgaacctgcaacagactcactagttcaaccagacacagctatccattttaagacttacaaaaggtacgtggtcacagaccacaactcctaattgtatatgactaacccacccaaaaggaagactgattaaagcttacatatataacttattaaactgcctcctactcctttagcatcactacctacatgtttcagttagcaaagttaccatattggcacagggcaactgaaattggtagccaaaaactgccccaaaatgttgttcctgggcagatcaaaagggtgtcaagatatcacttattctctttaacgaataaacaccttggactgactgaatcaaagtcgagctttcgacaaatgcttgggctgagctgtactgctttaagaggtcgcctcagtggcgcatctgggcaggtgtatgcaatgcttgtaagtagaggctctgaagaagaggtctcacagcttccaagtgaattagaacctatcagatcctttccagtcgtctctagtgcttgatttgagacaatcagatcaataaacatcttgcagatcctttcaagaaactgatcatcctcctcagcatcatcgaattcaaaacttaaccttttaacagggtaatcacctgaatcaaaacttagctgccttcgcggaggaagttctggtgccttgatcacattcttctttggtgcacaagctaactcctttggtcctggagcaaaaggatcaaagatgctttcacgcggtgtctgacagccatacaaaggatcttcatctgcaacatttattgagctagatgattcaattgcttccttctctagtgtaatcacctcagcaacaccactcttgttattttcatgatcacataccatgccaagggatcttgtgtccttattttcgaaggaagattgcacagaaacttcttcatccacacacttttccaacttttttacaacagggaaatcacagtttgaaactagcgaattatcagtaacattcttatccacgccttgatccatttgggagtaatgtggactcaacctctcctgtaacttgcaaaatgaaaacctacaatgaaataaggaatagaaaatttaaataccacaaactaaccaggacataacagaaaatgatcaccgaaacaaacaagggacacccaagaagagtccaaaaggtttctaggagaaaataaggcaaaaagggtcataggagaaactaaagcaaaattaagtggttatcgacaaaacactagccccaaatgtaactgcaactgctatgaatgtaaaatgtgttctaaaagactatgcaaggcgccaaggtagtcgtcagccactaataagcagaacccagcttcaactcttgttagaagccgagtgaaatcactggcatcatctgatctaatataaccgaagccgtttttgtcgataaccgtttttttggccacatttcaaactgttcaaccatcactctgagtccaagtatgtatacaacaattatatatatttctttacttctgcaaaaagaaatcaattaaccatcaacatctattttataaagcaccgtctaattgtaaaatgggaaaactaaaaggtaaaatgctttctatgcatagctccttggaagaccttcacccacactttttacctactatatatgtatcaagggtttatatgcagctatggcagatacataaaagattaaaaatattctctatagccagtgttaaactgaacaccatagcgaaatactcaaagttgctattagtggtaccaatctagagtaataggcgcccaaatgccaaatatgtgtggtctctacaccgagacctattgtagccctattgggtgtcttgcctgagacaaatcttgcgcgcgccgccgctgaacaaaaccataaaccttgtccgagcgctctctcgacggcagcgtggtgcggctaaaaagtttggatttgatccctcacactacaatcaaaggagacaagtctacaacagatatctaatgaagcaaaatagagttacttaccaacaaaagaagaaatcaatccaatccaatccaagcccgggcggatcttccagtccaacccaatagatgagaaggggagcaaaccggatgcgtgttccttgttggcgcacctggaaatcagaatcacatggcaaaagaagcagatttagggctttaagaggtgagaaaagccgaaaaatcacaggaaaaagagataaagctcgctagaaccctaacatgtgaaaaaccataaaaaaatccatacaaagaagaggagctttttggatctgtgtgagagaaagattgagaagtagaaatggttaagaaaatgggaagaaagaaaatacctcgcagcagctctggattggggcgcgagattggtttgggcggcgccgaccgggattgggatgaggcatcccgccgccaaaacaatcccccctattaaaataaaacaaagttttcacaaaacaccccatagaatgtattatttgctaattctattcctttgtacaacatccagcgagctcagctggaccactgaggaatatatgtgaaaaataaagaatcagtgggttgaagagtaaaatgcaccaaaaggagggaaaactaatttgggcgggcaaccttggcgcacgtgtagcaatatagcatatccttcccgcggaataggtgtgcctatacatatcatcatttaggtgaaaaatgagttcttttttaggaaaaaaaataatggttgtgatcactcagaaatctataggtgcaaataatcataaactgagtgggtttgatgtgtatactacgttgagggcttgaggccagtttgcaggttatcgaagaccataatgattaagagacagttaattttctatttttcttgtttactggaatttatctattgcaagcaaaatacccaagtttcacgacgggtgaagatcacaattataactttacataccttgttccgccatttatctcttcgtatgaaacacgtcaatgaggccaaagaataaacatacgtttgttctgtcatttatctcttcatatgaaacacacaagtgaggttaaagaataatcctgtgagattttgatacctaattctaccagtataaagaagtttatgtgaaatacatataaactcgagggcaggcataaaaataattgaatgaataacttttcgtaatattaacaaaatgaaagggttaaaatgaaagattgacgatgaatccgagatattttatcatctaatacacatagatggaatccgtccggtgatggtggaggcattatccagcctctctcattgcaactcgcgagggacggtggcggtgctcccgtagccaaccaacccccttgggcacgatagacgtcctcccttagcgcgtggtagcagtgctcacctggccctaggcagcgagggcagcggtgctcccctgtccttagtagacgacaatggtgacgccagcagcctccataggcggtgaggacggcagtgctccccgtcctccctattcggcgatggcaagtgtatgaggtggcttgctaagatacaagtgtactatactttcttgtgtgttattgagttgttcgaatttttggtattttattatgaagttctcgtcttctactatggtgaaaagctcatataactggatagcgtttgcagcttcatctattcttgttgccgatttttggtcatgttcctccaattttgaaggttttggattggcaaccatgtggacatgtttgttttcctcgaactctgaaggttttaagctggccacgaacgaattggaagcatttgagccggccacgaatggattggaagcagtagcggacatattgcgcttgccgtgggaacattgcggactcttcgcgatccggacgtacacggggaagaagggaatctgacaaaaatacatgcacgggaacaaaagctagacgacgggcaaaaaaaattcctggaagctttaagtattttttatgcaggtataaatatcctcatcaggattttgatatatgtcatttccttatttctgttgtcaacatgtttttattagaatacacttaagccaaattacatgacgaatagatggaactgtatctatcataggctatgcctagtgcttcacctaggcgccttttgctcgctcaaaactattggtagtgtaactagttcaatttccaccttatcttcatccacctttgccagtcctcctatgaagtccccgtgagtcttcacacgtatctacaagtcttcctcccctctccttagcgttcacccatctccaccagtcttagcctatcttgttgggtctttgtcttttttcgttggtttatgcccatcttgctagtgcaaaaacttccgaaaatgtattgcacataatttccttaataaatagagaatattcgtgagtagtacgtagttatggactagttaaaacataataagttattgcctacaatattatcacgagtataccattcattagaaacttccaaatattccatttgtcacaaacttccaaaatacactcaagcaaatatccttcaaaacaaataaaaatatgcacatatcaccattagctagttcaaattggtgaagaaaagtgtgacaaacgctttttatcagttttgtttagataaattgacactaaaaatcgctatcgactactaaacgagaaagttatcaaatgagatccaagaaatatgggcaacatagcacgaagcgttcacggcatctatgtttcgaggtcttgatccttgcagcctttgctctcggctctgatcggtagatttggaattgggatgactagatgagatagggttaatggaaatttggaaagatttaatttcacctccttttcaataattacataatctttttaataaaataaatagttaaacgtatgtctaaaagtcaacaaataaaacaaatggccaaacgtaaataaccgtgcataatacataaatactatttcaatcgtaaacataaacgaagggcaatgcacgtaggtttatcagtccatgaatgaatattatattaaaaaaatatatataatgtcagaagtgggatttgaacccacgccctcgttagaggaccagaacttgagtctggcgccttagaccactcggccatcctgacctcacagttttttttcacctgatgttgtctaaaccattaattgacagacgagaagtaaaagtttcattccacaaataagtaacacttcaatcggtgtacagaattgcatactgtagaatatactactgtttacactcgagttgcagcattgttgcaaacacataccaaacaaatataacaaggggaaaagggaaacatttatataaccttcaagaatctcaagtcagagctctctaaaaattaatggaacacctttcccaggctcgatggtcagtctgaacgcagggcaatgcacatagtttggagaaagcttgaattcaaacttggacagcaggagtgacagaacaaccttgagctcaaccatggctagattctggccggcacatgtccggaccccaacgccgaagggcatgtacatatgagggggtttgcaggcccctgctatgccgttggcgaacctgtccggatcgaatttgtcggcactaggaccccatactgaaggatcccggtgagccatcgcgatcgggatccagatgttagttcctttcggtatgtcgatgccgccaagtttcatgtcattcagagcttcccgggcgacgaaggaggctggtgggtacaatcggagtgtctcctggatcaccattgtcagctgcacaagtatcaacagcacaccattgttagctgtaatctaatgaacggattgttttcatctcttctgttactggaagaggatgagaggacaaaacatacctttttcaacttccgtagaatgtcaaaatctagtggtctcccttgacaaatgtcaagggattccacccgggcacgggactgccattcatggtgtgaagctagaagcatcaaacaccaagcagccgtggtcgaagttgtctcatgccctgcgaagtagatgtttttgcagttgtcgacgatgaaatcctcgggcgtgcatgaagcaaagggaccatccttagaaccttgaataatggagtgcaggagatccttgtttactgaggtcgatgaatcatgttcatatttctttgatatgtttaaaatgagggtacggatgctactatccagattccagatccctctattgctccttgttggtaaatacctagtcggcccagcacaaaaataaaggaaaatccttaaatgattaaccaattacaataagatgataaaacatgagaagccacttattttcatataattattctcatgcaatggtatggattggaaaatacatgttatgatactcttggatctactgtagtatctcacggattctagataaaatattattttttaggccttatatccatttagaatgatatgtaggaattgcaggtagatcagaccaaaatgggacatgtaagttagcccagacaaaatagaagctgtatatttctccaaaaggttattctgatactgctgcaaaccaaaacagtaacacattatctgaattatagtgatttcagaagttgaatctgggcagctacttgggtattgaaatcattcaaactaagcattatctaaaaaaagagctcaacagaggattttgagcagttcaaagacagcattcttttgagttttaaattgtctcaaattgaaatatgtgccacagtagtacatgtgtagtttctgaaatatacctacttccaggaacaccaatgagcatactttgttttgccattgctttctgaagttgtcgtatttttatgaaaatctccttgccttcactaaagctgcttccaaaacaagcccttgatatgacatcagctgaaaaggttctcaagaactcatcaaccacaatctctgcactgcctcctctgtcctcaacttcatttttccatgagttcaacattgacattgcagcctccatcatcaaattcaccattccctatggatgtcattttaacaataaattgagttttagtatatgctacatgtagtgtactagaaagttgctccaagaaaaatattgttttttgacagagagatccatggcccaatacaagtgcctgcagataattaccttaaccctttccatgaatagttcaggtgcaatcacttttctctggtgtacccatagatcaccatttgatgtcagaattcccataccaagaagagctccacgctctttttgcaagtagcaaggttttccaagatccaaagatttgcagttggctagctccttcaccatgtttggatcagtaacatttaaaacttgtatgcttccagtggaatacaggtagatggaacctaacacaacatcaatgtttcaggaacttatcagctttaattttaaatatgaaatgcacaaggcatccgtcgatgttctaaaaataaatctattaggacatggttacagaacatacaacaaaagaatttacagtaatttaaatagcttatatgtaatgagggtaacaatgagactggtcgacaagatgagacagtatatggtacaccatcagaacgtatatgaaaccatgagctatccataaacaggccccaatcaaagaaattatgtttcgatggttgcagagcgaactaccatccaaaatacaaaggtacctaaaactctctgaattcaagtttgcatcaccccaaaataaaaacaatcctgttatgtgggacaataaaaagagaaattttagagaaaaaataagtcaatatcaaaacattcctcttaacaaaattccaatgaattacatttaacatcgaatataaagatgaattaataaactttattttactgaaactattatgcactacaagtttcttaacgtaccataaaccctgctccagtggaggaagtaagggaaaagagttgccacataatttgatgaaaacatgtcggtactccctgcttcttgttcatgtgctgacttggccaattgctggattctcctcatctctggtatgtttccaaagagaaaagaaggcttgggacccctcactccttggctcctcagtttctgcctcaaccgctctggtcttagccatagaatgatatacacataggagaacagaaggatacagaggatgatcggaggtagaagtgctagccattgctgtgatgagaatagctccatttttgtgtgtacgtatctgggtgtgtgtgtgagagaagagggagactacatgttcatagcatatccatatactgtatactgcatatttgctgggtgatccatctccatgtgaagcttggagctgaaaaggacataaagccgcaaagaagcgcctcactcactctgagcagttagcatgtaacgatcatacaacactgcaaatttacaacatagaaaagaaatccaaggttagtggtaggaaaacttaatttaacatgcatttttttaaggaaaccagggtctgttatgaccaaattattcacatggcataaaaaggaacaatttgggggtttcatatatcttcaacagattatgaggttgggcaataaccttgtagtaaagagctttcaacaaacaataaattaagacttttcggcatgatgttgtatgatagtttagccccattaatttggcaagaaattgcacaagatatagacatatagtagcctagaggctgctagaatatagagagataacatcaattggttgcttgaataaaaaactacgggcctctgctaagagtagaggactcaattcattccccacacaagttattaaaggaagtgttagcctgcactaagaaaataaatgagatgagatgagtgagggcacgcaccgtggcatttcgagctcaacaattgggctctgtgactctgcagctagcagctccatgcgaagaccatgctgatgagttgattgattacaagtatcagcgcgagggcgcggaggatgcaaagaggatgaggaaactgactgattaagaagaatctgcggtccagatagatgcagtctccagaaacagccctgtctgtctacttgctaagttttgtcactttgttagactcccatcaatcaacgcttggacccaaacgtcagtggcaaaccagacaaatgcctttttttttttcatacaaaagggagtgatggcctctcttactttttcaacccaaaagaatggatcgcaacaatgttctccatcataaaaccctttgattgggttcaacgagcttagagtgcttaacaacttcatctcaaaaaaggagctttattataacaagcattgctgtctgtggccagcaattataactggagctgtcatgaatcgactgggtgggtgtgagtaacagggctgctagctcatggcagctttgtcaccatgagtggcaagccgaacccgggttcaatggtcagcctgaacgccggcgagtgacggtacctcggcgacggcgagaaggcgaactttgtcagcagcctggccaacaccaccttcagctccgccattgccaggttctgcccgatgcacgtcctgggcccgtgcccgaacggcacgtacatgtgcgccgccctgcacgccgccgtcacgccgttcgcgaaccggtccggccggaactcgtcggcgtcggcgccccaggcttccttgtccaggtgcagcatcagcctgggcacctgcacgatggtgccgcgaggcacctcgatgttgccaagcttcacgtccgtcagggcctcctgcatcatcaccgacgccggcgggtacagccgaagcgtctcctggatcaccatcgtcacctgcatcatttcgacatcgttgtcattcatcatcagtaaacagccattgttaatttctacgatgaacaatgcggtttaagatgttaatttctcacaatctttaaccggcgaagggcgtccacgtccaatgtcgaccttccccggcaaacctccattgcctcagagtgcgtggcgagtagcatcaggcaccagatggcggtgaccgccgtgctctcgtgacctccgaagtagatggtcttacagtttccgacgataaagtcctcagcctctgcagcgctgcgaccatcctgcgcaccatcaatgatggcgttgacaagactgttgtgtgagtcttggtagtggtgttgttcctttgcgacatccaggatcagtaagcggacttgttcatccagcatctgtatttcttggttgctcttggttggcaggtatttcctacaacagcaatatagcatgaaccatctaaattagcatacctgatcacttatagctgtgattgtgacatgtaagtctagtttatgccatgcttgaattataatactttaagcatgtgctgtttgaaaacagtttacggcgaggttttctacctatttgtctctactgaatgacaggacttgttacctactaatctcaaattaataaggagtatacaaaagactatttcttggttaatatcatgatacacacgtgaaggttctcatttcattgcaactaatttcattgacttaccacagtgcagacagaccaacaaacgaatcttgctgagcaattactttttggagctgcctaagcttgcaaaatatttcttctccttttgtgaagctactcccaaagcaagccctggcaattacatctgctgacaagttccgcaagtaatcatcgacaactatttccctacaccctcccacatcgtcaatcatatcctcccatgcttctaacactgtaacagttgcatcctcaatcagctggatcataccctgcatgcatatataaataacaactgcaatcacgcgtgatacgagttctagttttcagtccatgaaacctacaagcaatcacaatttaatggtaccttaatcttatccatgaagaactctggtgcaattatcttcctctgataggcccattcatcaccattctctgtaaataaacctcctccaaagagggccttgcgagatttctttagataattaggcttaccaagctctgatggtgtccaccggcctatatccttcaccatatctgggtgagaaacttgtagtatctccagagctccagttgagtatagaaacactgggcctggtcaaaatacacatgtaaattaacttcattaagaagaactcaacatggacattccctcaaatttgacatgaatatagggaaaatgagatgaaaagcataatctattctaagattgaaatcatttgtcaaacttgcatttttcggagcaaaggaaatgataaatatgattgttattgtattagaattctcactaccaaagtagatcagatcctgcttaatctacaagtagttgggaaatttttagttattcaacacaaaactcgagataacatataaaatgggtgtatgaaaattttaattgatggtcaactactgagtcctttatatgactgtcaagagttgaatggctattatattaagctgtaaaagggtcccacagtctaaataaactattcatcaataattatgatcctgacaaacttgtttaataatactcagtactagcatctgagcttgtttagagtctgaaacagaaacttcgtaggatggtaaatagcatccaaaatggacaaaataaaattacaaaacaaaggattagatatatatttaaaaatgtgtgatggcaccatttcgctgaaaagtgtctgatctgtttatataatttgatatcctactaaaagttgaaaaacagtaaaaagaggagagattaaaaaaattatgattgccctccaactccctactaaatgatcaattcaggcttataaactagattttaatagcaaggatactttgggatcctgcttctccatggtaattcattaattcacttcaacagttgtaggtgactaattttctccaagacatgtcattaataaacttcaggatcctatcatcaatctgatctactcatgagccatgaacatatgagtgcaagagccaatcatggacaaagtcacaacactagcatatgcataccataagtttcccgacagaggagaaagtgtgggaagagggtggagatgaagttgttggtgccttgcttctgtgaaaatttgagttcttgtcggattcttttgatctcctttgtgttgccgtacagaaaagtaggcttgggaccccttatgccttgcctcctcaacttcttccttatcttcacagccctcagccataggatgttgcacaagtagaacagagctaagctaagaagtatgacaagaacaacaatgagtgcaagcaatttctccatgaagcatagggaaccagagaagcaaagtatttctgtcaaatcttcagtacattaggtctttcgtgcgctagctttatatatttgtttaacacctcaagcatgtgaattcttttgtttgaccttttcttcaacaactgattgttttgtaggttgctttcacatcttgggatcaacttacaatcagttagaccttccagttcatgatgaggtgaattcaacagactaaattactgcaagaaaatcattttgatcccctgttttacctgatgacgatctaagaaccagccttaagttctgtgctagcatactgcattatgcacaacctactttagctaccagaagcatttcatgagagaaacaatataccaagaattaacatatagaaaaaaattgagaggcacaaaccaatgaagcctagacgtgagcttcaaacaagagacgaattacctctccactggacactgggtagaattctgacagaagcactgaacgcaaatggagtcttctcttccatggtgatttttaaatgtggcaacaacagaaggaagcataggacatccaatgacacatatatgttaaacaaatagcaagtatcaatacacactttgcttgactgagcaaagtagcagaagaaagtaggcatgtgaattcttttacaaccggtggcatgtgaattcttttacaacactccgaccggtaactgcagcaactacaacgtttgaaaattttaaaataaaactattctaaagaaacaatcacacaccaccatatagtcattttgttatcagatgtaccaacggaacattctagaacatagaccaccaactctttttggtgtccacatgtacttcagtggcacttggggatctacagtacagttgccttctaccactcctagcgggatttgtaaagcataaaactagagcgaaaccgatgaggcttacaactggagcagcagcaataaaaagccatccactgcgcctgcgtgcactgtttggttgctcatcaacacgaacattgtgttcacttgtattagtctcttcgatcacaccagcagccatctgacgagttacctggacctcttgttcatcagaaatttcttccacaacctgaatgtctcttacattggttgtggcttgcttggacctttcatactctgcatcatctgtaggaagctcatatcggcagacaggacatgtatttctagaactaagccatggcaagatgcacgatgaatgataaagatgcatgcatggtagctgttttgctctagctctggtaggaattgggtctttgcagactggacaaataacatcaccatttgtctgatggcttgcagagataatcacggaggggagattttcaataaaggatgtcgctgctggtggagctcctcttctggaatcgttgtcctcagcaaattgctcaaggagcatctcaaactgccttgcatcaacatagtcatctggattcccgacaaaagttgtcctcatttctggctcttccatgtcatctagcaagttggtcacatttgctctttgacgtacactcacactccaattccatacaccatcttcagattcgtcctcactcaatccacttagctgaatatcatgtgattgctgctggtgctgggtcatggtgttgactatttcatcaaaaccagactcttccacatcttcctggtcatctgaatcccactgatccagtctagcattcatgggatcaatatcagtatctgtgttcatgtagctgtcattgtcaagttgaatggaaatcctcctccttgtcatcacgctatgttcctctatggaggtatctgaatctccaccatagtcaccaagactgatggcagattcaatttcaccaaacacagaatcaacataattaaggccatcgctctcatcatctgaagcatgccatctttgagattggcttggtgttgaattaaacgatgcatgttgcggcgcgaccgacgaagaatcaatatccgtttcacgaccttgtcttcttgctaagtcgatcagctgagaaaactcctgcaagaatgcgtcctccaggaaatcaatgcttgcagtcctggatatctgcctcctccgtgtgttctgccgataagtgctggttatttcatctctttcatcatcattgagtactgtcatcttgcagtccctgcatatggctaaagcttcaaaggtatcggtcacctgagcatccaaagtaaacggccttgtgcaaactaggcactgaacatctggttggctggcaactggatgacagtcgctcgcgtgtgttcgatggtcagacatggatatcctgatgaactgaacagggcacactgaatttggtcagcagttcgctattggacaaagtagacctgcggaacaaaacataaaaaaagaaagaaagaatgtgattagcgccagttctgcagtgaagtagtagcaaaatgcttataggatatatgctcaacaagacgaataccattaccagctagagattgcggagaagaagtgatgagagatcgcagcgcgaaacaacgggacccccgccttgtcaattaagcgctactgcagcagagcagaggaagcatccccctcatttgaatttgaatcaagagaaattgaagagttgaggtatactagtcggggatggcagtagatttgatgggggaggcctaaactagggctggtggtggtgggcaggaggaaccaactgccatatgcagagaccgattgacgacaatcttgagtggaatcaatcagtggagcaacaccaaatatggattttgaggggggtttgaagatggggattattggaggttgaggtaaaggaggtagggagacgaagaagacgacgagagggaaggggaaagggaaagccggctgcctctgccaagtgtggcccaccagtcagtgcacacggtgaatttagagccctcgtaagccaaagctaaatccaaaatttaaatattgccgttaaagttgctaaaacacacacacacacacacacacacacacacacacacacacacacacacacacagatatatatatatatatatatatatatatatatatatatatatatatatatatatatatataaataagttttacttggaggagattcacgaccacacatccgtcacaacgaccctcgacgacaaagcaactattgccccgctaagctccaactcccgccatggcaccttggtgtggcggatggcgagccagcgccagatcggtggttcaatgagttccctcatcacctgtcgtcgccacgcttctattagttcctctctaatcatgaaaacgagagtggccacgacaaggaagatagagcgaaagacgaccgcaacaaggaggatcgctccgacaatggccgtaggagccacgggatggatgtccgcgaaggcgaccgttgcggccgtgataatgagagctgcagcgacctgttgaagcagtacaacaaagaccatccttttatgggctagtgtcacgcccagaaatttagcctaaattttcagactattttgtgtattaaatctctgtccaggaccagccagggtacacaaaatgacaagtaataaacagttccaaacgtaaataaagcgtaaaatacttacaggagaggcacttagtcctcacaccgaaacaaaagcagcggcagcggaaaagacgatcctagcggggcttcagctccactccacaggcaaaactcaactggggtctgagccttggtcctctaacttcgtcttcagctcagaagcactacacttctgaaaagggggaataatagcaagactgagtacaaccaccatactcagcaagccacaccaacgatgcagacgtgcaatgggacacaaggacggtttgtggctatttgcataaaggctgttgtaaaacattttattgagcaaaacaataaaactgttgagtaattaaagtaacattaaatctccactgatcaatgctacaccacgttgaacaggcccaaccaacccacctgaactacagtgcattgagtcgatttattaaggtgggactaatcacggtgaataaccacgggcacggctattcgaatagttttactctgatcagaggtgtacaactgtacccacaagacacagccccacgacacgtttccgtgcgccgacatgccaccacgacataccggaaagaggccgtgacaggacccttcgcataactccctctagccaagcacaccacacctcaggtttcacccccactcctcgcaaggcagcgggcagtcccctctcgtgcctaggtgaatccggaagctgcataggccgtcgcagggcccatccaaactccatcacgcccacccttgcctggatgcgtcagctagaggaaagctacactacaagcccagccgttgcccacgctggcttgtggtaagcacgataaattcttccagggtttcccgcgaaccggtccttaattgccatgggcacgactagcaaaaccatgcacccacagcccaccatgaagtcacattttagttggataattacgacgatgaagcatggccagatgtctcgagcacgcagctcattctgatactaaaaaggtctaatattgtaattatcccatcaactaagctagtggtaattaagaatggctaagcatatagctctagctaggtcacataagtaacatgacctagtcgatttattacccaaggttgacaaaggacatatatcaagtaaatatggcacaagcaagcagataggtaatacccggatcccatgtaattagcaaaacatgcatatttatttgcaaacggtaaaaacatttataaattgggatcaacatgctaaaggggaatgcgtgacttgccttgcgcgaccgcggacttccgaaacgacggattctacacgctggcacgcaaaatgaggaaaaactctaataaaaaccaagaaaacagtacataaaaagtaaacaaacatgtagatctcaattttagatgaattttgcaagttaaatggctcaattcggagttctaatgaattagatatgaattttagaagttttgagccatttaaatgaatttctagaattattaacgaattattgcgcaattattaaatatttttccaaaggaaatgataagcgctgacgtcaacaaggggaagggcgccgacaggtgggccccacatggcagtgactctgggagggcggtccacggcggaccgggtccacagaccggggaggagcggcgcaccacgtggtgcacacgtggcgccgacgcggcgcacacgcagcgaccacgcggcggccacacggcagccgaaccgatggccccgatctacccggtagatcggacggcggcgggagctcgcggccggcgtgcgcgggcacggcgcaaaccggcccggcggccatggcgcacgacggcacggcgcgcatgcggcagcggcgcgagacggcggccggcgacggagagcggcggcgtcgcggcgaagcggcggctacgcggctaagcagcggcgcgacggctaaacggtgcgggagagagagaggaagaggaggagaggcatcaccgacgacgatcgatgacggcgagcgacggaggacgatggcgacggcgggacgagctccggaacctcctaacgaacaaaaggagaggggttagagggagagaggagagtgcgagagggcgagggcgccggccgaaggcgacggccatggcgtcactcaccggcgcacgacggggatggggctcgcggcaacctgacggaggaggggtggacgaggtggacctcgaccacacgaacccaacggcggtagcggtgcggtgctgcgacgaacctagcagcggttagaggcggccggagtagtgggagcagcagttagaggcggccgcgtgcacggtgcgggagcgatggagagctcgggagaggccggcggaaaaaggaaaagaggggaggaggatgcggggatggattttataggggcggggaggtcgggaacggccgggagtggcccgatttcgccggccaacgtggggaggtggaggtggagagagaggcgggattcgaatttcgaatcccggccgtctcgggcacaggtgcgggcgagcgggagggagagtgggtgcgggaggtgcggcgcatgcgcgggcgtggccgacgtggcccggaggaggcgggagcatgggcgcggcgg

SEQ ID NO: 7609 - DNA, 34981 bp, Oryza sativa
  unsure (1)..(34981): unsure at all n locations
catcacacagttcttgtgcaagaaaaacgaactcctattgggcagcatttaaacgatccacatcatgaaactgcagcagactcactagttgaaccagacacagctgtccattttaagacttacaaaaggtacgtggacacagaccacaactcctaattgtatatgactaacccacccaaaaggaagactgattaaagcttacatgtataacttattaaactgcctcctactcctttagcatcactacctacatgtttcagttagcaaagttaccatattggcacagggcaactgaaattggtagccaaaaactgccccaaaatgctgttcctgggcagatcaaaagggtgtcaagatatcacttattctctttaacgaataaacaccttggactgactgaatcaaagtcgagctttcgacaaatgcttgggctgagctgtaccgctttaagaggtcgcctcagtggcgcatctgggcaggtgtctgcaatgcctgtaagtagaggctctgaagaaggggtctcacagcttctaggtgaattagaacctatcagatcctttccagtcgtctctagtgcttgatttgagataatcagatcaataaacatcatgcagatccgttcgagaaactgatcctcctcctcagcatcatcgaattcaaaacttaaccttttaacagggtaatcacctgaatcaaaacttagctgccttcgcgaaggaagttctggtgccttggtcaccttcttctttggtgcacaagctaactcctctggtcctggagcaaaaggatcaaagatgctttcgcgcggtgtctgacatccatatgaaggatcttcatctgcaacactttttgagatatatgattcaatcgcttcattctctggtggtgtaatcacctcagcaacaccactcttgttattttcatgatcacataccatgccaagggatcttgtgtccttattttcaaagggagattgcacagaagcttcttcatttacacacttgtccaacttttttacaacagggaagtcacagtttgaaactagcgaattatcaataacattcttatccaccccttgatccatttgggagtaatgtggagtcaacctctgctatgacttgcaaaatgaaaacctacaatgaaataagaaatagaaaaaattaaataccacaaactaaccaggacataacagaaaatgatcaccgaaacaaacaagggacacccaagaagattccaaaaggtttctaggggatactaaggcaaaaatggtcacaggagaaactaaagcaaaattaagtggttatcgacaaaacactagccccggatgtaacggcaactgctatgaatgtaaaattgttctaaaagagtaaaggactatgcaaggcgccaaggtagtcgtcagccactaataagcaaagagcttcaactcttgttagaagccgagtgaaatcactgacatcatctaatataaccaaagcccttttgtcgataaccgttatttcttaccgaatttcaaactgttcacccatcactctgagagtctgagtccaagtatatatacaacaattatatatgtttctttacttctgtaaaaagatatcaattaaccatcaacatctattttataaagcaccttccgactgtctaattggataatggggaaacctaaaaaataaaaagctttctatgcattagctccttggaagaccttcatccacactttttgcctactatatatgtatcaatggtttatatgcagctatgactcatacataaaagattaaaaatattctctatagccagcgtttttccagtatatctacacttgatctcacaagtttttccattatcacattttcctgaaacatagtaaaagtaaacaggataacctgtacctttgaaatagtacaggatctgagttgcagagatcaggttccaagagcatcaacacttaatagtagtatgatctttaccaaaagagcaagtgcagagtgtatcggtttcatataaaaacttgatcatgtcaaaatcaagtgtggttacctaaaaaaatgagtacatcagttgatatcaaaagatgaacaaggaacttgatagtatttgcctgacatcaataactcgaaaatgtagcaaatatgtgcagaaatttgacatcattgagcctcatttccagcaggtaaataaatgcagaacaatggcctcagatatatgaagaatgtgaagtagctactgtcattggtatctgttctttccagtatctatcaaatgtagcaaaagaaaaagtacaaggaaaaggaaaataagaccaagtgtaggaaaaaagaaaccgcaagaaaatgagaacaagtgtagagcaaaaatctattcacatgcatcacaaacagcagcatatatcatcattggccatctttcccagcctaacagcacgaaaaaaagaacaagtgtagaaaaatctgttcatgtactcttataaattctgctcagttcaagtgtagaggtggcctcagttctgctaagatcatttgaactataaaatactgagaaagatcacagaaagacagaaacttagaaagggcatgtttggttgcctgaccttatcgaataaggtcaagtgcgggcatatctgttcttatgcatcacaaataagcactattaatcaagtgtgtatctgtcagtatcaatttaaaagaaggcactattgtatccggccttatcagtaacttgtatttgtagccaaagatacaatggcataacacaaatcaacaggaaaaataggaataagtgtaggaaaaatgaaaagcaagccactagacatttcattccatcgaaatcaaccaagaaagatgtcagcttttagtagatctagcatatttatgaaggggacacggtcggtctaatccaaacaaatcggctaaaatcgaaggaagggaggagaagacaacctagcccttaccagagagctcaacggaaagagtcgacgaaagagaggggcatagcagagagacggagagagcgaaccagtggaagagagcgatggcggctagcgaaagagagggaggatgcagtgctgacggacgaccggccctcccgccactcgcgagtcggcggaaccctagctttccactggtttggaacaaatgaggagggatggtggtactggtgagtggtgaccccatccatggcttctgcaagagcaggcaaatctgctgggaaccaaacacgtacacgccctaactgaacaccacagtgaaatactcaaagttgctagtattataatggtactaatccagagatccaaatgtcaaatacgtgtggtctctacatcaagatctattgtagccctattgggtgtcttggcttgcgcatgccgccgctgaataacaccataaaccttacccgagcgctcgcttgacggcgacgtggtgcgctaagaagtttggatttgatccctcacaccacaaacaaaggggacaagactacaacagatatctaattaagcaaaacagggttccttaccaacaaaagaagaaatcaatccaagcccggatggatcttccagtccaacccaatacatgagatggggagcaaaccggataagagttccttgttggcgcacctagaaattagaatcacatggtaaaagaagtagatttagggctttaagaagtgagaaaagccgaaaaatcacatgaaaaaaagagataaagctcactagaaccctaacatgtgaaaaccataaaaaaatccatagaaagaagaggagcattttggatctgcgtgagagaaagattgagaagtagaaatggttaagaaaatggaagaaaggaaatacctcgcggcggctctggattggggcacgagattggtttgggtggcaccaaccgggattgggatgaggcctcccgccgccaaaacaatcccctctattaaaataaaacaaagatttcacaaaacaccccatagaatgtctcatttgctaattttattcctttgtacaacaactagcgaggagcaaggcagctctgctggaccactgaggaatatatgtgaaaaataaagaatcagtgggttggagagtaaaatgcaccaaaaggagggaaaactaatttgggcgggcaaccttggcgcgcgtgtagcaatttagcatatccttcccgcgaaataggcgtgcctatacatatcatcattttggtgaaaaatgaaagtttcccactgcctaaggagttttttcttaggaaaaaataataaaataataatggtcgtgattatttagaaatctataggtgcaaataatcattaaatgagtgggtttcatgtgtatactatgttgaggctagtttgcgggttatcgaagatcataatgattaagagacagttaattttatgttttcctggtttaatggaatttatctattgcaagcaaaatacctgtgtttcatgaccagtgaagaaaattataactttacataccttgttttgccattcatctctccatatgaaacacacctgtgatacctttgttccgtcatttatgtattcgtatgaaacacgccagtcaggttaaagaataagcctgtgagactttgatactcaattttaacagtacagagaagtttatgtgaaaatacatataaactcaaggcatgcattaaaaaataattgaatgaataacttttcataatattaacaaaatgaaagggttaaaatgaaagattgacaatgaatccaagatattttatcatctaatactcatagatagaatccgtttggtgatgcatggtagaggcattatccagcctctctcattgcagctcacgagggacggtggtggtgctcccctagccaaccagcccctctcggcacgacagaggtcctcccttagcgcgaggtagcagtgttcccctagtccttcttagcccttcctaggcagcgagggcggcggtgctcccctatccacactagatggcaatggtgatggcaacaacctctctaggcatcctccagtcttagcctatcttgttgggtctttgtctattttcattggtttatgcctatcttgctagggcaaaaacttttgaaaatgttttgcacataatttccttaataaaaaagtagagaatattcgtgagtagtacgtagttatggactagttaaaacataataagttattgtctataataatatcacgagtattccattcattacaaacttccaaatatcacgagcattccattcgtcacaaacttccaaaatacactcaagcgaatattcttcaaaacaaataaaaatatgcacatatcatcattagctagttcaaattggtgaagaaaagtgtgacagacgcttctcatcagtttagtttagataaatccggcaataaaaatcgctatcgactaccaaacaaggaagttgtcaaatgagacgttcacgacatctatgttttgaggtcccgatccttgcagcctttgctctaggctctgattggtagatttgggaattaggatgactaatggaaatttggaaagatttaatttcacctccttttctcctattagtgattcccagtttaattggggagaggggtggagcagacgcgaagtctccgttcttgtggaacaaagaagcatgcaaagaaaagaaataaggcataggagttggggcaaccacttggatggagtgagggcagatggccgtgcgtagccagcagtgcagcgaccgcaccaagctctgattgatcatgtgattccaacttaatttgcaagtttccaagcacgcaacgtaaggtgggcatgccgcatcgcgacgtgggacaagacgagaagccgtatgatatgctgctttgttacgcaggtgcactgcactagtagtacatagtagagtattatattctacacgggcggcacattagttcgttacagatagtatcagatcaggaattcaggattcagtgctacgattttcttcaatatttcttactgcgtgttgggattgatttgattcatgtatataacacggtgtcagtttggatatatatacagtaatttcactattctctatttcttcaacgtatgcgcccatgatgtttactactccctctgtcctataatataagggattttgggcttttacttgcactgtttgaccactcgtcttatttataaaatttgtgcaaatacaaaaaacaaaaagttgtgcttaaagtactttggataataaagtgtcacaaaaaaattaaataataattccaaatttttttgaataggacaagtggtcaaacagtgcaagtaaaaactcaaaatcccctataactagttgagtgcccgtgcgttgcaacgggtgattaaaaatacatctagtgttatatgttgataagccttaaaaaattctaatagacattataaaacccaaaccccaagtccatgatacacaatattttaaattcaaattgattacaaatgcagtgctacttttttatttcaaatccatcaagcaaaatcaatttcagatttaagtccataatataaaatcaatgttaggtctcagtttagaatctgttttaaattttcccttccactgaccgtaggctaatgattagaatttataggcagaatcagacctttactattgcctctaactgtacattgcctaggtgaagcacaaaggatgccagtaattgagatggcctcgatgggtttatcctcccctattgcagtaccacacgccgcaggcaaattcatctggcaaaagacaaaaataagggaacaatttctgaatatgtatcactaaactgcagcagcaaatgcaacaatgctggaactgtactaccgaagtgatcacagtaagagtctcaccatagatagtggccaagcaagtaggagcagaaagttggaggccatgtagagcaccatcccctgcgctgccaccaccagcaacaacgacggcatggccagtgcccaatgcttgaaagcaaccaccccggtgcgcacaacgccacccatgagactcaaatcactcatccaggcgaagcgaacaactgcatgcatgctaggagtggagacggcggccgtcgctgcatgtagtaccgacctggcggggtagtaggtgatgctgagggagcgcagccaggcggcggcaatactgcctctccctcaactgagttgatctgaaccttggtctgcatgtagtaccgacctggtgaggtagtaggtgacttcgagggagcgcagccaggcggcggcaatactgcctctccctcaactgagttgatctgaaccttggttactggaattgcgctgcatatcttcttctttagcaatcaggagacaagttaataggtgattgaatttaaaaccagttacaaacaagatccatcagggtgaaaagaatagaaagtacaaaggcactcacaattagagttcagttcttcaataatttatctccaagattcagtctcactgcacctaatggtgtggcagcccgaacacttcccattgctaagaaaaggaaaatattttagtaaatatttctattattagaagctttaatcagttgctatataggatatgtagtggtcattgatatattagcagctttttcatttgtctgaattaatattgagaacaaatgtggatataatcctggtgttgcagaaatcacaggacttatggcctttcagtttgtgttctacttgatagtgtgctacaaaattcaaataatacattaatgattgcaaatatttagaaatgcacaagctgtaaataaaccagcaatctcttttaaatcctgtcctgcatggactaaaaataaaagaaatacttcctccgtcccaaaataaagccattttttaggttggcacgggtattaagaaagtaggtgagaatgattggaggaagtgtgtgattggttgaaaagagaaagtaggtgaagaagaatggttgtgattggttgagaggaggaggtaggtgaagaaatagcttcattttgggacaagacactgtgctagaaatagctacattttaggacggagggagtacttaagttcagtacctactgaataagtttgtttgcagttacccataggtccatacaaaggaaacatggtctttataaaatcacagggtctttataaaacaatcatgccatttaaggacaccaaagctacatatcaaatttatttgactcagtacaaatgatcaaaaaagagtaggcatatgaagagtagaatctacgtagttcgaggtggacagtactatttggtcaatttgagcagaggaacaatgagggctccagcatttcttactaaatccctgactcgcatttttcactaaccatatgaaaagcataatcatatataaattcaatattttttcatgacaatactttttgggatatggagtttgcaaactaacattagaaattgtaaactaaccccagactaatgtgtttgatccactaaattttcatccacaacaaacaaataaacgtcgctttatagatgtactataaactccattataaacaaatgggggggaggggtatggaagaaatcataacatgaaaaaaattttacaacgttacttaccaccggctgaggaggaggttgccgcaatagagggcgccgtcgttggtggccggggctcgcagaagggggacgcggaggagatcgacgcgggattgatggttgcgcggaggagatagacgtgaggcgactcgtggaggcagcgacggaggataggcgggcaacatggtcatgggcgatgggatcggctgggaaataacggagagaaattggtacaactacaactccttcaactccctgctattgtatatgaaagccatacaagttatgttatcagcactcctgatgaatacaaaaaggtcaaatcaaatcacagcgaatttttggacacgaaatccacctaagaaacggccataaatttcatgaacacaaaggataaaacaatggatattagtataacttgcgccaatggatattagtatgttagtataacaaaagctaaatactcatggcatactcttttccccaatgttaccattatttacactgtgaaacatattcaagtcatctatttatatgtacgatcctgtttagataacttaaacagtaatgtaccacctcgataacttgcactgcaccattcatttcccactccgacaaatcgaagtatggaagacatcggcacgatactaaaaataagcatttatgcattgaaaaattccctttgggccaagtgagccaaccaaatgtatatgctgtttctatcaaaaagattattgtatcatgtttcgagcctcagatttcattcgagcgggacagtgggtgtaaagttttgacttttgtcttgctgaatagcagaattagtctttcctgatcaatttctgatctaatggcttcagccaactgcatcaacctgatgctgtggtcctagaagaaatgaactttttttttaactcagttcagacttcagaacccattttcttcagggaaaaaaaaaagttcagaacccattgtatttagttactgttgctgtgcttatgttcaatctgtccttgtgttaagcattatgttatgggcatgcagtcacaatcaaattacatcggttgatgacaatgtgtgtgcctgcctgtatctgccttcctatatgtgcccaaccaaggttaatatggattaactcaccaatagacgtcgaaccgaggagagggaatagattaacatgtgaatatgcagatttagagacctagtaccaagaggaaggggagtacaccaaccttgggaatagttggcgccggccttggggaggaggcaggatgcgacgacggcggaggggcggcggtcgagggcggtgcgggtctagggtttcggcgcgatgagggaggagggaggagtcggcggcgtcgggtcacggggtgagtgcgagagagaggagggcgtcgatggcgaatcctcgacggtgacgatgggggcgccgacgcgtcgatgtggggagtcgcgagggtggattggggggcggcgatggtgtggaggaggcgggatgcgacgacagcagaggggcggcggtcgagggaggcgcgaggatggattgaggggcggtgatggtgtggaggaggcggcggtggagggagagaagtcggaggaggggcggcggtcgagggagaggagtcggcgccgtttcctttttttttttttttttgttgcggacgaggagtgtgcgccgtttccttttctttcttttttttccgttgtagagtggcatgtaaattgttgatgtacctttctcatgtttgatcgtctgtccttggcttcactatcaccgtaacgaattttttaaatagtaaagatatgggacgaagggagtagctactgattcaaaaattccgaatccaagcaccaaacttcagataaacatacctttctcaacagcatgcccacagctttaagctgccaagtgccaacactcacagaaaactcggcctggcgcaaaaaaaaaaagaaagaaaagaaaacaccatatcctgagtcctgacttctttcactagcaaatactgagttactaggatttaggaccctcacatgatcaaacaacaaacatattaaacattgtcataatgaagccacatgtataaaccaaacagccatatccagcggttctatttaatctcaccactaactgtcgcatcaagcaagcagcactttacattatcaatcacgattttcactgctccgctgcattcatcacataaatgaaaatatttaagcatggcacaccatctcccagttcttgtgaaaagaaaaaggaataatcattgagcagcattcagacgatccacatcatgaacctgcaacagactcactagttcaaccagacacagctatccattttaagatttacaaaaggtacatggtcacagaccacaactcctaattgtatatgactaacccacccaaaaggaagactgattaaagcttacatgtataacttattaaactgcctcctactcctttagcatcactacctacaagttttagttagcaaagttaccatattggcacagggcaactgaaattggtagccaaaaactgccccaaaatactattcctaggcagatcaaaagggtgtcaagatatcacttattctctttaacgaataaacaccttggactgactgaatcaaagtcgagctttcgacaaatacttgggctgagctgtaccgctttaagaggtcgcctcagtggcgcatctgggcaggtgtctgcaatgcctataagtagaggctcacaacttccaggtgaattagaacctatcagatcctttccagtcgtctctagtgcttgatttgagataatcagatcaataaacatcttgcagatctgttcaagaaactgatcgtcctcctcagcttcatcgaattcaaaacttaaccttttaacagggtaatcatctgaatcaaatcttagctgccttcgtgaaggaagttctggtgccttgatcaccttcttctttggtgcacaagctaactcctctggtcctggagcaaaaggatcaaagatgctttcacgcggtgtctgacagccatacaaaggatcattgctagcatcagtagcaccgaatttagtattcagtgcatcccacaactccttagcgtcggtcatatacatatacacctcgaccagacgatcgccaagaacgctaagaatgcatcccacaaagagagtagtggcttcctcgaattgcttctgctgatcagtagtaagaattccttcaggtttaccagtactcacccagaagcatttcatagccgtcagccacagagtgaccctgatctgccatctcttaaagtgcacaccggtgaatttatccggcctcagtgcatcggcaaaaccagccatagtaaaatcacagtgcctataataaggtttttggattgttgaaattataagcacataatgatttaatttattccataaataaatcatggcattgcagatgtaaactagattgaacgcatcattcgatctacacatgtaaactaagcagtaaaacatgaacagatcaaatatgcgcaacacgtcgaacacgtaccgaggtggcggaaagactggttgctcggcaggaactactcgtggttgcgagcgtcgacaaaggcgcgagtggctaggagggcatcctcccttttaaggaggtctccctctcctagaataagtaaggtgataccaaaatccgcatgcatgccatcccatgaggtggacttttgtgattttccaaagaattaatcttcgaatgggccttagcccatctattaattccaacagaaccttggcaccggcaatgcgggctagagggcgcatgatgtgggtccaagagaagaccgacgagccaaacccatgtaatagcactatgggcaaaccaatttggttttggtcagcgtttgtgatgccagagtctggagattggtcactggaatcctcatgggtgcaaaccttgtggtggacccttacgccattgatctcgtagaagctgctgtctgggtcagcgagggcatcggggtcaaggagatcgtcctggtcaatgccagccacactccggcggcggcggcgtcgtggtggcatctgggcactgtctggaattgaacctgcattagttgtagggtttagtagtgccaaagctgttctgctagttttggggacgtttaagcttttggtgctagctttgccccccagatgaaaaaaaaggctcaataatgcgccattttaaataggggaaatcacacattctacttgcagagagcacatcaacctcaaaatatcccatcttaataacctcctatccaaatgctgcaagtctttcaccacagagaagttacctgggaactcggcagaggcaaaggctgggggagaaccattgggacggcgagggccggaggccgcgggagaaggcggcagaatgtcgagggtgtggagccgagggtggggattggaggtagcgtgggagaggcatctgaattgacctgatcaactgcagagcaggaaactcacgttcgctggactgaacaattgtgtggggtctcaacggaagaagcaaaccgaaaaatcaatctgcatccacacactgcaaatttgtatcgtcatcaaacaaaacggtgctccaaataactatcaatctatattagatgaatgcacactaccatgctcggcaatcgcatttcttggatttttctcatcattgattcattgggcaacaaaatatcaagtcttaatctccctaaaaaaatatatccaatcttgaagcaagtaaaacatctgtgagttaaaagcatgtgaacaacgcaagcagaggaaaaaaaaagatgatatcaaaatagaaaagtttggttatagtaagcttaagagcatgtataagatctgagacaactatagtctctcgtgcactatagacgataccgaaagacagttactacaacagtttgccatatataccatgaaacgaaataaatgtgaactacactcgtagctttggaaaagagaaaatccatcaaatgccatcgatagacaaacaccataatcctagaaatgccatcgacaaaggcaacttcccaaaaatgtcattgcacaagcctctttctcccaaaaatgccatcgccgtcaaattgctgttagcatctttccgttaagttgcatgaaaagacaatcttaccgctaggcaaccatttgctcacgcaacatcatttttgcattgtttgctcacaacaaattatatttatgttagcttacaaatttaccaacatcatttgatagtttccttctgttttcatccctagtcactccccaatggcaaataggcagctcccgagagagagagagagagagaacgcgccgtcgccgccgcggaactcctcgccgcgccctgcgacgccgccaccgccgccgtcgacctcctcgccgtgccctacgaggctgccgccgtggacctcctcgctgcaccctatgatactgccgcgccgtcgccactgccgtcgtggacctcctcgccgcgccctgcgaggccgccgccgtggaccactgccgcgccacccctgccgtggatcctcaccgcgccctgccgcgccgccgccctggtcctccttgccgcgtcctaccgcgtcgctgtgctggtcctcctcgccgcaccctgtcgtgccgcccccgtggaccgccagcatagcggcgccatggccaccgctagggaccgtcgctgagccaccattgtctagacgccgctggggagagcgctagatcgggatcggttgcggtagggttagggctagaaattttattttttttctttgacagtgaaaattgggtatattttgcattgagggcaaaatggttattattaaaaaaaataatggttgtaatggtgtggagttgatggtgatggcatttttgggagaagggcttgtgcaatggtattttttggaagttgcttttgtcgatgatatttctgagattatggtgtttgtcgatgtcatttcatggattttttttctttggaaaattatgtgttagtagtaccagacagtagaaacaggcagtacagactacagagcttggtcccctctatgtggaaatggtagctacagtgatggggtttgaccatttgggcaaattctacaaatactatagcgattggcatgaagtatgaaccacctactaccataatctttatgaaaacatacacagctatgaacaccatctattacttggtgttgagttgtgatccaaattaacttgcaaataaaggccaacttctatcggagcgcagcggagatccgtcgctggaggcttgagccgtagcgaaaaagataccgaaagaaaaaaagggaaggcagaaagaaaaacagagaaaaccaaaaaagaagcgaaattgaaaaaaaaacaaaaaaaaaaggaaaaaagggtcctccagtgctgtccgtcgctccttctccgcgcgcgacaggtgactggttgctaaatagctttctcgggagaccactacacttcggacgtctgatggataacagaaaatcggacgcttgttatgttatatttttgacacatacactaacatgtgcaaaaacactttaaactatttttttctcttaaattatttatccaaatcatgatccgattacaccattaaattcgttgcaattaaatcttcaaaacaagaccacacatgaatatattccgacgaatttttttagctaattattgaattatttttaaatattgcacgatgttccaccatgtatatcggaattgtttcactaaataaatcaaaaacgtttcaatcgtttaaatcaggcgttgtttcaccttatataaaaacaatgtttcagcaaatagcgaaagaatgttccagttcactgcaacatttgatccatacatagtgaaacactataagtacactaggtgaaacatttttggtagaacaaaaaaaataaagcgaattctcttgatagagggtttctaaaatatgtgggtaatttcttgcaaaagaatgttttaattcactgcaacattaagtctatacatagtgaaacattgtgagtacactaggtgaaacattttttgtggagtatgtagtgggaacacgtggcagtgttgcaggggagacgtggtggggcccaaggggagcatgtgcgcacgtggtggttgggggggagcgtccgattttctccccctcccccgggcgaccgaggcgagatcttattgtaaagatttaattgaaacgaatacaccgaaataaatggatcatagactgaatgagtagttttggagaaaaatgattttaaagattacaacttacatatgcatatatacttgcacaaaagttatgcgtatatgtatcctgagttcctgacatgacaaagagatgaggaggcattagcatgatgaggcgtccaaagtttcttccgtgatcggacgctagatgggaagtatttccggcattctcgaactatcgtaccagtttcaacccgtgggagagggttggccgccagctccgatgctagcgcgtatgcgccagatagcagcgcccgatattttctttccggggcgtgggcggaatcattcaatcatcgatttcttccccaaacctagcctcctccactgctcccaacctgccttccgtcgccgccgcctaccctcgactactgatctacctttctccgtcggcggccgcgggtgcccagcgcaaccgcaccctctcctctccagcagcggcgacccctcgcctcataccctttcctgggcaaggccgggaggggatcaatctagggtttccgccgccgccggttccccggacgttgctgcatgacgatggaagatggaagctgtccttcaccagtcacccccagcgaagccgaagctggagccgaagattacgaatcttggacactgaagcagaagattgaggatctcgtcaactgtgatcctatccatggtatcgtgccaaaaaatcctaaatataaagcatatttcgaggaaaagttccaggtacgtacgtacatattttcttcgatccatcatccatggatgcaaaactaattaattaattttgacctcaccagctagcatatattttttttattgtatgcaatcgatcgatgaatcaagtggtatcatatctattgctattgtaggagaagttaagtaagtacgtccgtgttgtattgccgaaacttcgtccagcaattcagaaggatagcgtcaagcaattctttcaagtctacaattgttggtcaggtttcatgggacggggaaacttccttttacctgatatcctcaccaacatggccaacgagaacgctctgcgttgtgccagggtcgcactccagggcacctctcctctgttgcgtcgccgccgcgctgaccccaacacccgccaccgctatggcttcgcccccctacacatggctgccgagaacttcagcgtcgacatggtcaaactcctcttccgttacggcgcatcggcgaacatctgcaccaagggcgagtatgtcattgagggcctcctccctctccatgttgctgtcgagaatgccagcatgcacaagtacattgaggatcattgggctcatggggaccatatcatcaacctcatcttcctcctttgtcttcctgagatggtttcttcattcaattcctatccctattatattactgccagagcatttagcctatttcaaatactagcttggaccaataattaatttcagccaccactgacatgcagaaaatgttcttggacacgactagattaattgccaaacagacagataacattgtcgacgaggtatggaattacattcgtgaagaaaagcatgtccaggcagcaattttgctgctggctgctcaaaagcagctccgtggccgccttaacaacagcagtggcaaagcctctctgaacgggtttgatattgttaaaagccacattgatgatgctcttaacaccatacatcttgaggggttaaatatggttaaggagggaaagaatggcagggcactaaagagattgaaagacaagaaggaagcccttcttacagcacttgtactagttggcattgttcacaaagccggtgaagctcttgagggatacattcaaactcattcacaggtaattgctgaaatttccccattgttaccattgctttctgatacctgtgggttttgatttttccagtttcgttttctttaaatttgtgtgatgcttacttcccatgactttgatctactagtgactcattttctttaaatttgtgtgatgcttacttccatgattttgatatactagtgaaacctcgaattacccttgttttagaaagctgtggtgggtgtggatcgcttttctttttctttttggtgatatgtaaacagttggaggagctcctgctgcattgtatcaactagtcacatccatattataaaaaggagttaaaaagaactggacccatgcagttaatggcatcttttagcctccattttcatgtaaatccaagaggctgaatagcaggcccagcatagtggtagtatactgctaggttcaggtctaatgcatgagtcaaaaatatatggaaacatgggagtagatgcagtgtgttcttaatgcgaagcaaggtggcccaccatcttttagatgcctacgagtttaatgcataagtcaaggtgacaccttacatctaaatctatacaatgttgccaacttctgtattacacacatgcttaccaattattgagcccatgtaccattcgtttcccctttctaaagaagatctaagaggaggggaagaggtcctcttcagtctcagcagcagaatgcaagaagggaaaaaaggacatgtatcctgtccaaagaggcagagcaaagcgcaagaaaaagaacatagatgagggaagaggtgccctttccaaactagcagagcaaagcatagaacaagaaacagagcagagaagagggaagaacaagtacctgtcctgtgcgacggttgacagctggggaagtggagagcatgaaggagaagcagacccgtcggagaaataggggcgttaggaaggcaggctggtcctctgcatctcccccttctccttttctatctctaggccactagcacccctcacacaccagcctttcgactgtgcacgccacacttgctctccccacatgtgcgtacccccatggcacttgcggaaggctaagcgagcaatatgctctcttccactggtgcttgggcgcgaaaggcgatgcctttacgacactttaaaaaccaagaattgatatttgcatgaactatagaagagcataggggtccattgaaggtaagtttatctttttgggatcaggaacatataaaatttgtagggaagatcaattgttcttaagtatggtttgagaataaaaatataatagcaccctcccttggattgggctaccttttaaagtgggaccccatgtaagtttagcaaagcaagttttttagcttggaaactgagtctttgagtttttgtaaatattttcaattttattcatgaatatatgcgtattcagcaattttaattatgactccatatatattcagcttctattcttttttttttttaagttgagggctaacataatgggtaagatgagcaagaaggtgcgtagttgttatgtgggagatcatgaggctaataaagggaatagcacttagattatgtcaaggtaacctgcaaaagggtagagatgaatagatgatagtgttaagggtgatggtggtttgtctttagccccattggagtggaaacctgatattggatatgctgcccttgttaataatatatgtttgagtggaagtttatatattctttctctaaccatgactatgactaggaatcatcatattgttctctcaacaagtctttcatattttaattgaattcaagctctaagaaatgaacgaaacaaaagctggactaccctgaagcaacttctcataatgacccaaattacatgaccagaaggcctgcattatggaagcttttgttggtgctgaccagttctttttcttcctcatttatttcttctattcctcacctggcatgttcatgtaaaacgcaaaacacatgtcggattgttattttctttcttatttatttgctttattctacgtgcatgttaaagtttagtgagaatgcatgtgtcaaaaattgtgaccctctttcaccccacgtctctatgcacacgaagagtgggttctaatattttctgttcaactttacttgggtctgtttcgaaggcccgccatttcacagcatccatatatgccatcatgccacaatgaatatatcaataaatttaaaaagtggatgcttgaaaagaaagattaaccnnnnnnnnnnnnnnnnnnnnntcatgccacaacttagttggcagtgacgatacatgttcacatggtacctatcataggagaataatagtttaagcgttaagcctccaccttctcacatcaagcctagcagagaaaaggccttggcttttggtgtcacttaagattcgtttatcattaggcaaccttctatagtttgtctttactacttttttatttgtagtaggaaaagtgaaaaattctctgctggggtccatggcaatgaaactgcaaattccatgcaactatctatacccccagagtgtagaacataacattgtgacaccacaatattctagagttgattaccatagagcatctgtatagtttagactgttatactttcaattccaaaaaagtgatctggtttgtagcaggtgcaacggtaccgaaaacaactctcacctgccaatattctgctttacacgtgtgccggcatagtgctgccataccactgttctgttgtgtaagatctgttttaattttcttctgctgttatactgtagtgtcgtcaagtaatgtgccattggttccagacaaaaagtataagttgggcaacttggttgtttgttcatctagccaaatgagatgttattgacaaggccctagtgggctttttggtgttgtcttgtttgcggtgagcaaggatggcaaataaatccaagcttggaatagtagagttggttgactatggcagattggcagcatgccaaatcaatgacttactgattcaactcttgaccacttagtatttgtgtagatgtagtgcttaaaacaccattgttgactttcagatggtctgtactgtttgtctcgagagatgatgttattgaaggctgttatgtgtcttgcaaccaccaccacctgcaagtttagatatctgaattctcgttttggaataatatccttgaacattttgtaatgatacgttttaacaattttcttggtgaaatgtaggtgcgccatgacgaaattgttgaacatgtttcatcaattctaaaaagcaatggcattgctcattctggggaaagcattgacactggaaaacttgaatggtttgacatctactggctttatatatatattcagttcatgtttttgtgcatataatttatgcgttgatttatttgtgttttgaagctaccaacatggtggggggatgtcgattggcaagtcagattcacaaagaggtgtgtttcattttggttgatcctatttcttattaaaataaactagaaaggaaaatagctgtgaaactttattacgtgtccacccattacaaagtcatttgctgtggtgaatgcacaactttggaacattgcagaaagcttatgacttgcatccagcgcaaaagggggtgcaaccagactctgtacaccaacctcggaactatgctttccatttcataagctgtctcatgaccaatttcattgctgattacagtgggctatggggaaactattgaagcggacaagtcatcttctgatataggcgaagttagtaaaatggtaatgagatacgcaattaaatttatttgttgagtctaattcatgctgatgaaattagtatgaaaacaagattgttcctccaaatttgctcctactgacccctatcaattaacaagatatggaaatatttgataacgtaatgcataaccatcaattgttgccttattggttaacaacagaatgaatactcactacttaaatctgagtgtttttataattttgtttatgcgttcagttgctaattttctcatgtaaacagatcctgggaaagcaaccacctaaaggatcagccatacgcgaagtgagagatatgttcttcccatactggaaatcggtgttgtctcgacggttgcagctaaagatagttccatcctgtcaactaagcaggaaggacttgctaagtgctgaagcgagcacgaaggggaccaagagtatggaccacccgtgtaacccaatcaaatcaatgggaaatcttggttcgatgggctggcccccattgtcaagtgagtccagaaggatgctttatactgttgcttcaatgtcccggaaggtgtttaagcgcacttgactacagaaaatctttggcggtatgcttgttgaaacactttttttttctataataagcctctagaatgtattttggtcatagatgagaaggggagaaaacagcatatcctgacttctttcactagcaaatactgagttactagtaggatttaggaccctcacatgatcaaacaacaaacatactaaacattgttacaggtttcaaaacatataatgaagccacatgtataaaccaaacggccatttccagcagttttctgtttaacctcaccactaacagtcgcatcaagcaagcagcactttaccttatcaatcatgattttcactgctccgctgcattcgtcacataaatgaaaatatttaagcacggcacaacatctcccagttcttgtcaaagaaaaatgaactaatattgagcagcattcagatgatccacatcatgaacctgcaacagactcactagttcaaccagacacagttatccattttaagatttacaaaaggtacatggtcacagaccacaactcctaattgtatatgactaacccacctaaaaggaagactgattaaagcttacatatataacttattaaactgcctcctactcctttagcatcactacctacaagtttcagttagcaaagttaccatattggcacagggcaactgaaattggtagccaaaaactgccccaaaatgttgttcctgggcagatcaaaagggtgtcaagatatcacttattctctttaacgaataaacaccttggactgactgaatcaaagtcgagctttcgacaaatgcttgggctgagctgtactgctttaagaggtcgcctcagtggcgcatctgggcaggtgtatgcaatgcttgtaagtagaggctctgaagaagaggtctcacagcttccaagtgaattagaacctatcagatcctttccagtcgtctctagtgcttgatttgagacaatcagatcaataaacatcttgcagatcctttcaagaaactgatcatcctcctcagcatcatcgaattcaaaacttaaccttttaacagggtaatcacctgaatcaaaacttagctgccttcgcggaggaagttctggtgccttgatcacattcttctttggtgcacaagctaactcctttggtcctggagcaaaaggatcaaagatgctttcacgcggtgtctgacagccatacaaaggatcttcatctgcaacatttattgagctagatgattcaattgcttccttctctagtgtaatcacctcagcaacaccactcttgttattttcatgatcacataccatgccaagggatcttgtgtccttattttcgaaggaagattgcacagaaacttcttcatccacacacttttccaacttttttacaacagggaaatcacagtttgaaactagcgaattatcagtaacattcttatccacgccttgatccatttgggagtaatgtggactcaacctctcctgtaacttgcaaaatgaaaacctacaatgaaataaggaatagaaaatttaaataccacaaactaaccaggacataacagaaaatgatcaccgaaacaaacaagggacacccaagaagagtccaaaaggtttctaggagaaaataaggcaaaaagggtcataggagaaactaaagcaaaattaagtggttatcgacaaaacactagccccaaatgtaactgcaactgctatgaatgtaaaatgtgttctaaaagactatgcaaggcgccaaggtagtcgtcagccactaataagcagaacccagcttcaactcttgttagaagccgagtgaaatcactggcatcatctgatctaatataaccgaagccgtttttgtcgataaccgtttttttggccacatttcaaactgttcaaccatcactctgagtccaagtatgtatacaacaattatatatatttctttacttctgcaaaaagaaatcaattaaccatcaacatctattttataaagcaccgtctaattgtaaaatgggaaaactaaaaggtaaaatgctttctatgcatagctccttggaagaccttcacccacactttttacctactatatatgtatcaagggtttatatgcagctatggcagatacataaaagattaaaaatattctctatagccagtgttaaactgaacaccatagcgaaatactcaaagttgctattagtggtaccaatctagagtaataggcgcccaaatgccaaatatgtgtggtctctacaccgagacctattgtagccctattgggtgtcttgcctgagacaaatcttgcgcgcgccgccgctgaacaaaaccataaaccttgtccgagcgctctctcgacggcagcgtggtgcggctaagaagtttggatttgatccctcacactacaatcaaaggagacaagtctacaacagatatctaatgaagcaaaatagagttacttaccaacaaaagaagaaatcaatccaatccaatccaagcccgggcggatcttccagtccaacccaatagatgagaaggggagcaaaccggatgcgtgttccttgttggcgcacctggaaatcagaatcacatggcaaaagaagcagatttagggctttaagaggtgagaaaagccgaaaaatcacaggaaaaagagataaagctcgctagaaccctaacatgtgaaaaaccataaaaaaatccatacaaagaagaggagctttttggatctgtgtgagagaaagattgagaagtagaaatggttaagaaaatgggaagaaagaaaatacctcgcagcagctctggattggggcgcgagattggtttgggcggcgccgaccgggattgggatgaggcatcccgccgccaaaacaatcccccctattaaaataaaacaaagttttcacaaaacaccccatagaatgtattatttgctaattctattcctttgtacaacatccagcgagctcagctggaccactgaggaatatatgtgaaaaataaagaatcagtgggttgaagagtaaaatgcaccaaaaggagggaaaactaatttgggcgggcaaccttggcgcacgtgtagcaatatagcatatccttcccgcggaataggtgtgcctatacatatcatcatttaggtgaaaaatgagttcttttttaggaaaaaaaataatggttgtgatcactcagaaatctataggtgcaaataatcataaactgagtgggtttgatgtgtatactacgttgagggcttgaggccagtttgcaggttatcgaagaccataatgattaagagacagttaattttctatttttcttgtttactggaatttatctattgcaagcaaaatacccaagtttcacgacgggtgaagatcacaattataactttacataccttgttccgccatttatctcttcgtatgaaacacgtcaatgaggccaaagaataaacatacgtttgttctgtcatttatctcttcatatgaaacacacaagtgaggttaaagaataatcctgtgagattttgatacctaattctaccagtataaagaagtttatgtgaaatacatataaactcgagggcaggcataaaaataattgaatgaataacttttcgtaatattaacaaaatgaaagggttaaaatgaaagattgacgatgaatccgagatattttatcatctaatacacatagatggaatccgtccggtgatggtggaggcattatccagcctctctcattgcaactcgcgagggacggtggcggtgctcccgtagccaaccaacccccttgggcacgatagacgtcctcccttagcgcgtggtagcagtgctcacctggccctaggcagcgagggcagcggtgctcccctgtccttagtagacgacaatggtgacgccagcagcctccataggcggtgaggacggcagtgctccccgtcctccctattcggcgatggcaagtgtatgaggtggcttgctaagatacaagtgtactatactttcttgtgtgttattgagttgttcgaatttttggtattttattatgaagttctcgtcttctactatggtgaaaagctcatataactggatagcgtttgcagcttcatctattcttgttgccgatttttggtcatgttcctccaattttgaaggttttggattggcaaccatgtggacatgtttgttttcctcgaactctgaaggttttaagctggccacgaacgaattggaagcatttgagccggccacgaatggattggaagcagtagcggacatattgcgcttgccgtgggaacattgcggactcttcgcgatccggacgtacacggggaagaagggaatctgacaaaaatacatgcacgggaacaaaagctagacgacgggcaaaaaaaattcctggaagctttaagtattttttatgcaggtataaatatcctcatcaggattttgatatatgtcatttccttatttctgttgtcaacatgtttttattagaatacacttaagccaaattacatgacgaatagatggaactgtatctatcataggctatgcctagtgcttcacctaggcgccttttgctcgctcaaaactattggtagtgtaactagttcaatttccaccttatcttcatccacctttgccagtcctcctatgaagtccccgtgagtcttcacacgtatctacaagtcttcctcccctctccttagcgttcacccatctccaccagtcttagcctatcttgttgggtctttgtcttttttcgttggtttatgcccatcttgctagtgcaaaaacttccgaaaatgtattgcacataatttccttaataaatagagaatattcgtgagtagtacgtagttatggactagttaaaacataataagttattgcctacaatattatcacgagtataccattcattagaaacttccaaatattccatttgtcacaaacttccaaaatacactcaagcaaatatccttcaaaacaaataaaaatatgcacatatcaccattagctagttcaaattggtgaagaaaagtgtgacaaacgctttttatcagttttgtttagataaattgacactaaaaatcgctatcgactactaaacgagaaagttatcaaatgagatccaagaaatatgggcaacatagcacgaagcgttcacggcatctatgtttcgaggtcttgatccttgcagcctttgctctcggctctgatcggtagatttggaattgggatgactagatgagatagggttaatggaaatttggaaagatttaatttcacctccttttcaataattacataatctttttaataaaataaatagttaaacgtatgtctaaaagtcaacaaataaaacaaatggccaaacgtaaataaccgtgcataatacataaatactatttcaatcgtaaacataaacgaagggcaatgcacgtaggtttatcagtccatgaatgaatattatattaaaaaaatatatataatgtcagaagtgggatttgaacccacgccctcgttagaggaccagaacttgagtctggcgccttagaccactcggccatcctgacctcacagttttttttcacctgatgttgtctaaaccattaattgacagacgagaagtaaaagtttcattccacaaataagtaacacttcaatcggtgtacagaattgcatactgtagaatatactactgtttacactcgagttgcagcattgttgcaaacacataccaaacaaatataacaaggggaaaagggaaacatttatataaccttcaagaatctcaagtcagagctctctaaaaattaatggaacacctttcccaggctcgatggtcagtctgaacgcagggcaatgcacatagtttggagaaagcttgaattcaaacttggacagcaggagtgacagaacaaccttgagctcaaccatggctagattctggccggcacatgtccggaccccaacgccgaagggcatgtacatatgagggggtttgcaggcccctgctatgccgttggcgaacctgtccggatcgaatttgtcggcactaggaccccatactgaaggatcccggtgagccatcgcgatcgggatccagatgttagttcctttcggtatgtcgatgccgccaagtttcatgtcattcagagcttcccgggcgacgaaggaggctggtgggtacaatcggagtgtctcctggatcaccattgtcagctgcacaagtatcaacagcacaccattgttagctgtaatctaatgaacggattgttttcatctcttctgttactggaagaggatgagaggacaaaacatacctttttcaacttccgtagaatgtcaaaatctagtggtctcccttgacaaatgtcaagggattccacccgggcacgggactgccattcatggtgtgaagctagaagcatcaaacaccaagcagccgtggtcgaagttgtctcatgccctgcgaagtagatgtttttgcagttgtcgacgatgaaatcctcgggcgtgcatgaagcaaagggaccatccttagaaccttgaataatggagtgcaggagatccttgtttactgaggtcgatgaatcatgttcatatttctttgatatgtttaaaatgagggtacggatgctactatccagattccagatccctctattgctccttgttggtaaatacctagtcggcccagcacaaaaataaaggaaaatccttaaatgattaaccaattacaataagatgataaaacatgagaagccacttattttcatataattattctcatgcaatggtatggattggaaaatacatgttatgatactcttggatctactgtagtatctcacggattctagataaaatattattttttaggccttatatccatttagaatgatatgtaggaattgcaggtagatcagaccaaaatgggacatgtaagttagcccagacaaaatagaagctgtatatttctccaaaaggttattctgatactgctgcaaaccaaaacagtaacacattatctgaattatagtgatttcagaagttgaatctgggcagctacttgggtattgaaatcattcaaactaagcattatctaaaaaaagagctcaacagaggattttgagcagttcaaagacagcattcttttgagttttaaattgtctcaaattgaaatatgtgccacagtagtacatgtgtagtttctgaaatatacctacttccaggaacaccaatgagcatactttgttttgccattgctttctgaagttgtcgtatttttatgaaaatctccttgccttcactaaagctgcttccaaaacaagcccttgatatgacatcagctgaaaaggttctcaagaactcatcaaccacaatctctgcactgcctcctctgtcctcaacttcatttttccatgagttcaacattgacattgcagcctccatcatcaaattcaccattccctatggatgtcattttaacaataaattgagttttagtatatgctacatgtagtgtactagaaagttgctccaagaaaaatattgttttttgacagagagatccatggcccaatacaagtgcctgcagataattaccttaaccctttccatgaatagttcaggtgcaatcacttttctctggtgtacccatagatcaccatttgatgtcagaattcccataccaagaagagctccacgctctttttgcaagtagcaaggttttccaagatccaaagatttgcagttggctagctccttcaccatgtttggatcagtaacatttaaaacttgtatgcttccagtggaatacaggtagatggaacctaacacaacatcaatgtttcaggaacttatcagctttaattttaaatatgaaatgcacaaggcatccgtcgatgttctaaaaataaatctattaggacatggttacagaacatacaacaaaagaatttacagtaatttaaatagcttatatgtaatgagggtaacaatgagactggtcgacaagatgagacagtatatggtacaccatcagaacgtatatgaaaccatgagctatccataaacaggccccaatcaaagaaattatgtttcgatggttgcagagcgaactaccatccaaaatacaaaggtacctaaaactctctgaattcaagtttgcatcaccccaaaataaaaacaatcctgttatgtgggacaataaaaagagaaattttagagaaaaaataagtcaatatcaaaacattcctcttaacaaaattccaatgaattacatttaacatcgaatataaagatgaattaataaactttattttactgaaactattatgcactacaagtttcttaacgtaccataaaccctgctccagtggaggaagtaagggaaaagagttgccacataatttgatgaaaacatgtcggtactccctgcttcttgttcatgtgctgacttggccaattgctggattctcctcatctctggtatgtttccaaagagaaaagaaggcttgggacccctcactccttggctcctcagtttctgcctcaaccgctctggtcttagccatagaatgatatacacataggagaacagaaggatacagaggatgatcggaggtagaagtgctagccattgctgtgatgagaatagctccatttttgtgtgtacgtatctgggtgtgtgtgtgagagaagagggagactacatgttcatagcatatccatatactgtatactgcatatttgctgggtgatccatctccatgtgaagcttggagctgaaaaggacataaagccgcaaagaagcgcctcactcactctgagcagttagcatgtaacgatcatacaacactgcaaatttacaacatagaaaagaaatccaaggttagtggtaggaaaacttaatttaacatgcatttttttaaggaaaccagggtctgttatgaccaaattattcacatggcataaaaaggaacaatttgggggtttcatatatcttcaacagattatgaggttgggcaataaccttgtagtaaagagctttcaacaaacaataaattaagacttttcggcatgatgttgtatgatagtttagccccattaatttggcaagaaattgcacaagatatagacatatagtagcctagaggctgctagaatatagagagataacatcaattggttgcttgaataaaaaactacgggcctctgctaagagtagaggactcaattcattccccacacaagttattaaaggaagtgttagcctgcactaagaaaataaatgagatgagatgagtgagggcacgcaccgtggcatttcgagctcaacaattgggctctgtgactctgcagctagcagctccatgcgaagaccatgctgatgagttgattgattacaagtatcagcgcgagggcgcggaggatgcaaagaggatgaggaaactgactgattaagaagaatctgcggtccagatagatgcagtctccagaaacagccctgtctgtctacttgctaagttttgtcactttgttagactcccatcaatcaacgcttggacccaaacgtcagtggcaaaccagacaaatgcctttttttttttcatacaaaagggagtgatggcctctcttactttttcaacccaaaagaatggatcgcaacaatgttctccatcataaaaccctttgattgggttcaacgagcttagagtgcttaacaacttcatctcaaaaaaggagctttattataacaagcattgctgtctgtggccagcaattataactggagctgtcatgaatcgactgggtgggtgtgagtaacagggctgctagctcatggcagctttgtcaccatgagtggcaagccgaacccgggttcaatggtcagcctgaacgccggcgagtgacggtacctcggcgacggcgagaaggcgaactttgtcagcagcctggccaacaccaccttcagctccgccattgccaggttctgcccgatgcacgtcctgggcccgtgcccgaacggcacgtacatgtgcgccgccctgcacgccgccgccacgccgttcgcgaaccggtccggccggaactcgtcggcgtcggcgccccaggcttccttgtccaggtgcagcatcagcctgggcacctgcacgatggtgccgcgaggcacctcgatgttgccaagcttcacgtccgtcagggcctcctgcatcatcaccgacgccggcgggtacagccgaagcgtctcctggatcaccatcgtcacctgcatcatttcgacatcgttgtcattcatcatcagtaaacagccattgttaatttctacgatgaacaatgcggtttaagatgttaatttctcacaatctttaaccggcgaagggcgtccacgtccaatgtcgaccttccccggcaaacctccattgcctcagagtgcgtggcgagtagcatcaggcaccagatggcggtgaccgccgtgctctcgtgacctccgaagtagatggtcttacagtttccgacgataaagtcctcagcctctgcagcgctgcgaccatcctgcgcaccatcaatgatggcgttgacaagactgttgtgtgagtcttggtagtggtgttgttcctttgcgacatccaggatcagtaagcggacttgttcatccagcatctgtatttcttggttgctcttggttggcaggtatttcctacaacagcaatatagcatgaaccatctaaattagcatacctgatcacttatagctgtgattgtgacatgtaagtctagtttatgccatgcttgaattataatactttaagcatgtgctgtttgaaaacagtttacggcgaggttttctacctatttgtctctactgaatgacaggacttgttacctactaatctcaaattaataaggagtatacaaaagactatttcttggttaatatcatgatacacacgtgaaggttctcatttcattgcaactaatttcattgacttaccacagtgcagacagaccaacaaacgaatcttgctgagcaattactttttggagctgcctaagcttgcaaaatatttcttctccttttgtgaagctactcccaaagcaagccctggcaattacatctgctgacaagttccgcaagtaatcatcgacaactatttccctacaccctcccacatcgtcaatcatatcctcccatgcttctaacactgtaacagttgcatcctcaatcagctggatcataccctgcatgcatatataaataacaactgcaatcacgcgtgatacgagttctagttttcagtccatgaaacctacaagcaatcacaatttaatggtaccttaatcttatccatgaagaactctggtgcaattatcttcctctgataggcccattcatcaccattctctgtaaataaacctcctccaaagagggccttgcgagatttctttagataattaggcttaccaagctctgatggtgtccaccggcctatatccttcaccatatctgggtgagaaacttgtagtatctccagagctccagttgagtatagaaacactgggcctggtcaaaatacacatgtaaattaacttcattaagaagaactcaacatggacattccctcaaatttgacatgaatatagggaaaatgagatgaaaagcataatctattctaagattgaaatcatttgtcaaacttgcatttttcggagcaaaggaaatgataaatatgattgttattgtattagaattctcactaccaaagtagatcagatcctgcttaatctacaagtagttgggaaatttttagttattcaacacaaaactcgagataacatataaaatgggtgtatgaaaattttaattgatggtcaactactgagtcctttatatgactgtcaagagttgaatggctattatattaagctgtaaaagggtcccacagtctaaataaactattcatcaataattatgatcctgacaaacttgtttaataatactcagtactagcatctgagcttgtttagagtctgaaacagaaacttcgtaggatggtaaatagcatccaaaatggacaaaataaaattacaaaacaaaggattagatatatatttaaaaatgtgtgatggcaccatttcgctgaaaagtgtctgatctgtttatataatttgatatcctactaaaagttgaaaaacagtaaaaagaggagagattaaaaaaattatgattgccctccaactccctactaaatgatcaattcaggcttataaactagattttaatagcaaggatactttgggatcctgcttctccatggtaattcattaattcacttcaacagttgtaggtgactaattttctccaagacatgtcattaataaacttcaggatcctatcatcaatctgatctactcatgagccatgaacatatgagtgcaagagccaatcatggacaaagtcacaacactagcatatgcataccataagtttcccgacagaggagaaagtgtgggaagagggtggagatgaagttgttggtgccttgcttctgtgaaaatttgagttcttgtcggattcttttgatctcctttgtgttgccgtacagaaaagtaggcttgggaccccttatgccttgcctcctcaacttcttccttatcttcacagccctcagccataggatgttgcacaagtagaacagagctaagctaagaagtatgacaagaacaacaatgagtgcaagcaattctccatgaagcatagggaaccagagaagcaaagtatttctgtcaaatcttcagtacattaggtctttcgtgcgctagctttatatatttgtttaacacctcaagcatgtgaattcttttgtttgaccttttcttcaacaactgattgttttgtaggttgctttcacatcttgggatcaacttacaatcagttagaccttccag

SEQ ID NO: 7610 - DNA, 800 bp, Oryza sativa
cagtagtggtagctgtataaaccagatgtagaggcgagggcactagtcagcagcagacgagacgaccggcgatgaagatggtaaggccaatcaacactggcagaatcatgcagccatggaagtgaagaaaccagtcggcagccatggcaaacgtaggcagcttgtgttgaagatactgatgcctattagtagtgactgcgatgtagccagccgtgaagaagatagcatcagtcggcgttataacaggccagccgtgcaggcggtgacaccagtcagcggcggatgcggcggccggtcggtgaagacgtagacgcccaacaacggcagcataataggccagccgtgcaggcggaaacaccagtcggcggcggtcgaggcggccggtcggtgaagacgtagacgcccaacaacggcagcataataggccagccgtgcaggcggaaacaccagtcggcggcggtcgaggcggccggtcggtgaagacgtagacgcccaacaacggcggcataaaggccagccgttcaggcggaaacaccagtcggcggcggtcgaggcggccggtcggtgaagacgtagatgcccaacaacggcggcataaaggccagccgttcaggcggaaacaccagtcggcggcggcgaaggcaagccggtcggtgaagacgtagacgcccaacaacggcggcataaaagccagccgtgcaggcggaaacaccagtcggcggcggcgaaagcaagccggtcggtgaagacgtagacgcccaacaacggcggcataataggccaaccgtgcaggcggaaac

SEQ ID NO: 7611 - DNA, 51336 bp, Oryza sativa
  unsure (1)..(51336): unsure at all n locations
cagacgatgcaagtcgttctcctgcggccgcggcggagacgtgctcgccggtggctgcggggacgagccgcagcggcggtcgtgcgacgtgcgcgggaggagcacgctatgggcgctgttccaccaggacgaccgcgagcgcgtccgcgacggcacggcgttcggggcgttcccggcctcgtcctcagccgcggcagcggcgctcgcctctgaagtacaacctcagccgccgccgccgccgccgccgtgcgttcctgaggtgttcctggaggaggagatagctatggctgaggagtctgacgagattactccagtggtggagccaatcttggtggtggacacctccggggagatggaaacggaagccaatggtggacgggaggccaaggccatgaaggaccacatagatctagagtgttcgcaggccaagaagccgcagcccaaggacctgaaggaaatcgccgggagcttctggctcgccgcctcggtgttcagcaagaagtggcagaagtggagacgaaagcagaagctcaagaagcaggacgccgctggcagcaaggcagcagccgcagcaatgccgccgccggagaagccctccaagccctcgttcctccggcggagtcgcctccgtggagaagcctgctcggagttcgccggaggtcggcgttcgtgcgacactgacccaaggttctccctcgatgccggccgaatgtccgtcgacgatgtaggcttctcctgggacgagccccgcgcgtcgtgggacggctacctgttcggcgccggcaccggcattggcctcggccgcgcgcccccgccgctctcccgcctgccgcccattctctccgcgatggaggactccccagccggcatcgtcgagcgttccgacggccaaatcccggtggaggacgactcccagccggagcccgatcccgacgccgacaccccgggcggctcggtgcagacccgagactattacgacacgtcgtcgtcaagccggaggcggcggagcctggagcggaccagctcggtgcggaggccgtcattcgaagtcaccgacgcaaagccagtgctgccggcggcggccgccataacaagcgtcaaagattcgccgctaattgggagctcagagttctaccacttccagcatgccgaggacctgctcgaacaccaccggttcagcaccagctccctcatcgaagacttccccatgagcctggacgccgcgttcccgggccccgacaagaagccccggaggtggcgcaaggcgtggagcctctggggcctgatacaccgccgcgccgccggccgcaggggcggcgcgtccgacgtcgcggacagggccttctcggagccgtggccggagctgcgcgtccgcgggtgcaacgccaggatgcagcggtgcaacagcaacgccagcgcgcggagctctttcagcagcaacagcggcggcctcggcagctcgaggcgcagctacgtcgacggcaacggcaacgtcgtcaagcggcggcgggaggagtgcgccctggagcgcaaccgcagcgcgcgctactcgccggggcacgctgacaacggcatgctgcggttctacctcacgccgatgcggagcgccagcggccggcgcgccccggggctaccggccaaaggcggccggcaactgaggtcgcaatcgttcgcgcgtagcatgctccggctgtactgagttgtgtttttcgttgcagcagtagtggaggctcaatggcaatggtataaccataaatctttttttacatccttgtgtagcgcagtgttaattccgttcatttggggggttggattggatagaatggaggtttatctcataatcacctcttaatatcttgtcttgtgccgtagtatctggacaacgtactaactatcgataacgtgtagtagtagctgtagtaatgctgcaggccagaatggcagatcgaccgatgatcgggatcggaggatagaagctgcagctacagctatcctgcaaattctaaactggtgtccaagtcatggtgaagaggggtcctactagacagtgccgaattctgaattcgtttgacatggcgctgccttgccaagcggcagctgagcgctactactaggctcggccccggccgctaggctgcacctgaccgaccgatcccttcgcgaactgtagctgccgctgcctcggaaaccgttaaagtcgcgctcgtattccgctggtcccgccgtgccacacccccaagccccaagtgctgtgcgcgcgggcgcgcggcgtcggcgtcgtcgcgtcgcgtgttgcgttgcagctcgcggcgcgggtgtgtttgttctaccgttctactagcgtttggatttggtcggttggcttcacgacgctgcggggtgcgggccgtgcgccgcggcgggcgcgtgcgtgcgtgcgcacggggtttgttggggtccggcatctgtgggatctgtggggaggggagattctgatttggagggaggggaggacgtacgtggccatgaggccatgagggggggaggctcaagtaatcggcggtgtgccggatctaaggtcgatgtgtggggattatgattatcttatgcgtcgccggacatgtgcacgagaaaccacatgtttggcgaaggactcatcgaactggtactggaacacagttttttttttttttttttgagattgttaggaagggaaaccggagtttgcattgtaagcgttgaatggttgccataacttgtaccatgtcatttctttttcagtttatttacacgatccgcttggaagcaagctttctctcgccccccacaaacccttaatcaatgttataacgacgctgtcgtctctaagactctgtaacctttttttttatctatcaatgaaaagttcaggtgggaaaactctcctttccagtgttttatcaaaacaaatagtttatttacacgaaacatctatgcacacattcctcgcaaaaaaaaaaaaggatgtatacacacattcactagtatgcctgttaatacatggttaaaacgagaagatcagcaacaaatatctggcctttgtcgctgaactcttcaatatttctctaccggcgtgggagttatatttaaccaaggacctaagaggcgaaccaattagctagtgatcagctaaatggggatgcaagtgaacaatcgcactattagagtgaaaacagacaggtacaatcatattatgatattctcatatcttaacatatattttcctttaaaatcagagccagagccagatacgaatagtactagataacatatcactcatcccgtattctattcagtattatttccttcgaatcggattcaggacaattatctatttgtatctctagtttatatatatataaatataagaggcaattatagtgttagaagatatacaataaaggaaaaaaatatacaatattacatgtgagctcgtaaaatagtgattaaccaatattttatcatgtttgtaggtggatttataatagacttttatatatgttttataatataggacatacggacacggctacaagtctttcatattctaacccatatttttcatggatggatattatcgagtatctctttttctcccatatttttctcgcaagtctcggatcgggtgagtggctgagaaatacacgcctcattttcaacccaacacattatccataaaaacttgcttaataatttatttagtacaaagtttgaattttttttgactaggatgtgttatgcaaggaaaaaaaggttgcccaccctacttgcgttcttacaaccagatggttagaaagagaatgtgtcggaggtgaggtaaaaggtgtattttttgaagactttttgtcggctgctgcttataaggtaaagatatgtctgaagcgagaaaaataattttaggataagatttacatagtttttctctctcaagttttagccatccaaaagccaaagctaagtaatatttttttaaaaaaaactattatcaaattgtcgacgagtggtacttgtggaccggatgagttgggtattgaggtacgttagaacgaggatctacataatacgatatcaagcagacaaaatacaaggtttatactggtttaggccccttgtcaggtaatagccatagtccagtttatatgagattgatgatgaggaaccacagattacaaaggaagtaaacaaaacagatgataccgacaagatcgtagtcgatgaattcgacgagatctcccggcgacttggctccgcgtactctggcttcgtgaactatggtgggtgtgtatgcaatgaaattcgatgccttgcacccctccctaggggtcccttttataccacggatcatcttgacccccaattaaggcctggagatatttgatctggtacggtataacataatctctatcccttccaagtaggattttggaaatcacttatctcgtagagatatttccgtaatttgcaacagattccaacgacgtatacggaaacaatccatatacgtgaaagtataccttatcggtatattccataagtcgtaggataggaggcatgttttatccgtaaccctgacacaaattaaactacaaatttagaagttggttagttcaaaaaaaaaacatccggtctggagagggagttgtggaggagaaagagaggcgaaatgggttagagttatcaactgtggaatagaggcagcagctcatctccgtcatcagggagtccaaatctagcaaaacctggtctcgtagctaagcccgtcaccctagttgtcttccacagctcgtagccaaatctagccaaaaagaggagatgaagaggtagtatctcgaccaagcagtatcccttgagcttgcgagtcaccgagccattcttggtcgtccctcacttcgttatcatgcttcttcaacaagcacctatgcacgagggagagctggagacgaagatcattaaggatccgtcatgatttgaggttgtttggaacctctttgttgcaccaaaccacttgtcgctatcggggttatccggaggagcttgccgtgcggcagccagccaacagcagctacattgctgcaaccagccagcagaagatacatatgttgcaaccagccaagacattagcaagatacattgtttcctcgaatccgtccgctgctggcctgctgcaatctaacggttggcctgcgcagccgcaacccagggcggtaaagcagctccacctaataaccctatcgtagagtctggatttagactaaggtgtagatctggctaagtttgtgttgctcaccgttgtctagatctgagatatatatacggtggatcaactcatcaacccttaggttagtctccttccccctatctctatctcatctcgttgtcctcttctcccattttaaattcatgcctcactatttctcgtgttaccgcactatgttagttcttatattttgggataaattttaaatgatagatgtagctatatattttggtatgtagggagcatttcacgacacctaaacttttaaattaatgatatgttgttctctttacatttgactttaaaatgtaattagcggtggaaaaacttgaagctcgtgattcggatcgacttaatcttgtagtcataattagtcgaaccgaacgggcttttagctcatgagtttatcaagtcagttcgcgagctgctcatttaggttgttagcataaatatcacaatatctaattatactttgtgccgtttagccagtgcttaatctttagcgacatcaaatcaattttatgttcacatacgtataaatttaaaattatagaagtggtataaacaagatgattttttttttgccgggaacaagatgaaggttgttaactacttcctctgttccacaaaaactcaaccttctagtaaaatgaatgtagacaaagagatacccaggttcattgcactagaaggggtcacatcccctcgtaggtttagtttttttgaatggagagagtagtctactcgcgagtcgggctgaatttttaatcgttaaggtcaatgagctaagttaaacccaaatgagcctaatcttgattcgttaagggggtgtttgggtganaggtnctatnacccanacacccctaaacattcctacatggtcatcagtcatggacagttggagttggacacaaggcgattctttccgagagcgaagcgagagtccatcgacagggctataccacggcggaatgaatacgatgagacttgattgggcattcagatgtgtacgtgatggcgagtgaagtggcagcgcagcgcaggcgggccagctagcgcctctgatacccccgctgttaactctcgcattcattgctctggctgccgcagtgaaggcgaacacatacgagcgaatatatggtgatgctggcttatcgcatcgacgttcctttgcgtgactcttcgctcgttgtctcatctcatcttctcatggagagagccatctacatccattccattccatggacttctcctgttaacagttagtaggcaaccgaactgacccgactgttagtatacgtgaagtagtgagactcgcgtggcataacgtacaacatgttgggtttcggctgttctacgtgggccgtgcagtcagtcacacgtagtactactctctcggctgtggatatactccactgtggtgcggtgaacaagaacagagatccacggaacaagtgcacggtgcacggaaggcgctgtactgtacagtttgtcacctccgagttccaacccgtttccattacggcgaactgtttcggtcttttccgtccggcgagtacttggatccatggttcagacgcagtaatcaactgccagatggtagtaacagtagtactactagtagtacctgtctcagtgctggggagcgggaaaaagaacgcacagattcgtctgaaaaacatgctcgtctgaatttttactgttgcctacccaagactgaatatttgttcatctccttgcggtagaggccgtgttcgacgtcgtcggcgttgttgacgacgaccgcgccgacctctccccgattgcgtgccgtgccatggccgtcggacatgtcgggggcatgctctctgctgatctctctaccaagatcaccggccgccatgcaccgtcgcgatgaaccatgtagatcttggagcagaagagggaacattgaagcagaacaagtagcatgaactatctgcagggtcagcattggcctggttagagttgactgcggaacaatccccaggggagcacaaaatcgttctccaaggagcgttgctcccatccagcaacttgtaccggcaggtactggtaccggcaggtatagagataaattcatccatccatgttagaagggtacgatcggtaaacagagaaaggagtcgcaccctcgctttctcctttttgttctttctctgtttcctccctccgtgcggcgccgctttctcatctaatctccttttttcccctccctccgagcgcaaccccacccgtgcgaagcccgcctgagccgcgcgcatgctcgccccgcatccatgcccccgcctgtgcgctcgcttgctcgccctgcatccgccgcccgcggcggcggaaccagcgagctccttcaccagcggcttcattcacacccttactcgaattgcagtgatcagtaaaatgatattgcagagaacaagcaacgattgagctcatcaaaacatccaataaatcgtacaatacaaatcctataagtaatgaagaagaagagcatatgcagcccagaaaataaaagtatctactgctgcaaccaaccgaagctaatgatttagatcggatgaaaagaaatcaatgcatacactgcacatcgcctgctaagatgactccatgaccacctcgccgctgcagccgccacaacgccggctccgacgaccacctcgtcaccatggccggcaccatcgcgcctgtcaccacctcgcagccaaggctgcccacacaccagccgccgccgctacctcgtgaccgcggccaccaccaggccaccgccgcgcccaccaccagcagcaccaggccactgccgcgcccgccaccactgcacccaacacaacctcgccgcaacgaaccacttgccgccaccgccgccgccgccacctccgcctcaaacggatcagacgccgccgcctcaaatggatcagccgccgccacgccgcctcctcccacgaagcaagttgccgccgacgaagcaacttgccgctgccacgctgcctcctcccacaaagcaagttgccgccgccgacgaagcacgaagcaactcgccgctgcctcccctgaacactcctacgcgaaaaagacaaatttacccttccaccactcgaaattttttggtacctcctcatgggcaaatttgtacctagaggtaccacttattttccaccgtccgatttcgctgattgaatggctgggatttggtaccggacagtcccgatggtacctgctggatgggagcaaaactcttctaagtggttttcttgctttgtctgaaaatgctctctctttcgtgccaaaaatgtagtattgacgtaaaaatgacaagtcagattgatcatagcatagttgagttagccatggaaaactgttcttcaggccatgctgccatgttagaacacctgtaaggattttcttcgaagctacgtaaggctgatcccatgtatgagtgatcgcagtgagacagttcttcaaatcatttcagacttcacgttttcatcacagcgagagtgccagtgacttggggtttttgttcatgccttcacagaatcacatttcctccggtgtaacgcaacgtcgcaacgagtgcttcgccttggttggtgtagttgcggacgagtaaagacggaatgcattttaaaatagacatactctaacgattatggataacagtatgtctgataaatgtacaacaattaatagtatgcccttaacaggtgtcaaatactaaaaatttagtactactagagtattaaattttggtaggagacgtaaatgaatacaggtgttcagaccccttacacctgttctgaagtgaatcgtgagaaaattcatcattccaaaccgggtcgtcaactatttcgatgagagaattgatcagcatatgtgagcgctagagcttgttaccttgagtgggctttcaacaagatatatatatagaaaaaataacaatcgcggtcgttcgagttacccccctcaactctaataccagttatttttaactctaaactttataaaccggatgaattaccccctatgtcgatccagggcagttttgatcctacgtggatgcatacatggcactccagtcagcaaaacaaataaaaaagatatgggacccgcttgtcagccaaaaacaaataaaacatggtgggacccacctctctctttcccctttcccttcctctcaatctctctctctctctctcagatgtcaccgggagcggcgactaggtggccggcgatgggcgaggcgggcggcaggcatggcggagagcgggcgacgggcgcggcgggggcgggtgtggcaagagcgcggcgtcgcggcgaagggagtcgcactcgaggcggagggcgtcctggcgggagcggagggcggtgtcggtggccgcgtccatgacggcgacgcacgagatggagctgcacaggagggccgcggccgccgctcatccctttcccctctccttctcttccgattccctatcctttccagtgcagcgacggtggtcgggctgagaaggcggcgacggcggtctgggcaaagaaggcggcggcgtcggcggtggttcgggcagctgcatgtacatgaggcaggcaggcaggtagcaagtaaggtgttgatgagagagaagaagaagagcatatcatgcaactaggagtaggtaggacgggcagccggctgctcctcgtctttgtagtagttgcaggtgatgaagacgccgccgttgaagcactcggcgagggcgcagccgatcctggtgaagttgagcctaactatgaagacgaagtggccgcacttgtggaagtcgacgccggcggtgcagttgccggtgtccctgtcgtacaagtgctcctcgtacaagtgccgcttaggcaatctctgcctccgccgccggactcccaggcaactgaggcaagctccgcctccgccgctggccacgcgggcgatctccgcctccgcagccggacttccggacgagctccgcctctgccgccggtcgtccgagagtgtgtgcctcctccgttaccagccgtccgagcgcgtgtgcgagacagagagagagaggattgggttgatgaagggttatgacaggtaggccccaacggttactttttttctgactggattgccacgttgacgcaacgtgtacaagttgaagtcaaaaccggtcaaaaacagtgtgaggggggttatatgtctggtatgaatagttgagggtgtaatatgtctggttttatggtttaagggggggggggtaattcatactgtcgcaattgttcagggggtaactcttactttttccatatatatatgaaaaactcctctctgggctcttcaagcaaaaatggcccaatgggcaatgcccaatatggtgttttcttgtgttgtaatatggacttggctatggcaagtctgaccagtttgccattggtactctctctaaaaaaaaaaaaaacttggccattggcatattaaaaccttatcttgtgttgtacacttgtactatgattcagtgaagaatactagcacagtagcaccactatctttctcaaacctccgacgaatgcattcgaaaatttttgcaatggactattccttccgttctgaaataaatcaatttagagttggatgggatactatctaactttatattttaattctagattgatttattttagaacgaatggtgtataatgcgatgctctgggttatggtacctttattgcgtcgttaactcgttatcttgaattatccatcacatctgcgtcggctggtgacgtgcttttaatcatgcaaatactaaattatccatgatcatgtacgaaccacaggaaaaagaaatagctctctctatctacaaatataagcactcttgtctcaactaatatggtctagtggcatatctagtggatgtgcgtaatccaactaacatagaaatacttaaaacaacctaagtacataattgatcatgagcttctttcctttttcgcatacttctcttctcaggttttttttcttttttctttacatgcatgggtcttgggctaggtttttttcttccaccgcctaactagccactcagacacgctttgcgcgactataagcactgacataacctgtttgtattattagcgggccatcgagaagagcttgtggttctcttcacaagtggtttcaatagatgggaattagaccagaccttgccgatgtgcgctctagaaaggatgtattgttgtcccacgccagctcatcatatgtggggcagctatgacacaaaatccccaaataaaatcaagtactacctccgtcccaaaataagtatagccgtaaatatctgtgcacaacgtttgaccgtctgtcttatataaaaaatttataaaaaatttaaaaatatttagtcacacataaattactatttatgttttatcatctcatagcaataaaaatactaatcataaaaaattttcaaataagacgaacggtcaaactttgaacgtgaatagtgcaaaactgcacttattttgggacggagggagtagtagtatggctgtgtttagttccaccggtaaaaaaaattgccaggtcacatcagatatacggatacacatttaaagtattaaacgtagactaataacaaaacaaattatataatccgcatgtaaactgcgagacaaatttattaaccctaattaatctgtcattagtaaatgtttactatagcactacattttttagatcatggcgcattaaggcttaaatgattcgtctcgcaatttacactcaaactgtgtaattatttttttttaatatttaatactccgttatatatgttcaaacgttcgatgttgcacaatatgctctgagcacatgctatggcctgtcgctagatagtacagtagtttattggaaatagcacaagttcagaaaaagattatagaccggaagcctgctagagacctctagaggaaaaaaaatcagatggtacggttttgtttgatgacatggcgtaatacgtagtaatttataggtaaattttgctatcggacatcgtaattgtgtggttttagctcagggtctctgaaagtaaagttttgggggaagacatcccataaccgtggacatttgcctatggacaccgtgccatctgtcgtgctgacgtggcggacgggaggcccttttttaatgtggtcggacgtaaatacccctgcgcaagagataataaggttatgtggggcccacttgatagtgtccccctcctcttctttttcttctctctcggcttcttctcctctcgatctctccctctcgtttccctttttccccacgcgcgtgcgcgcctgagcgggatggcaggcgcgcgagccaagagaccggccgtagcggcgcgggccgaggcgacggcggcggcctgacggcgtcgggtggatggggaggcagcgtggcggacggcgacagcatcgggtgacgccggtggcgaacaagccgccgagcaaggccatgggcgacgccgccgtgacgaaggcggacacaggcggcacgtcgcggagtgtgcgccagtcggcactgttgcacttgaagcctgagccgaagccgatctgccagacacggtggccgcgatggacgcgccccttggcctcggcgtaggcaagctcataccagagcgagccgctgctggtgttaattgcatattaggctcaacatcccatgttaattgcacatgcggcataggcacattaggctctctctttgatttcctgcatcaatcaagctaggcttggttaattaatcaactcgcagattattgtatatcactcatcattgtttgtactagatcaaacacttttgtgcgtgcggttacctcgatggcgggagcaagagcaatggcaggcggcggcggcggcgcgagccagatgcagccgccgtcttcgctccaccactcggctaccgcccgaggcagcagctccacttccgccgacaggcgtcgtgcgggccggcttggccgcgcgcggggtcggcgctcgcagcgtggtggtggccccgagcaagacgaagatggcggcggtccgggtggcgattcgtccgggcggagatggaggtcggaggtgctgacaatcgtggtggcgaagcagcagtggcgcgcgggtggtgctcgcgcgggagatgtggccgcgcgtggcggcagcggccaagcgtggcgacggcttggcgcggcggcggagaggtgaaagaggtagttggcggcggtggggagtggcctgacgagaggacttttttttttctgacgtggcataagggtatttacatccgaccacgtcaaaaactggacttccgtccgccacgtcagcacaacaagtatcctttagacgatacagtgtccatcagcaaatatccacgattatgggatgtcttccctcaaaacttcactttcacggtgtccctgagcttaaaccacaaaattgtgatgttctgtagcaaaatttgcctaatttataagaaagctcgctgttttcactattttagatatgctactaatatggtcttccatacactcctttgaccatgactaaatgtaaaattgaattatttcaaataaaataatatcagcatattatgatagtttgtttaacgataaatctatcaacatcatttctatgtcattggttgttatgattttttttctttcaataggtaaagttaaaaatatttgtattattattattctaaaagtgcttatatttatacatagagagagtatctaaaacaatataaacaatataggagtatatgacaaaccccgaggttacgaaatacgaacatacttgaaagtcatgccctaatcgttgaacttctttttgcattataatataaaacgtgatcttacctgagcgtgaaatttgccatgtaatcccaatatccttatgaaatagattcatgtgagacgtgtacagactccacagaattagagtagtacgccagaaacagaaaatgccaaaaagaacaaacgctttagaccggcatcggaggtagcaagatctgtttgcaactttgcactgcgacatgatcgcggtggcagaccaacaagatgccaatctatattctctccgtccttataatcgttgatttttgtttctataacgtttaatcatcatatatcatatttaaaaatgtagtataaagtatgacttaagataatagtttcttcaataataaatcaagtcacaacataataaataatatttatgtaacttttaataaaacgaagggtaaaatcgacaccatcatacgtttatagagggaatatttatctttttatatattttcttagtctcataaaaaaaaagtaaattccggctatgaatttagacataggttacatctaaatttatggctagatgttgattttttataacacggggaagtacatgtcttgtcttggttatatctaaaaatttatggctagatattgattttttatgagacagaggaagtaactgtctttgtctttggttacatctaaaaatttatggctggatattgatttttctatgagacgaaggaagtaccctgtcttgtctaaaggcaatttgactgtgttcggatgtccctttttccaaccctccctcccttatttttcgtgcgcacgcttttcaaactactaaacggtgtattttttaaaaaagtttatatacgaaagttgctttaaaaaaataaattaattcattttttaaaaaaagtagctaatacttaattaatcacgtattaattaatgaatcgcgctattttccgtatgtaccgtagccggttggaaaccagcgtctgcgaacacaccctgaatgaaggaggactgggcggcggtcacaactccagagtccacaccaagcagccccccggcgcgctgctggtcgcacacgacaagggtgcgcgcgcgtgtatcaccggctgcactcggccagtccgccacctcctcctgacctccccactcagaaacgtaggtaagactaacaaagaccagtccaccacctggccggtcttacattctcagtttctcaccacggtcacgccgaacgaacgagacggcggtctcgctcgctcgctcgctcttcgttcggcctcggccgcgcgaggtaggtggcgcgactcggcgcggctcggctaccgatcgcgcgtccccgcaatccttgaccctttccaaatcccaccaacacgagccctcgttttaaatctactcgtgctacgcttacttgcttacacttgacgaaccaacctcactttctccccgtagctggctgggctgtggctcgctgctctctcatccgccacctaccgccaccaccttccccccacggtccagctcctcaccgtcgtcgttcgtcctcgccgagtcctaatttataccaacccatccaccgggcgatcacacgcacgcacgcacatggtcgattggttagctctctttcccattgccatgggccgccgcctctgatccccctcgcctctcgctaccgagttgctggccattggttggttggtggatcgggtttgtctcgccggggcgcggggggggggggggggggggggcccatggcgtcaatcaggtcgtgcgtgtcggtgaagccggcggcggcggtgagcccggtcaagtacaaatccgcgagggtcggggcggccgggttggacccgaaaggcctgaggatatcttgctcttcgtcttcctcgtccttggccgcaggtggtggtgatgggtgcagggatgccgggtgcgccagtagcagcggcaggggcagcggtgtcgttggttcggttggcgatggttggtgggggaggaggggcgggcagcgggagcgggccgtcgccgccatgtgcagcgccggcatggagggggtccggcacggcgccgccgccgtggccagcgtgccggcggcgtcggcgtcggcgttgccggagcgggccaaggtggtggcgctggtggcggccgtgatgctgctctgcaacgccgaccgggtcgtcatgtccgtcgccgtcgtcccgttcgccgcgcagtacggctggtccagctccttcttgggcatcgtccaggtactcggttcggggtcttctttaccttcccagttcatgccatctctttcacttcacttcactattagtagcacatcgcacaggttccaattcatcgaaccttaggcaagaatctctgctctgtcactagcaacaaaatgtccaaaaccataattagttcatcatatagcaacaaagtcaacgaagcatcaacgtcacaatcgcgacaagagaatgaccggaacattacaattagtagcacaaacagacaattatggcagtccagggtattagctcctttctgtgtgcaggtccagtgcaaccgtgtagcaaccaagttatcttaatacgattgttttgagagtggaacctgaaatgaaatttgctatgtgcttcacacatgaatcgtgatgcagttttctatttataagatatatgcttagctttagtggcttccacatagatagtgtagggtaccaatttggaagaaaccaatctgtgcaggcataaaggtcagggagcaacttgaggtggtatcgaataccaatatctcctcatagtggcaatattggaatttgataactggaatactaaaacatgcaacccaactgagttaagcattgcccctcttttttggtgatggagttcagcacttcagatttacttggtgacagaacatgaatgtttcataacaaattaccagctagcttaaataccattgcaacatttgaagtcattcgataacaaaaaattgtttccctcaaataaagaacggcaaaagaatttgtgcatgcttattgtatatacacttgggcaacaatatgtcttgactagatggaggttcacataaagaagtcatcgtaaaaaccaatatgccgtaacactaccggttctatatgaaattgtcaatgtgcataactaactaggccagaacaaacacagcttgctcttttattattatgtcatgcgtgattaatgatttccagatggattgacttgaggttaatcttctcatcacctgtacagtcatcttttctttggggatatgttttctcatccatggttgggggagctttggcagaccgatatggagggaagaaggtgatggcaggtgctgctgccctctggtccttggccactttcctcactccatgggctgcttctcaatccacaattatgttgcttgccatacgtgctctctttggccttgcggaaggtgttgcatttccaacaatgagcactttcttaccaaagtaagttgctctatattattttctgtgatgccaattctagttgttagagattagagattctggacaagaatttattgatgcaatcaaacacaatctcatttcgggctttcaatctcactttgaacacaaaacaggtggttcccaacacatgaacgtgctactgctgttggcatttctatgggaggattccatcttggaaatgtcataagtttcttagcaacaccgatcatcatgtcacatataggcctcgccgggacatttgccttctttgcatcacttggttacttgtggctttctgtatggttgttcaatgttgaaagtgaccctcttgacagtcgtacaataagcaaatctgagctgcaattaatcctagccggaagaagtgcatcaaaaattcagggtagcaaattcccatccttacgagaaattctgtcgaagatcgaaatgtgggccatcattgtagctaatgtggtcaacaactgggtaagattgataaatcagttatctacaaattggtgttgacatatctatctaaattttaacttccgtgagttcgaaatactatgcagggctattttgtactactatcatggatgcctgtctactttaaaacggtatgttgtctaaggtgttcaaattggtcactgtgacaacgctgctattaagctaattcctgactgctatcctacaacaggtttataatgtcaacttaaaacaagcagcatggttcagtgccataccttgggcagtcatggctctgtctggttacgtcgcaggagcttctgcagatttcctgatcaaatctggtttctctgttgcattagttcggaagattatgcaggtaacagcaacacctgaaattagacttgtgcagcacttggaagttactgatagcttagcacagccagaaacataaaacttaccacaattttgttctctattcatgcttggtacagtccatcggttttatcgggccaggcgtttcactgctttgcttaagatttgcccagacgccatcagttgcagcagtcctcatgaccatcgccctgagcttgagttccttcagtcaagctggatacttctgtaatgtacaggtagtgtttcctgcattaccctgctcataccagattccgccttaactcgaacaacctttttttttcttcttgttcaccacctcaattgcaattgtaccctatctgacggaatgtgttcttcttgattgttcgagcaggacattgctcccaaatacgctggatctctgcacggtgagtccacaaactcgatcagctgtacacaagacccacaccaaatgaacgcactccttggatcctgaaatctgacatatcttcttctgcttgaacaggactgacgaacggcatcgggacagtggccgccatagttagcaccataggaacaggctacttcgtgcagtggctaggatccttccaggccttcctcaccctcacggcggtgctttacttcagcgccaccgtcttctacaacacctacgccacaggcgacctaatttttgactgagatgatgacattacccctcgtgtaaaatctcgaagtgtagtacttccaccattgtttctctcctagtcctatggctgagccaggaaaccaataaacagatgttgattgaaattgattgattgactgccatttttggtgtaaaattgagtgcaaccgcggttacttttgaggaagcaaatcgttaatacaggaaaaaggggtggagccgctcatacgcggttcaggtgttcgacgaaattaccgagccacgcgcgcggaaggaagcgccggggaggggcatggagcggcggtacccccatggcgcgcgcgcgcgcgcgggggggatgctggctcgccgccggtggcgccgcgatggaagacccgaagaggcgagcagccgactgcgcggcgtcggcggcgtcgcgcaaatccatggctgcgaatgcaacttttcggccgtggatgtggtatgtgtggtggggggcgcgtgcgtccgttgctctcgggtgagaaacgtgggccggtggattgagtgggattcttcgctttgggctatgtaggccaatccttcgtccggcccagctaaaatttggcctgtacacgtttggctattcaccggatcatcccatatcctcttggtatttcctagctcgaaatcagaatgaccataagctgacagaactttttatctggcaatgacccattttccatagacacacggaaaatatccttacagcaaagagaaaaaactgacagaactggtactctatccacttacacggttacaccaatcattcatgatactgagttttgagtatgaacagtgaagttgcatacgacaagttcacataaaacacgatgaagagcaggacagattcatgccttataaaccttgcagttgcagcgctttcatttctctacctttctctgagttcctccgatatacagaagtggctgctctatgtgctctttattctcttcagatgatttataaaaagattcatacagcagaagggaacccggtcaggactcaggagtcactcctgctaggcttgtttgaaactggaataacctggaaaaggaacacagtagattagtaagtcaccagatgaccatatgcaactcggtattggctagtccacatacatttttactgccataccgtctctgaggatggtatccaatcatttgttgcagggttgctcatgcagcggataatgctgtcagatgagtaggcaacggttgtcacgttgaaggagctaccattgggtctttccactttgataaaccctgtaccagtctgtaaagataacaattaactcaaccatttcatagagtattgtcgttttgttacagaatgcgcatggtggtgaaattagaatcgataatctgttgttcatggaaatgtattctatataaggtacacatgtttttttttttttgcgaggatataaggtacacatgttagtgcccctgatctgaatgatatgagccatcacatgtgacacaagaactccacatcagaactttggaattcctaacaatcatcaaccattagttctctttgcagggcctaaactatatttatgttttccatgccagtaccggagtgagcaatgaactgctagctagatacaagaggcttcggaaatgcacaagatattactggcaagtggcaacaaaatgcacggcaatgagtttaggtatgtaatggttagcatgtaagttgttttgagaggggaagactacactatacttaattttcatgacagactaaagactccagatttgtgtatgcattcgactagacagcagagtctattaagagaaatgcttgtgcaagaaggccagtgttccggaatcgcactgggaaccagaatcgacagatatacagcttatttgagcactttggttgcaatgacggttcgttgcaggcttgcagccagttataacattatttgatagtatttcaagggaaatgctatggtgctcaagtcttttttaaggttctcgtgcaaacaaactttcttctctaacgaatttatgactaacatgcgtcttctcggaaaattctagccattcaattgaagactaggtaacatgttatttatcgacaggtatttgatctcataaaacaaaaaggtcctgaaaaatattactaacaaattctttactggtatatcaaatttctctaaagaactagtatatgcccacatacccacatctacgtgctataaatttggtgcttggtaggcttcataggcagttaggcacaacaatactacaaagcttaccgtgtggtgttgcttgtcgatgcaattgagcccgttgtagtattgcgtctccacatactcctccccgttcacatccccaccgtccagcaccaacttctacagcaacagtcagtaccaattagtaccaaacagcacgctcacatcgatcgattcagcagcaacaaattaacaaaaccagaattccacaaggacgaacagatcgccaacctggggtttggcctcgaggtcgcggagcctccgaagctccggcaggtcggcgtcggcgtcggcctccgccccaccctccccggcgtccgacgggtcgctccgcggcggcttggaagggcgcctgggggccatgctgtcgaagtagccccgcacctcggcctccacccgcgccgcctcctccggcggcaggtgcgggtcgctgcgcgccggccgcgtcgtcgccatggcggctcagctcggtccaagactgggttggcgggcggtggagtcgccggtttccggggggcggttttgcgagcgcgaggatgtccggctgacaggtggggccctggtacgtgggcaaggtggcgatgccgtgaatgtggatgagatgagatggggacgtttgatcgcgattagctggggttgggccgggcgaggtggcccactgttccgtgagccgtgtgaccgcgacgcggcgtgatggattttgcgagacggcgaagtcgagaacagtaacaatcttcatgtgcccgtgcaaatctcgcgtgctagcgacttcccaattgtaggatgtgatgtgtttctatcattgttcaaagtacaagaaattttcctttattttccaagttctctgtttttcactggcattcatgtattcctttttgttcttttatttctgaaatcttacttgacaacatgatatacctttctaaattttagtttggtttacgtcccaaaggatttccaaccgaccaaacgaataccttcgcatgatatcgtgaaagggaaaagtccacttttaactctctcaaataaagatcgaatctaattcatgtatcatcaattgtaaaatcgagtgtaacagctatttcaactattaaaaccagtagaaaattactcctacgacaatattgagaataatattggttgacatggcatattgaccacagtcaaaaacaccgagtcaacaagaaaattgagaatactatatggagcccacatgtcatcctcactattctcctctgtcttcctccttcctctctcccccatctctctcttctccttttacgaaggtagttgttgatggcaaagaggtggatggggaatcggtgatggcccagtcccgcctaatgcgcccacaccactttggcatgtcgtcatctctactacgatagctggactccacaaaagcagcggtaactaacgaacctgtgataaattttgtggtcagtcacgcatccagagcttggcaagcccatgcaacatctttctgatataagtgtgcaggatggaggggcccaccgtatcccatatctaggaggggccggcgatgggggccgaggctgattgacctcccttcacgtcggtttccactgcagtcactagcctgtagcccagcagcctcctctcagaagccgcccacatctctttcttcctcctcttcctctctctgctatggtaagtgataaggcccatgagtcggagatggatcgagcaagggagggacccgaggctagtggttgcaacagggccggtattgtcgaaggggaggtaaagcggtggggcagcgcaaagaggaagatgcttttctgcgagcttgattgcaaaatccattggagaagggatgggcccccgcgagcatgagactgcatcatcgtcgcatagggtggcagccagcaggtcacggctgtagccacagatgatactaccaatgctggaggagaaggcagcatagaggctcatggggagagagcgatggcggcgacggaaccccgacgtggtcggaaggctatgctaggggccgctccccttccttctaccatgccttctccttcgctcctggcccgccaaagccgtcaaccaccattccccaatcgagctcgtcggcgtcatcgctatgtgcccatgtggggaaaggaaaagaggacaaaggaacataaaaggatgagaggagaagaaagagccggtgacactaacatgtgggcctcacatgctgactcaatcaattagacctagtcaataagtcacgtcaatgaaaaccactcttcaaactgctgagggagtcaaaccacaacggtttcgatagtttgtcaaaccactcttcaaaccgcaagatatacgatattgtgtttaggggcacgaattagattggaggtatactcgagggagctaaaatagacttttccatcatgaaaagccaggctaagaaatttgttaggtttccatcatgcgttagtttccagatccaaaataaagccgggcccaaaatatattcctcgatgcaatttgtcatggatcgcgattactgctagcgatatgggcctaccttgatcaagccaccaccgcgtgggttttagccgtcggagctgcgccgccgaatcccgccacacagcccatcatccatcagccccctgatgacgcagcgccgcccctcctgcggccgggcttccgcctccggcgagggccacgtgatgcgcgccttcgtccgtacgccctcgccgtcctcacatcgcatcgtcaaaagcttccgcaacatttcttaggctgtgtttagttcatgtcaaaattagaagtttggttgaaattggaacgatgtgacggaaaagttggaagtttgtgtgtagaaaagttttgatgtgatagaaaagttggaagtttgaagaaaaactttggatctaaacacggccctaattccattccttccaaatttacaagtaaggccgttcacaatgcaaggagctggcattcagcctgagtcctccacgtccgccagcacttaagattccatgccacatttcttgatggcccaccgaaatgaagagaacctgtgaacctgtgaccaaaacctgccactcggtctttgatgatatcaaggcaattgcagtgcgtggggctttgcctcgcctttgctctgcatggatttcgctatgtgactcttgtgtcttttgaaggtcttcatcctacttgtcagttcaggacgagcaaaatgcaaaacgcattgctattgcccttaacaagctacaaattggtagagggggacggtcttagtccttatagattacatcaattggtgtgtaaactacaaagtacaatcttttaatgtgtattcccatcataatctctgcttgtgatttttagaatcgctgtcagcgacacgctcaatacacaccgaaggctttagctgaagatgacacttcacctgtgcgatctacatcttacgtgatgtggcacggaggaacatagctgccgccacaagtgttcagacatcacagaacgctttttctggagtaaatgagaattatacttctactactaggtgtcagtcgctcagaattcagaaacatatcaagaatcaaagatgctgttaggtgcccggtggaacggacgcaggtatgcgtcatttctataagacatgatccctccatcccaactgcacagatcagacaagttgattggtaaatacatatagtgagaactgaacgctgaaagagagttgtaaaattacaccacattggaaaatacaagttgattggtggtgtaattttttttcgttttttcctagctacgacccttcagagttgtaatcttatgattttttttgttttatccatagaacttcgcaccgtttcgtgcgagtcgttcgaaaaaaaagctgaaagagagttgtaaagctccagccagcagggccaagtgttcatatgttccatgtttctgtaagtagccagcctaagattttctcaggtgatctcaccgagcttgaaaattctgcagatggtgatttctgcagccatgaatgattcttaagccttttgcacatcatctttccctctccctgctacgtgctggtttggaaacctttgcgacctcatataacaaagagcagccacaagctttggagaaacctttatgagacctttcagctcaacaatccatattgatctcacagcgtgcagtttcggggtgcggaaaagcgacaggtatagcatccctgattggtgtgtagtgggatgaatcacgctaaaatcagttcattcctcctaccgataatgggcgacgcactgatgaggtgcagaataatacaagattgggcgtcggagatagcctataaaccactctatggatttgacacgcaggcatgtgtgcacatgatccgttggggctaagatcaaggaacacatcaagaagcaagctctttgaccggtgatgtatttcttatacgggagttaagctagtatcactctctaagtatgaatcactgtactgtattaataattcactggcgtatagtagtgctttagatagttagatgatgatctgacaggcaatttgcttgtccatgggcatgagttgggctgagctaagtgtgatgtgagcaaatgtcaacatctgacgatggccgatctcatcttcattcatactctttaatttagtcatgcaaaactgataaaaagagagacaaatcgttcctcgtcactcacttattggaattgatcaagagcaccgttgacaccaaactagtccacaaatttgtatgctcttttttttttccttcatgctgtggcctcaaaagtcatctttttttttttccttttcgtggtcgcgcgcgagttatgattgcattttattcagaaggggtcctaatgagtctggacgtaagagggcggttgcagaggccacttgttgttttgtgtaataaaatttgtgattaggacgtgggggagtttggattagaaacatgtactccctccctgccccatattatatactccctcagtcccaaaataaatccaatcctaaagattcgtatttagaattaaatttattttgagacgggagagtataagttattttggtttataagttaactttgtttaagtttgattaaatttataaaaaatgtgataacgtctacaatataaaatagatatagtactccatttgttacaaattacttgtcgttctaggtttgttctaaattaaatattttaatctttgaccatcaatcttcataagctcatatagtttaattttataagaattacatttttttattatatacttcacatgttattaaactacatagatttctaaaaagtaataatcaaagaaaaatatgtttgacttaagatatacacggaacaataagtaatttgaaaacaatgctgtggagattatgggtaccccatacccacacggcatggttatccgactagttataggggataacttatatatatgtaatatgtaacagatcatgacttgggtgttacgtttccttgtatattacggaacggcctaaagtcctgatctaggaaaccgataccgtattggttaaggtttctatcttgtaatcctgccccccatcctatataaggtgggcaggaggccctctagggggcatatatgagacaacctgatcgtcagatcaatacacactcggcggattcaaatccctaaacaggagtagggtattacctctcattgagagggcctgaacctgtctaaatcctttgtctccacatccatccacttttaggtctcgtgcgctaccccgtttcattattgccgaattcatgtttcgacagttggcgcgccaggtaggggttgcgtcgagttttctatcgacgagtgcgatggaatcaactccacgagtcgccggtattatcttcgcttctgtatcgtgagatccgccgccgtcgacaccacccgccgatcaaatcaatctacagagagattcaatctactatggctgccaccagcttcacttctgtcttccccaggatctttctggacttcatcgctgccgccgaaaatccgaccagccccaattagtcggctaagagatcatacgtggcatagcaatcaacagcgagatacaagactggacagctatggagttttttcttttctcaagatcagccgtggagatacatgcatgaatatgattgaacagcatacaccggagagccacacatgttttgatcggtcttatatcaatctaaccgtacatgtttcctgctttatcgctttggttcttgccacatacaagaccatgtcgatctcgtttggtcgccgttgtattcatcagtttcgtcaaaaaggttgccgtactgccgcagtcatcatctgtatcaatctactcagcgatgcagatcggttcccagctgccaacgcctcttgccgactgatatcaaattatctggcaagattgaattactagttcaaagcggaatcgacatggacacagagacagcgtcattagcaactacacgtggcatagcaatcaaccaggaagtaatgatctacacatgtgtgctcctgatcgtgcatgaattgggccaccgctgcgcactccaaaaccggccgtgggacaacatacgtgcatcaagataaactactatcaggtttatcgttttaaattttcttatgtgaaatagattaattaacagatcactaattattatttgatctattgttttaacgcacgtaccgccggccgccctcgtcgctgccgattggattacacgcctccacggttggtgtgcaccgtcgccgttgctgatggcgacatcctcttcaccgccggcctgcctccgtcgccgccgagtggtgcctccgcctacacggctggtctattatgccgccgctgttgggcgtctacgacttcaccgccggcctgcctccgtcgccgccgattggtgcctctgcctacacggctggtctattatgccgccgctgttgggcgtccacgacttcaccgccggcctgcctccgtcgccgccgagtggtgcctccgcctacacggctggcctattatgccgccgctgttgggcgtccacgacttcaccgccggcctgcctccgtcgccgccgagtggtgcctccgcctacacggctggtctattatgccgccgctgttgggcgtctacgacttcaccgccggcctgcctccgtcgccgccgagtggtgtcttcattgttattgatggacgactttgttcccacattggccacttctgccatcaccaaggggaatattacaaagctaagtcatcatttattttattctttatatgatatttttccttttcctctgcctcactacaccaattggtcctccattgagtagtgagtcgggggctacagatattatatcatattttttataatatttatcttgattgcttgcgacatattctgagtacaaaagtgcctatcgagttatggagttccatcttcctatgctttccgtttggtttgccaatggatagttgcctttaggccgattcctagcacccgggggctcgttggatggaccgagtaacgcaaggtgctaagtattattcggaataaatcaaaagcatagagataagataatttattttctgctcttaataattgcaaaagtacccgagtagtaaactccgatccgtgaaactttgttccattaatgacgaactcatgtcactcatatgcatgtttgggaagtgcttaggccgactcccagtgcttggtggctatgactagtcgggcagagcgtttaaacgtaataagtcatctgctcggggaaatcaaacttgacaagaggagaaatacatatttataaatattttaaaatacttgattttttctcgagtattatatttatatcagatactactcatcctatatgtttgttctgcaggatccagatccagatatgcataaaagggattcatggctttaagcttatctcttacgctctaggaatggatcagtcagaacatcaccaccggctcgcctcgaccgccgccgactggtgtttccgcctgcacggctggcctattatgccgccgttgttgggcatctacgtcttcaccgaccggcttgccttcgccaccgccgactggtgtttccgcctgcacggctggcctttatgccgccgttgttgggcgtctacgtcttcaccgaccggcttgccttcgccgccgccgactggtgtttccgcctgcacggctggcctttatgccgctgttgttgggcgtccacgtcttcaccgaccggcttgccttcgccgccgccaactggtgtttccgcctgcacggctggcctattatgccgccgttgttgggcgtctacgtcttcaccgaccggcttgccttcgccgccgccgactggtgtttccgcctgcacggctggcctattatgccgccgttgttgggcgtctacgtcttcaccgaccggccgcctcgtccgccgccgactggtgtttccgcctgcacggctggcctattatgccgccgttgttgggcgtctacgtcttcaccgaccggccgccgcatccgccgctgactggtgtcccgcctgcacggctggcctgttataacgccgactgatgctatcttcttcacggctggctacatcgcagtcactactaataggcatcagtatcttcaacacaagctgcctacgtttgccatggctgccgactggtttcttcacttccatggctgcatgattctgccagtgttgattggccttaccatcttcatcgccggtcgtctcgtctgctgctgactagtgccctcgcctctacatctggtttatacagctaccactactgatggacatcatcatcttccgtcgccgactgattatgccgccgccgactgagcgacttcatctttattatcttcggcactggcaaactctattgctgctacttcgcaagttttgctacttcaccaaccacgacgtatttgtgagcctcgacatctcggcatgcgatgccatgttattttactacaacaagaggctctccaatattcatgatttctacttggacatcttcaacacatatcttcaatcaagcaataactattcgacgacaagaggctacagttttcgactctatgttcagttgtttcccaactaatcaaagagtcgggggctacacaaatacaaggctcaaaatttgacaaattttatgtcaagctgaagaaatcaattcatcaacccacgagtcaactccaggagtcattatcttcatctttgcttcggagcaaacattctacttcaacggttgacctactatgcaaatgctgatgagcgtctttgtcattatcattggttgctacattgctattggctggatcaccgacatcgtcatcttcatcatgtcggttgcgtttgtcgtcgtcaactacacaactttatcgctgagcgccttcatattcattgctggctgacctgactgccgccgactggtttcttcgcctccatggctatgcgacttcagtacttttgattggtatcactatcttcactaccaccaatatttttgccacctctggtgggcaatattctctctatattggttgtcttgtctctatgccaactgcgtcagctaccatcaatgaacaattgtgactacgtgctcaggggcttactagctcaaatacaagtattatatcttcaatttggacttgctccggatacatgcaacatgaattcatgatcatgggtctattttctatgctcaaagactggactatttattattccccgtaagggttatcaaccgaatacttgcgccagtcgggattcaatttttatatctattttggagtatcccataagggataatcactcagatcagaagctattcatatgagctacgcttggtctatattacccggaagatttattactcgggagcatgttacatgtgtcatcctttaaagggtgtcgagggcatattttttggcctaggcctaatatgtctgcagcccatattttcaggtgtggcctgtcacgttcttttagggacttaggcactttttgcttaggccaaagtgcgcgtgatcaagtgcccaataccttaaaatccttttataccgcagttacttaactttttaggagttggtacaatgcatcttaaaaggtgtcaaacagtaaagctttatatagctgtcccgctgacttttttatatataagtcaaggtgctgtttgggtttttaagcaattgattggatacaatatcatcgcttttcgccacgtaagtgtgcatttttattgaccaatattatgacttaggctaattatatattgtggccattttctaggcggttggtaaatcctttatgagtttatttactcggattttacaccacatatgccatatatttccaggtgtggtgaaaccatgtgtcttctagggacttaagcacatctgttaaagcagtgtgcgcatggcgtatgcccaatactttgaaaatttctttattcacaatatacaagcttctttatagctattttgctatatcactcatcatattttacaaagcagttggtatatcactcggatcatgttatttggaggattcacaccgcatatgctatatattgatatcaagtcacttggttgagtacgattatcaaaaccactcggttggttggattatttattccttgactatatgcttggtttgttcaattaaccacattgtcgggggctacacctattaggtgcatctagtcggtgcacctgactttattttccagccctccacagtcttcagatttggtaaaagtactcgggagaccatgacaaagatgattgaagcactcggctttggagtaatctggttcgagagaagattatcttttcgactgcgaaggtctcaggggctactgtggagattatgggtaccccatacccacacggcatggttatccgactagttataggggataacttatatatatgtaatatgtaacagatcatgacttgggtgttacgtttccttgtatattacggaacggcctaaagtcctgatctaggaaaccgataccgtattggttaaggtttctatcttgtaatcctgccccccatcctatataaggtgggcaggaggccctctagggggcatatataagacaacctgatcgtcagatcaatacacactcggcggattcaaatccccaaacaggagtagggtattacctctcattgagagggcctgaacctgtctaaatcctttgtctccacatccatccacttttaggtctcgtgcgctaccccgtttcattattgccgaattcatgtttcgacaaatgcctaaatatatttaatgttggatttaataaaactaatttggtattgtaaatacattttttataaacttggttaaatttgataaggttaggagcctcttctacagtaattttcttttaagaaaatttaaaagtttgattcaggacaaattaaaatgacttataatatatgaagcggactgggtagcatttcttaattttatctctagaacggaactaacttttcactaatctgccagtatacctctcaacagacttatttttccactccactgtagcacaaagctggtacgggcaaaccgatataaaattaacctgcaagcaagatggcgtgaaacatattctggaaaggaaaaagtagagagcgagtattagtattttgttgcggagaaagacgacaagaacaacacgataatcttgtctgagatagccgccacagcttagtggtgcattgcacactaggctctaggtgattaagtggtgtccttttgctttctgatgttgggtgagtgtgtgtgtgtatggagggggggagccggatcgagctgcgttgtgtgctccattatcccggcgcatgcgaccatccataccctgaaaccgacctgtggcccgacggagagtgacccatacttgaccatgcccgacccactatctatttctttctctgtgtggatgttcgatggtcggcttataaaccaaagcgaaatttaaattttaaattaatatttttagtcttatttttaacagattaagaatataaatataaaagttgtaccataaaatcatcatttctagttgtttcgtttattttccacctcttgtttattgttgtcactgctggagaaaccatcttcactcccggttcgcagcccctcacaaattcacaaaaacctcatagatcatatcgccaccacccactaccgaatcgcgtgcggctcgctgcctgtggcctgccagtgacgcgcctcctcccgctaacgcccacgacgcgcctcctcccgctgacgcccgcgacgcgcctcctcccgccgacgctgccgacctgcctcctcatgccgccacacctccacttgccgccgcacctccacctgccgccgacgacgctggcggccagcctccgcccgccgccgcccgtggcctgcctcctcccgccagccgcgcctccaccaccgctgccgacgcggctccgccctcctctagccaccgctgatgcccgtggccagcctcctcccgccgacgcgcctccgcccgacgcccgctgacggagagagctggtaaagggaggaaggatctgaggagagggggggatgtcacctcggagagggctgggaaggggaggaggctgggatctagaggagggaggaggaggacgaagagataaaagactaaggatgggagcgcgaggagataaggatgaaggaggagaggaggcgcatgcggcagcgttttttttttcaatctttggtcccggttggtataaacaacttggtactaaaaatagtgaggggcctgacacaacttgacaacatgttgaaccgggactaaaaatgatctttagtcctggttggtaacataaagtgtcgtgccgcttttgaaccggggctaaaaatgtttttttgtcccagttcctattcgaaccgggactattgtggattttgcaccacctagcaaagatcagtttttcagtagtgtgtgtttaccttttcgattaagcgccagatcactaccctcggcagtatgcgggttttcataaatgtttatcaaaatttgacatatttcgatcaaaatttggtcaattttaatgttttatatttgagttctcaaaaactattcggaatttcacccggagtatactttcttggggtatcgaaacatcaaaatttcgcgattttcggtcagttttcataaaaatgtgaacatgattattgctcaaccaatgagatatagtttgtgtagtccattgctacatcacattctggtgtttatacgagagttacgatgactatgtatgtgtacatgtacgatagtctcgtgctctcacttaacacgttcagcgcacaaacacaacattattgttcctacatagatcacgcatgcgtacgttcaatctgtttgtgatatatatatgcatctaaaagaaagtgagccattatcacgagatctgcatatatacatgttagtatattgctccgtacgatagtcattggtgcgtgtcaacttcggttttgatcgctcgacgagtcgatgataggcatcaatgcgactttcaggtcccacgccgtggaacattgcctcttacaccaacccgatcaatcatcaatcaaggccagcaattaaccccaaccgaaccctgcaccgtagaacctatcttgccatctgtacacaacatgtacacaagctcacgctcgaatgttcgatatatccctttcggcttaattaattacacgcgtcgcattaaccactcagatgatgaccaggttaaccatctgttattagttaatttaccggacaaacactacttagaaaaaacattttttacagacggccaaaagtaatttttccaggtagggaaaggaccgcctgcagatcaacgactacgaaaatcattcatttttataggcggcccaatggcccgtatgtaaaaatcctctagacgaaaaaaaaattgcgcccagccagccccgcacctcgccgccgccgctctcccccggccttcctccggccagatttgtaaggagaggggaggggagccgcaccggagccaccgtcgccgccccacgcggcatcgtcttcgccccgcgcctcgttgacgctgccctccccgggcctccctccggccggatctgggaggggaggggaggggagccccgccgttgccgccgtcgccgccgccgccccgcgcgtcatcgtcgccaccccgtgccccgcgcctcgccgccgccgccctcctccggccggatctgggaggggaggggaggggagccgcaccggagccgccgccgccggcgccctgcgtcgtggccggccccgcgcctcgcctcgccaccactacccttccccgacctccctccggccggatttgggaggggaggggagccgcgctgagagccaccatcccgcgcgtcgtcgttgccgccctgtgcctcgcctcgccgccgctgccctccccggcctccctctggccagacctgggaggggaggggagggaggaggaggggcccggtggggagaggagaagaagtgttgagggaggagagagagttacgagggaaatgagtggtggaggggtggcaggagaagataagagttaagtggtccgtctgcgaaaatcattttcgcaagcgccgcttaagtgatccgcagcgaacttcaccccaatttaaatttttataggtggttatttggctaaagggttatgtccgcctgcgaaaaaaagatcctatgtcaggaaaagtgatttttttagtagtgaaaccaaatggcaaaaatatacctgttcgggagggttttaaatcattaaatctaactctaaaaacggagtatggaacggacatatgaagcagcctaaattaaccgtgttgaatcggttccactctttcatatcactttagcccttcgttttctgggtgaagtttaaatcatttgattggactttaagaagagatgaatctagagctagcggccggagcctgtcaaacatgccttaattataactctcataatctaatattgcgctggttaattaagctggtgttactttctcacttgttacacgggacccatccgtggatgtgattagctgtagagccatgctgtgggctgtggcatggtaatgatggtacgaaagccaaggcggtgccaagtcaactactagctgcttctagtgtagctttggcacgtacatacaacggcaaagtcagcttgtatatatacacggcgcgtggcaaccgtagatgccagtagagagagcacgaaaaattccagaagaagaagcgtacgctgctatacaaaaggggccttcacgagaccacgagtttcaaacatgaatttaaaaattccagctctgctgtatgcttcaaatgtcaacgacttgcacgagttgaatcaacggcaattaaacaatttaatcgcacgtttcttgaaccattatgttttgcctatttcaagtcactactacataaacctagataggtaaaactagataggggtcgaatttttcaaccgacacatagaaagcataacatattagaaaaatcaaaggtgctggttacagaaccgacacctttaaggtccaaaaaaaagaaaaaagcggcttaatgcatgggctcgaatcgagccgatgcatcgagcagctccccttcacccgatttcacccaacatttaattcatacaatcaattggcatcaagaattcaagaacattgatccaagaacttcaacaacatcaacacaaacacaaaacacagagaagatggagaggatggacgacggcctccgtgaagaggatggagtggcatacgagcagcacgtcgggtcccatctcgcacagctcgtcggtggtggcgaagaaacagatctagcagcacgtcggaaggcgttgcccgtcgttgccgcctcacctcccaccatcgctagccgcacgccactaccatcgcctccccccccccccccgggtcggatctggcgaaggggagggtgctgcccgtcgttgctgcctctcctcacaccgccgcacgtcgttgcgaccaagagagccgacagagagagagaggggggaccgagagagaggggagaggatgcggtggagattataattaagacggagaggatatggatagatggtgctgtgcggtttggctcagctcgattaaggggtgtcagtttttttaaggaaaaagtacgttttacccccgtactattgcggttgaccgaaacccccccccccccaccgaactcgaaaaccagtcatttcgtaccccgaactattaaaaccggatagttaaccccccttaagcacacaatggggcggttttgactggagtcgtgcgcacgtggcagtccaacgtggcaaggcgggctgagtcagcatagtcgcgcctggtttatagacttgacccagaaaaatttcccctccctccctttctctctctccctcccaaaaatttccccttctctcgaaaaccctagctagcacaggcgatctcgttggcgactcctgcacggcggcgagggtggtgcgctccaaagcaggtgggtgtcgtggtcagaggcgacggggccggagatctccaccacggacgcggcggcgacggtctgcagtacggccacctcgacctcgttggcatgatgacgagctcaggtacgtcccggggctcaaggtcgtcttcttgggctggaggtcgtgaacgaggaaggatgcagccgccagtaccatatagggaggggcctctcgattatgagccgccagtgcggctaggtggatttcgtggagtcccagtaaccccgggagaagatatttcacatgctacaatgcgcgtgtgagtaaatttgtatttatttttgatttggctcatttgtttggtttcaaactcattcgatcttggattatacatttatttgtgtagtctggttggttgcgatttttgggagtggcatgaccctgagtcagatccatattggaagcaattcctgcttgatttgaggaatgctgtgtggactgtaagagaaaaaatcaatgggctaaaggctcatctccaggacagcaggaatgaagccttgaagaacaggtacagttgggacaagcttctatattgcagtgcaaaatagaacagtgaaatggaaatacaaagaaataagagcactagttatagttggtggagcatctggctgaacaactttcgtacagcctgctaggaatccctgtttgcaagcagccaggcaaatatatatccttttgaatataggactaggctggtcagtatctaacttgacaacaactgtactcccaggattactcctcagcaactctaactgatagtcaaagattctaaagtattcacccctggtggactcatatatcttcctgaatacaaatgctttggctctcttgcactgcccaacactaacatttgcaaacatttcctctgaaacagtggactgcatgctctgtatactccaagttggattatctgtgatcatcttctcatacttctgagcaatcctcttgtatgtcactaggtggttatccttccttggtgggcaggtgtgttcatcaactagactagctatttgccagctttctgtcctgctattctttgatagcaaacaagcccacgggcaagttgccaaatcacacttggcccttgttctgtaaccttcatcctttataaaccttatgaacctcttgctgtccagtgcaagctgcaccactgcctctttgaattctttcttgccatcaaatttcattcctagtgcaagcctagcaattggcctattcacattaaatctgggggtatttggacttctttctgaccagctgtccatcactatcctcttcataggaatcatcatctgcactgctattgtcatatgggctagcactgtcatcaccctcaatctgaaccaaagctctactatttgtctgcctagatgacccctcacatataacatcatccaaattccctacctcaccatccttcagtttcttcttgaactctttgtaagccttcctgatttgctgaacctcttcatcttcttctgatgaacatgagtctccaccaacataatcactgtcagagtcagaaatcacaggtttcttcggcctctctttacctactaccactgccttccccttatcactaggttcagctactaccattgctttttctttatcaggtgtacgaaatgctcgcacttgttccagatctctctttgtcttctctggtgtagacactatgacaagaacttccttccctatattcaactcaaacaaatcctcatcttcctcatcatcccattcatcatctgcaggagatatgtcctgcagttcatcttcaaagtcactatcctccttgctgccagactcactggacccctctgccattactgtctccacataaatatcagcaacaccaccttccccaacacagtttgacatataattgtagacctcatcatcaatcaaaaccctcagcccatctgcaagttctttgccaggaaacaaccattgcagaagcatgccagggatcacttcacaatgatctttcaaatgtccaactatctcaggcagagagaccttatcacgtttgatgtaggacatcccctcagatccaccaatataaaaggtttccctcccattgttaatgaaatccccaccaaagtgaaatctaacaggtaaatactctagaggatccattcttaacctaaaaacaacatagtaatggcagtacacaatcaatccttttgcctaaatcaattacaaaaatcaaaggaaaacaaactctcacacatccaactgattccatatgccctagtaaaaaaatcctacacttttctaggatctacatcacatacctgcaaagcctagctgcgtcgctcttacttcatcctcctcgacaagcagctggtgctggccgatgtggagagcgtggccgccacgaccgtgccgcagagatccctcctcgtcgcctttgagcgtgccaccctcgttgccttgggcgcagctcactcgccggcgtggagtgcgccgcccatcctcaccggagtcgccgacgagatcgcctgtgctagctagggttttcgagagaagggaaaatttttgggagggaggggaaatttttctgggtcaagtatataaaccaggcgcgactatgctgactcagcccgccttgccacgttggactgccacgtgcgcacgactccggtcaaaaccgccccaatgcgtgcttaactattcggttttaatagttcggggtacgaaatgaccggttttcgagttcggggggtttttcggtcaaccgcaatagtacaggggtaaaacgtactttttcgtttttttaataggtgcatattttttaaaagaaccgacacctatttttatattataggtgtaggtttttttttcctaaaattgacacctctagtgtttaaaggaaggtgtcggttctgtatatttttcatcgtgtggaggtgggaaaagatctataggtgccggttggtacctatatggccggtccttatgagaatttttgtaatagtgagtttgcaaaagtagtgtactgagtactgtacgtacgtaaaataatgtctaatcaaggccgtatacgaagatctggacggttagtttgatcagtttttctcggccaagagcagcaacggagcaaccaaacctgacttagtcgcaaacggataaataatctcataaatttataacgtacgatcggtgcatggtcttgctcgtctaacgaactcctcgtccctgctactgcaaatcatcgaaactccagttgaaaattagttgggcttgcacacaagtgctgtcctaacatatgcatcagctggaccacctccactggccataaagctcacaatggaaaatcttgcacctgttttaattagctatgatccaccatagtatgtatatggtccatacatgcatgcaagggcacataattagcttaattaattagctagtccttttcctgtgcctcaaaaagtgacaaaacatttcttatgtgcggctctagctagctaaggtaagtggacccatcaagttcgagatgatgaaaatgcatgcatgtttgtagaatgaggctgatttgtgaaggtttaggtggtgtttagattcagggaccagtcctgttacatcagatgtttgacactaatttgaagtattaaacatagactacttacgaaactaattgcataaatgaaagataattcgtgagacaaatttttaagcctaattaatttataattaatacatgtttactgtagcatcacataagctaatcatggattaattaggttcaatagattcgtctcgcaaattaggccagagttatgaaatgagttttatcaatagtctacgtttaatacttgtaattagtgtcaaacatccgatatgatagggactaagaattttagtgccatccaaacaaccccttagtttgcatgttccaagatatactttgatgatcatcgacatgcatgtgggtgtaaattggatttggatttgtcttattgatgctctaccatatcaggaaagtagtcttagacattataaatagacgtgacatttttcataaaatagggggatacactgtgatacgggtacaaattaaactatacaaatacaacaagacactagcttatttccatccaaagtcatgtatataaagcttgtttcggttagaggaaaattgtttttttactgtttaatctgcagattgaatattgcaatcagaaggatgaaaaaaaattaaaattggtgcgtcacacgaagttgctaaaattacagacatggcatgttctagatcaaaattgttgtaagattcccattggcccaatttgccttacccacaaactgaattccctttccggcatctttgtctagcaggggtaccgagtgccgagtacaacctaaacgaccaaaccgttgcaagccctgctctgaatcgatcatctccatgactcctttctggtgttttggaaagcaaagtcttgcaccttacctctttctgtcttcagtccacccggggtcaaattgtagatgcctctctgcttccgtttcttgggtaactgttcagcactcccaagttccaactccaagtgatcatgatagcaaaagaaaaggggtaaataataaggaaaagaaaaaaacaagacgcacaacaacgcaaacgtatacagatcacatgtacactttctgcatttcttaaacaaaaacagtacaaagaacattccattattccatataccttcgagcatgcttgccatataaaggtgccatgtctgagtcatcctaccaaagtagtcccaaggcaaacccaatcaacccgacctaactaacgccctccgtcttatcatagccgtccattgccacgatcgggcggccgcgcgcgtagtcaccgaccttttcgtaacaattcagttacaatgtagtactagtacaagtctattgtagcacagcttcacgttgccgaagcagaggttgcggtgcggtgccgccggtgcggctgtcacgtatatgcgcgcagcgcgcagacgatcgattcgtctgcgcatacgagctgacgcccactactaaaaacccacggaaacaacgccacgcgcggcgtgagatagatcgattcgttcgatcgaggcgcgggactcgcccggtggatcgcgttgcgtacgagcgtacgagggagaccgacgctgcagcgcacgtacacacgggacgcgacgagacgctgcagcgcagcgcagcctcgcgcgcgcacggcgaggggaagaaacacgcacgcgggggctggatcgcgcgctggctggctggggggaagcggcggttggcgagcagagcagagtgagttcccgtttctttctttgtgttcccgggcttttctcccattcatccacgcgccaccacgcggatcctattcttaggctcccgcggccggacctaaccggggcggttaagcgagggccgcacgttcgcgggaggcaggctatggccacggccgcgacgacgacgtcgtccacggcaaccaccaccaccaccacctgctcgtcaccgtcgtcgaccaccagccccatccacccggccgtcccgcaccggcggcgcctcaacgacatcgagcgcgtcgactacgcgcacggcgccgcggccgacgactgcgcggcctgcggcggcgtcgcgcccgacgccgccctcgcggacgacgacgagtgcggccacgggcaccccgtcgtcggggccgtcacgccctgcggcggcggcgggagggcggcgctgctgttggcgcggaggaagcgcgcgtgggtcgtcggggcgggcgggcaggcgtggatgaggggcgtcgtgctgtgcctgctcggcctcgtcgcggtcgtcgggttcttgggatcgcaccggcgaggcggaagcggcggcggtggcggtggcgcaggctctggccccgttgccggcggcggcggcgacgacggcgggaggctcgtcaagaaggtggaggtggccgacgccgacgtgatggggtggacggaggagaacctgacgggttttcacgcgccgcccgcccgacccgccggtgcgtacgtgcactcgccgttaatcactcgatcaactcttacttcacttgatcgacactcttttattaccaagatcatttagtcggtaataactactccgacataatcacacctgctcttggttttactctgggaattcaatgaactctctgaagtgtgtttcttttctgatcaaatgggactaatgttctaatctaaaagcattttttagtcaatgtctaatcaaaaccatttttttttgttacaaaacattggtccaaagggaaaaaaaagaagaaaaagaagatacagaggtgtgcttgcatctaggccagctgaggattgagtatatgagagaaaggatggatgataacgacaaggatatttgcttgtatttgttgctagcgtgattcattggcataaaaaaaagggaggcagagactatatgacattatgacgttagtttcagagtctagaaacaaagcatcccatttaaggcatttatctctcgactgcttttgtgcaaatgatttccttgttctttccgctgtttatttgtctctgcaaataagacgcatcgctttagttcttttttttctggtcgctgttgggcaattgcggcctcgcaagctagtagtcactcgtaatgagatgttaggacctgactgacctgcggttggtgccgttgaggttgctttcacttgtaattgtcaagtgatgcatttcaaggtgtgaaaaaggttttagtgcataaacagaaagagttttgctggtaaaatattaatcaatatcacatttctgttctctaaactaatgttaagttttattgcacaactgagtttaattgactaaaaagggacgtaattttccatcagacagcttaatattgtaatgctcttcttttggggtttgtgattgatagacttcgtaagattcatatttacccaatcggcggttctcttaggcgatcgttttgagtcagaatatatattgagaaacccttccttacctggtagtggtagggacatcaagatttatggctgtataggtttaggacagagctggcagagactgtccgaaagcaatattgtgcttatgttcagacaagaaatttcattcacgaaagcaagacatccattcaaatgccgtgctgtgcggcctgaatttactcgagtttcctttataacatcgacagatacctgagatatggatgaagccagacagtgagggttatagccaatgcattgaacgcccaaagaaccagcgcagtaatttccctctctatatctttcacttcaatctgttccagctccagttccatgctcatgttctctagttgggtgctcttattgcagggactaacaatgcaactgtcggttatctaattgttgatgcaaacggggggctaaatcagatgagaatgggtgtacgtatctatttaaacggtttaacatgcaacgcttttcagctaacccatactccttcgaaattattcttacagataagtgatatggttgcagtggcaaagatcatgaatgcatcactagtaattcccactctagatcatcagtcattctggactgatccaaggtctgtaccttttctactcaaggatcatccctcatgcccttataaaacatcaagtaaactgaccataagtccttgaatatagtgatttcaaagatatattcaatgttgagcacttcaaggaaatattaaaggaagatattgtaatcgtggattcccttccaccaacttacaaaagggtgaaaccctatatgagagcacctacctcctggtccagggtaggtgttcaaaaacatttgttcctgcaattgcatagcttagaaattcaggaaatatgagcaagctaatgaattgatagctccattttgcaggcttcctattacagagatttttcaaggatactaaggaagtacaaagtagtgaggtttactcacacagattcacgtatagtcaataatggtcttgctccttccctccaacgtctccgttgtcgtgcaaattacaaagcacttcaatataggaaggagatagaggagctcggtcgcaccctggtagatagactgagaaatggaatggatcattatattgcacttcatttaaggtattgaaaattcaaaacattcagagaccaccttacttcatttcctgcaaagaaaccgtttacagatcagcaatcttccattttgctttgttgattgatttacagatatgagaaagacatgctgtccttcactggttgcaatcacaacctgacagtacatgaggcagatgaactgacggacatgcgactcaaagtgagacactggaaggagaaggagatcaacagtgaggagaagcgactccaaggcggttgtcccatgactcctcgtgaagctgctgtcttcctcaaagctatggggtatccttccaccacaaagatatacattgtggctggtgaaatatacggcgcacatagcatggatgcattaaaacttgaatacccgaacatctacacacactacagtctagccacagcagatgaattagaacctcttgagttgtatcagaacaggctagctgctgtggattatatagtagctcttcagagtgatgtttttgtatatacatatgacggaaatatggccagagcggtgcagggtcacagaagatttgaaggattccggaaaactataaaccctgataggtatgtaccttcatacaggtcaagtttttttttctggttttcaacttacaatatatatatttttatctgtaggctgaagtttgtagagctcattgataagctggatgaaggttccatggactggaatgaattccaaagtgaagtgaagaagcatcatgaaaacagacttggaggtccatatgacagattacctggtgaaagtccaaggcaagaggaatacttctattcaaatcctatccctgggtgcctctgcagaaaggtacaaaagactaggtaaaatagattaatctcaaagggagatgattcagtcttcaaaaagacatgaattgtacagtcttcaaaggaaaatagtttcgcagctgcattaaggatggagatgacacttcctcacaagtcacagattgcatcaaagtggaagtcctagtaaactgacagagaccggtcattttgattatttatcctagactgacaacactcgtagttcagggcgtggggccaagaagtgctgcattttcaaagaaatgttcatccaaggaaggaagatgagattctgaagtagttgaagaattaaatgtatcatcgattataggaacagccagaaggaaaactcttcatggaggctgattgtagttagtccatacacacttcccctgttcttgacgttatctgattcgttgtagtgggcatcttacatctggatggattcataacagtaatggaacaaaccacactatcagtatagaatgacagacaaatatttcagtagcttaggtcagatcaataattctttgtaatctagcaatgtgccaatgtcatgcacatcagattagcttcttgtaaaagtatgttctttgttgcagtggcatctgcatctgcactatcctctaggaggaatcaatgtgagtttcagaaacaaattagaaacaaagaaatgcatgaaaacaaaaggaaaaccgtctaaggaaggtggcttcaccccatgagacgtttaccgaggcaggaggcagtgtcgaggcggaagtcgaagacggcggagaggaggcctcagacgcagaggaatcgggacgagcggaggtggtcgggggatgcgagtgtgccatgacgggcctgagcgagctcagcgagcagtcggaatccggcactgaccacggccacgacgcggcggcggggttcggacgaggcgaggaatacaaacctgccggaatcgggtaccccactcggccactccccggaagagtagcgggagagccggcggcgatccggcggcggcgcggggcgcttctccgacacacacggagaccggcagccggagaggcccttctccttccgaaagacacgggccgcgcgtcagccaaagtccagttccagcccaattaacagatttaacacagaccgcacgtcatccgcagccccattacggcccaaccaatattgggcctcatcaaacataatactctttggaataagttcatcttgggtcccttcattttacaccgaatctcaaaaccagatacaaccggtccctgaactaaccggtgcaaacgagatctctcggcattttggattttggaaggcggttttgtctgacgtggcaccttcgtggttggtttgactaggtctccgttccacgtggcattgacatggcgcttacgtggcaattatatctcggaaaaataacaaaaaccatgggcccacatgtcagctacacacaaaaaaaatttaaaaaattgtgaggcccacgtgggccccacatgtcatatcctcccctcactcaactttccctcttcttcctcatcgcgccgcggcgccacctcacagtcattgtctaagtcctcaccgcctccgatgacaacaacggccgaagcatgccggcggcaggccgcaggcggcagaggtggccaaagaaggaagaggcagagaaggtcgccggccagcgcggcagttgtggcgggttatctcctcccaccgccgttggtcgctcgtcgctcttattgctgaggtcgggcgaggattttctcgatgccggggaggggtcggcagcggcaagccgcgggccgcgggccgcgggcggcggaggtggctggaggaggaggaggcaaagaaggaggttgctggcgagcgcgacagctgtggcgggttatctcctcccgccgctgctcgccgctcatcgctcttgttgacgaggtcgggcgaggattttctagatgccggggagggatcggtagttaggaggatggggggtcggcagcggtggtagaggggtagagatggcggcatcgttgccaagaacgacctccaccgctccaacccggctgacacccaccgaaaatagagctcctcgccggggatggccaggcaccgtgggtgggggttcgatggtgacgggcgaagggagaggtgcgcaacggccgagcgtgtcctcaccgccgggatccaaggccgccgtcgccagtcccccggacgacctcgattcccgcgagctatccgcctgcccgccgccccgttgtcgtcacgcgccgccgctcgccactgctccttgcagactgcagagcaagggagagatagatgggggatagagagaagagagaggagtaaggatgacatgtggggccgacgtgggtcccgccattttttattattttatgtgtgaaactgatatgtgggtcccacgggtttttattttttaatcaaattgccacataagcgccatgtcaatgccacgtgggacgaagatctagtcaaaggagccacgtagcacaacgtcagccagaaccgggaacaatattgtccgagggacctcgtttgtacggttttgtaagttaaaggatgcattgtacccgattttgcactgaagggacgaattttggactcggcaacaaactgagggacgtaaggtgaacttattccatatctttagttggtctctgttctgtaaattggcatatttcttgttcttttgtttgcttgatctttttttttaaaaaaattagttaatacttaattaatcatgtaataatatgagcttcgttttgtatgccggggagaagggttgccaacccctccttccgaacactacaattcctagttctgtacaatgcatatggaactcttgaggcttatttccaacgttatcgaagtgcttgctcttaattgcccatcctgaggaacattttgcacaaagttattttgactgtattttacgaattttggtcttttcctcggtgaaatttgtttgagcatacacgagccactgaccagagcggagcatgacaaatacgggcgtcgaaatgccgattgcatccttcatctggatctggattggcccattatgtctctataagcttatttgggcccataaatttcactcaaaaggaataagtccattttacctcccacatctcttgcccttcgtcgaataacatccctcaactaaataatttttttaaaaaccggtgcaaatcaactccacatgtggttctgtaagtggtttatgctgatgtggcagccaggtcatcaaagcgattgaaatagaagtgggtcccacatgtaagtgacaaatgctaaaataaaaaagtggtggggtccacttgtcagccctattttttcttatcttcttcttcccatgtcccttctatctctttctcgtagccgcacgcgcggagtctgattcggccagccgatggcggtgaacgttagtcgggggtggcctcggagggcttgaagacgtgactcatctactcctaccccccgtgtcaccagggagggggtgtaagagatggcttcatgctaaccttcctgaaggcggcgaagacgaactagggaggctcttgagcagcgtgcccggtggcagtggcgcccttctcatcccagcgagctcctcctctgcgctcggtgggccgcaaccacccgatgagctccccggcggctggccggccgtggcctcccgatgagctcctctcccgcgtccggccggctgcggcatcccggcgagcccctcccccgcgcctggcccgccgcgccctcccgacgagctcctccccaacacccgccgccgccgctcgagccgatggaaggcgtgaggctgtaagatatgaggagatgaaagagagatgggaggggtgataggtggccccacgtgggtcccacctattctttttattgtgaatgccatctagatgccacgtgggatgaagaattagtcaatgtgccatgtggatgccacataagctataactggactcaatactgtcttgggggtcgatttgcaccggttttcggagatgaggtagtcgttatacctggtttatctaccctatagttcaacaaatgcttttactcattcatcattcatcatgtcacacatccaatggcccaaaatcaacagaggaggtagatccgaccgcccagcgcatctctcgcatctcccaccacacagagccgcatctcctctcctcgcgctctctccgcatcctccaccatcagcgccgcatctcctcctcggcgtcctagcgctctctcgccccctcgccgccgtgcgcctccccctcgctccctcgccgccgtgcgccggatttttcattgaatcgacgcgctccttctccggactagggaggggaggcgcggcgatgggcgccggcgcggcgatgtgggggaggcgcgacgagggaggggtggcgcggcg

SEQ ID NO: 7612 - DNA, 68264 bp, Oryza sativa
  unsure (1)..(68264): unsure at all n locations
ttcttatatttttcatagaggttttagttactccttttcattacttgtctatgttactagttgaatttcagatatgtttcaattttgtcttgcttatttgcttggactactttgtttttgttttgcacattcaaattcgtgctgaaggcagatcaactattaacaacagaataggccaagcgatgattgggccattcgtcgtgtcactgaaatcagtatatcagaagttgaaacttcaggtgataaattggtgcatttttatgcatggtttactgatggaatgaatacagtaaacagactggttactctgaatgatatttctgagcacttggctgaagccatttgctcggggtttcctttatggacaaactaagcacattgaagtggattcatgatgtagtaattcactggaacaaaatgattcagataaataaggtccttcaattatcagtcctttctgatgaggaagtcatattactactaggtggaggctcatttctgaaaatatattcaagttctctaggtttgccatactgctaagggccatgttctgcacgtatcactaaccgttgcgtatttgaaatctgatctagatttaaacagtgggcagcttttttcctcatattgtgttttgtcatgcaacagaaaggtgtcttaggggaggaggcaatatgtaaggattgaggtatagagagttgagtatagagatggtatgcatgcttaattattcaggtcaaatcttggccacttctggcatatcattattgctgtttcatggaaaatgttatcagcaacagtgctccatggaatgatactattgctggagatcggaggcatagatcttacttggttaacatactgaagtttgactccggttcttgctgtgatattgatggcctttacctggaatgacagtgcctcatgacttgggaaaggaggctcaaatttctgccttgataacaccccccccccctctcttataagtaattatatgaagcatttgcatgtcaagtttcataatgcttatgcttggattccttttgctgctattatatagtatagtaattcgttgcaatccttaagtcaattaaatacatgtaagcaaagtgagtacatttaggcttaggaaatattcatgattcctgcagaatattgaactgttctctatgaaattatgtaaattcctgcgttccacacagaatatataaagttgttttccaaatatatatgcttgataactccaaatacctcagatggttttaattccatgataactccatgagagcctgagaaacatattattcatagcttgtataatggctacgagagtacaatcgattactaacagacagcatgatgcattttcttttctttctgaaagttccatcgcccaccatggcactcactggccaagctggtcctttatggacttgaagtgatgctgatgaatttgaacagattcctttcttggagattcatactcaaacaaaaaaaaaagcagtgtttactgctggattttcttttaaatgtttccatcaaacatgcgttggaaggggaaaggatatatttcctggcactaaacgttttgtctgctaacaatgtaatttgaaaatccattgttctcttgatgattttttttacgataaagtatgctatttgaagctaccgtttgcaacagtttcggatgcatttttttacatataagacaaaatacccataaaactgttgctaccttttctttcacagaaaattagggtaagcctgctgcatggattgaagttttgagcagtttgtggatgacatccaattgctagcttaatcaatgctgcatctcaaagaatactgatgtgaagattcttgcaagagtcttggagcacccatgctcttgtacatctcttaatgcaaatactcatgtggtaaactcttttagatggtttattatttggtcagtgacccagtgttgttcttttcccatgtattatgtttttagctaagagtggatttataagctgtaagaagcatgtgataaaaaaaattacatgtgaaattcaattaccaaaactcattcagaaactgtcttctgttttgccaaaacataatgaactttctatctataccctaactgtataaatcgtctatgctgttatatttcgtttaaagaaccctttgagaaatgcaaaggcaatcctgttaagtttgtttgcttctagtacattatattagtgtagtccgtatttgatcaccttgtgccaggttctctgataagtgatgactagtttttttttgcaccttctattgattagcctggctaaaatatgcgtgtccctgaagtagaactgatggagatatggaagggagtgaggcgatctggatctgctatggtccaaatgctgttgaaaacttaaaatctccttgttttcgttttgcatatatgacgtgagcacagctttggaattactggtaaggatttcagttcttttctgaaatcattaagtatgaaatatctgttttgaggtctgaagtttataagactgcatggcaagagatacaggaaatgtagtgacatgacaaaaagggaaatagaaagcatgaattatgttgatgaaaatgaaatttctgttacaacaggatcttacgatacagaatatctagtaaatctaagagaaagagcatcacttccttttgcattcaagtgaaagttcaaagccctgagacaagcaccatgatctgatctgtggtccagtaatgattttactttagatctttgcaagaagtgaaacttctatggcctgcccatcaattaaaggggccactagagcagataagcttcaggggctatttagtgattggcaaccaacaagttaatattgcctaactttattgaaaaaaaaatctaagttgttagatatttttccgttgctacgtacgtacagtggttatttccttttaactgaacaaccttgtattttaaattattagaaactgctcacaaaaatgtttagggcatctcattaaggattacctccaagttcacatggaggacattttaaaattttaattatccagcatttcttcctctctttttttattgttaagttttaagtggctttcttttaagttctttaggctttacttcctcagtccaaaaaaaaaaagtactctaacttctggggataaatctgaagggcgtagatctattctactgtttcaatttcacatggaggattaaaattactgtgcgtcaactatctcgccgtaagatactgttgagagaaacaggtattgtttcacctgcatttatatcacaagcaattgtctttcttttcacaagtgtttttctctcctttcaagctggtggcatgtgcccattattgagccatccatctccgctctcctctcttgcatgtgcagcacctccggttttttaacttgtgcataaaataatttcgatggatggtccctcttccatctcccttagcacaaacatcagtgcatgtgagatgtgacacctccatgtttacaatttttacaggcacgctcggtattatctgttcctgccaaagaaataaatctggagaaaactgattaccgagatgcagnccggagaagaagaagagcacccatacgcatccactgtagattcaaaggcaggggggcacaggtacgtattgtaatggtcgcagttggggagggtggtccgtcccctacggggttgatggctacctgctgcttgaatgcgcctgttggttttgaacgcctcttgatgctgcgttggagtcacgaccagtgtgtgtgtccctgtacaggagaagcgacgctgatgctctcggtcaatttggtccgtcccgtggcgataacgatgcccacagccgcagccgcaggggcagaggcagagggcatctcgtctcgtctcacccatgacgtcgtcccgtcgcagagccatcagttcagttgttgctgggttcccatccttcctgccgctcatcgagagatgcaggatgctgacgccgctgctgtgctgatcctgttcacttgcctctgcagctttgcactgatccacatcgatgataatactactcctatttggtcatttggtgtgcaagtgcagcaacaacttggcgtttcacaaaaaggtatgtcacgttcacgaacctgcatgttcttggagaatgtatatttttgtactggtagtagttgttgtgtactgatcaagcaaggtgtgaggccgtacgctggcacgtagtagagtggatgaggagagtattctgatcgtagtggggggggggggggggggggtaaactactcacggcctcctgccgggaaactacacctacccggtggtccaataatcccccgtaatatgttacgtgatggtcggtattagagctcatttgtttactgcatgcgcatcgaccagctctgcccccactggctgtgtcaagtgtcagctacgccaaaaacgtgagctctttttttttgctccaagtgcggggttagctatacctacttagtctgatctaagcacacttttctaccaaatctagccaatggatacttgggccttcccttcattttggaaaaagtaaagtaagtggccaacctttttatattgaaaggttttgatgaggcgaatttggatgacatgaatccaaaagcataatctaggaaaaaaaacagaatgaaccattagagcgccacgacttgttgaacaggattacaaaatcgtgtgaattgtaacaaaagaagggtttggagttcgtattagggagtgaggacttttatacatactgtcagtacaaacaaagacacttcaaaaatttgccacaaaattgaaaaggccaagtggcagcgcggcatgctcgtggtggctagcagccgtggcacgcctagcgttgtttcattgtatgttatgaattcatccgagttaggaagacaattttatctcttttaattttatacaatctaatttaagtggaataccaaatcactctaaatctttggaccgtttatattagtattatatactgccgataaattgtactgataaaagtatttttatttgttgctctaaatctttcgactgtatttgctggctgcactagtggtgcaccggtgctgagcgctgacacggtttttctgttctctttgctttgagctgtgaagttccccttttcctcccataatgatatgctttgcctgtattgggagcagcaaatctttgtggtccgacgtgagaaagaagggagacggaatctcgaatctctgcaaccagcctctctacctctagtcccggctcaattatacgcccatttgcagagtagcccccaggaatctcaacacttgctactcgtgcaacgcaaaggcttttaccgacgcctacacctgttgatgccctccccccaaaaagcgccgtgatgtcgatgcgttgcggcctgttccagttttcccccaatggcagctcggcaacgccgagatcactcaacagcactagcggtatccaagccacagctttcagtctttcacgcggtgcgtggaggagttgatcatctgcactctgcagcacaacaggtgttgcacagttgcagtagctggatatcacccgatcaggtgcgcaattgaactcccatcccctaacgccataatttcaatccctaacaaagtttatgttacaatgttctactccaatatataaagttgctaccgtttgtcaattcctaaggaggaagaaaaataaactaagatagaggatagagcgaggctagcaaatattccatacatcctagaatgtaaaaaacttttaacatttaaaatttatctcaaagtataacaatttatctttctacttcactctttaaataaattacaaccatctaatatttatttatgtaacatttacttcctcattttaaccaattataaccatcatttatttaattttatctatttttaaataaccatgctacccactaaacttcttatattttaggaaaagggaataattgttttgttttctactaagtagaagaaaaaaaaaggaaaagcacaggatgtcgcccactttgcttgtgttggattgcatgcatctttcgctcctgcccgcctgcttgtcctagggggcccacttgcagccccacagctgcaagttgccgtattatggtccttggcctgcactatgctggaaccaataataccaaatgtatactaataatatactagtacactcctgctgccctacgtagtaacgtttagcaatagtagcatagtacgcccccccccccccctccccattgacaggcaacaatacagggagggtagactaaaatatgatcaaaacggtttgcagcgaaagggacaccaactagcacacaagatttcatcagagcctgtctatcctcgtgttcttgtgaattgtggtgaagaggccttagcactgagtaagggtttgccttaccgccgctaaccgcgaggtacggtaatataaataccgcagtaacctctttaaattcaaataaattttaaaaataatttaaatttttgataacccataacgtcatcgtttcacccatgtcgggtatagggtacggtcattggtgcttagtgaagttgccctgcgctcatgccattcggcattccagcttagcttgacacaagtgatccctgaaagagtgatgaaagggttccaattcgtaccgctaagttcctgccttttcactcgaaaaaaatattcggataggagtatactatttcttcttaataccattgatacttccactaccgttctcatctaaaatattccctccggtcctaaatatttgacgccattgattttttttaaataggtttgaccgttcatctcatttaaaaaatttaagtaattattaattctttttctatcatttgattctttgttaaatatacctttacgtatacatgtaattttacatatttcacaaaagtttttgaataagtcgaacggtcaaacatatataaaaaaaattaatggcgtcaaatatttagggacagagagagtacatcctcaacttgaaaatacaaccgattaattttcacatgaatagaaaatatatcatgatgagttctttatatatatatatatatatatatatatatatttatcaagagattacggggtaactcatgcttcattaagtttacaaattcaaactgattggaatgtggctccatcgaatcacccaaaactacttgaaatcaactgtttccgctcgaattttgctgagctttaccaaattctaccgatttgagctagcttgcataggttgacaaacttgtagtggtgttttgaatgcattcgtgaacctgcttcatagaattaattattagagcatcacgagtagatgcgcaatatacttttcacttctaaaattttaagcttatcgatggaaagtttgctccaacagttttcctaattagtatcctaaaattttaaatcccctttcccttctggctctcaactagtgggagagagcatcggctccgagtccgcagcgatcagatcgtgcaggaggaagtgaaatcgacaacttcagttgatagtttgaattatctcttatagagaagtatcttttaattcttaaatcctcatttacgcgcgttttgtgcttcacatattaagacgctttggatttaaatagattcatatatgtatttcatatatatgtttaagtttatacttatgttaacataggccgtgtttagttgtaaaatttttcttcaaactttcaacgtttccatcacatcaaaacttttctacacacacaaactttcaacttttccatcacatcgttccaatttcaaccaaattttcaattttggtgtgaactaaacgagaaaattgcttatctaccatcgcataagatgggattcgctcaaataccatcactaaaatgggcttcactataataccattctcaaccaagatgtctttgctcaaataccatcccggacaaaaatgcccctagttcatcttcttcctctctccctcccaccctccagtggaggaataggtcgtcggcgaccaccaccggctccactacctcgtcgccgtcgcttgtgtcgtctcgagcactgcagccccgccccggctcgtcggctgccgtcgcgcaccgcctcactcgcgtggtctcggctggccgccatagtgcgccaccgccccaccacgacgcgccgcccttgccagtcgccgtcgccgccgccgccgccgccgccgccgccgcgcctcgctcgcgtggtctcgattggccaccgtcgcgtgccgccgccccaccccgagcccaccctgactcgtcgccctcgccggtcgcggtcgccgccgccaccgccgccgtgacgagaaagagatagagggaggagatgccccaactcatcgcccgccgtcgcgcgccgcctcgctcgtgtcgcctcggttggctgctgtcgcatgctaccacccttttccgactcaccggccgatgacgacctcgccccgacatggtggccgagacaacatgagcgacggcggcgcagcaatgaagccagcggtggtcaccggcgacctattcagccattggagggagggaggaagaagagctaaggggtatttttgtccgggatggtatttgagcaaatacactttggtagaggatggtattctagcgaagcccattttagtgatggtatttgagcgaatcctatcttatacgatggtagatatacaattttctcgaactaaacacagccatactcctaccagaaaaaccgatcctctcttgatcagaagattctcatggatttccagggccgcggagataccgcgtccaccaccggaggccgggggaagttctccccaagattgcgtcttccctgagcaaatcaaccggcaccacctttttaccctttccagggaagcatctccccgttttttcaccgatgcgcacggccgccgggccaggccaagcgaagccccagagccaggcaccgaagctgccccgattcccctcccttctcttcccccgatggcgtgccgtgagccaccaatggcactttccctggggtggatctgtgtgtgcaggcagcctggcgcaagttgaaggtgttgtgccaaatgaatcctgcaacagcagcgaactgttttgccgtgcccaccctttgtggtggtgtggtgccccgttcccttccattggtgtttctgtgggctgtgattgtgaaacacagaggagagaagagctagcaggaggatgacacagagaggtttatggcatgtgatgcttggttctttggtggtggacctccaactctcaattccctgctactgttgcctgtgtgacagccacacctccccatcagcatcagctgggggtacttgcaaggtacaacctccatttcagctaaactaatcacggctcatgcgatggcaagctcccattggccgcccagaggaggaagtaaccaactggactcgactgcgggtgaagtagtagtagagtgtacggtgtaggcctgatctcagaccggtcattaataaagtgtcatttgggtaaagcaagtactccggtgcttgaaatccgtaagacgaaattctcagccagagtgaagtcaatggggggaagcttcttattagaggggagtcattagcgcacaccacgtctgcttcaggttttattccctcaaaagcgacaggaaagagcagataaaaaccataattatcattaataaagcaagggtcaatgagagggtgaccaatgctaataccctcaactgaacactagagagccttgacaaaaaaaaaaacagagacaatatgctgctgctacgtgctatatctccaaataatacttgcatgacaataataacttgactaatagtacatcaacaaaaacggtgtctagctggtagtagtacccatcctgtgcctcctcccatagcacaggagataatcaatggagtatcaaatatcaattgtgaactaattatttaaccttggtcttggtcttatgtacacagatgcgaaatgcagagatgccatgtccaatatgcttcttcttcttcttcttctttttcttctatctcgtgattcttcttcttcttcttcttcttcctctcatcatccgggatacacggtagtagggagcttaatttagcagcagcgcaatgcctggctactgtgctgttactacttgtccttcgtgctgttgcgatcatttcgttttcagaactccattgatggttggaagcaagagcacgagttgcatctccctcctcgagcacaccaagagacgagagcattttcatggttggtcgtgggttgctgctccaggaacagggttgtcaaccgagaggctgcatcagctggccgcattgcatctgcaccagaacggagtcgtcgaggcggccgccgccggcgacgtgcgaattgccggcctcgatcttcacctgggcgtagggatggggcatgaagtggtggtgcccggcgccacggccgagcggcggcggcggaggcttgccgtcgacgagcacgccgaactgctccgagacggcggcggcggaggaggaggagtgcgcggtgagcacggacggcggcggcgacggcgaggggttgccgtggtcgtcgtcggggaggttgacggtggtgatgtcgtggatgctggagcggcgcttgtccttgccgccggagttgagccggatgaagtacttctgcgcgtggctggccacctgcgtcggcgtccggctcgtcacgaagttgcgggagatgttcctccagtcacctctgccgtacttcttcagccccatcaagaacaacctggaacaaaaaaagcctcaccaaattcagctccaagaacacgccatggcttcatcagcttggtccaattccatcaaagattctgagagttggggggtggcttacttgtgctcctcctctgtccacggcacgcccttcttgcgctcctggtcagggccgcgcgcgcgcttgccgccgaccatgtagcaggagcgcttgaacccaaggccggcggggtcatcgccgccgtcccagtcaagagtgaacccggagccgccgccgccgccggcggcgccgtagtgggggaaggggacgaggccggcctcgatgaagcagacgtcgttctcgaggtcgtcgtagtgcgtcatgacgtcggccaccgtcttgccgggcagcagcagcgccacccgctcccacctctccgggtcgttccggtcgagcgccgccagcgcctgctcgaacaccttgttctcctcctgcgaccacgctccgccgccgccgcgccggtccggcaagaaccacccgcccgccgccgcagcctggccgacgaagtagtgcgccggcgccggcgggagcacctccatgtacgactccttcatcatctccgcgaccgcgaggcggctggctggctggccgggccaaccgaccaagatttttcacctttctttctcaaaagcgagctcttgggaggtggaagaagagggggaggggagatggggggcggcagagaagggcggtatttatggatgctacagcatcgattccggcagatgccaaagtggccacagatgattcggcctccaccttgagacgccgcttaaaagaaatcgaggcgttcgttgattggcccttggtggagtttgtggcgtctcaaccaaacaaaagcctcctcctcctcctcctcggcttctctcactcctgcgagaagaggagggcagagcacaggagaagctgagctgaggaggagcttggttggggtttcgcccgtgtgcgcgtgtgggtgttggtccaggctgggagaaataataatagggaaacttggtgcctttcctgtgcagttgcaggcaacgttgcgtttctttattggccgttgcttgccgcttttcccaatgctggaggaggaggaggagtcccggcttgtttattcgtcccttcattcattaccaatagagacgatccacttctcatgttgtgctagcattttcggttggccaattcaagattacaaatcattctatcttttatctattatattattaaaacagctaggcatcacattctttgtggaggctagaaattcccacattaatcggaaaaaaagaaaaaaaaagaaaatgagagtccaagtagaagtacaatctaagaatagctatctaaaaatagctgaaattcggaattaaaaataagcaatattgaaagaagtttctatataagaacctaatacgagattaattaaaatttgaaataaaaataaaataaaatctaaaattagaaaagaaaagaagagtccaagtagaaatacaatttaaaaatagctgaaattcggaattaaaaataagcaatattgaaataagtttcaatgtaagaacccaatacgatattaatcaaaattcgaaataaaaataaaataaaatccaaaattaaaaaagaaaaggatagtccaagtaggaatataattttaaaatagctgaaattcggaattaaaaatagggaatattaaaacaagagtccatataagaacacaatacgagattaattaaaattgggaataaaaataaaaataaaatccgaaattagcaaaaacaaaagaagagttcaaataggagtacaatttaaaattagctgaaattcgaaattgaaaataaacaatattgaaagaagaatccatataagaacccaatacgtgattaattaaaattcagaatataaaataaaataatatccaaaattagaaaaattaaaagagagttcaagtaggaatacaattttgaaacaactgaaatctatactattataaaaattgaagatgtttttaccggtattttgttacgtcatccgtgtataagttggtttttaagttcttttatttttaaaagacatatccatcatccggtgaaaaaaaagcgagaaaaaaaaaataaaaaaggagaaaataaaacttctatcgtaaagaaaacgtccgactcctccggtggaaaaaaaaaaggagagacgacggaaaaaaaatcgatacaaaaaataaaaaaaggagagaaaaatttataccgtaaaaaaaagtccgactctgactcctccggtggaaaaaaaaaagagagacgacggaaaaaaaatcaagaaaaaacaaagaaaggagaaaaagaaaacttctataaaaaaaaagaccgactgactcctaaaagaagtccgactcctccggtggaaaaaaaacagaaaaaaataagagaaaaagaacttctatgtaaaaaaagtccgactccataaaaaaagtccgactatctgtggagaaaaaaaaggcaagaaaaagtaaaaaaaaaaaaagagaaaaaaaaacttctaccgtataaaaaaaataaaaacgttcgattccttaaaaaaaagtacgactccctcgaaaaaggacttttttgtccgtaatcttctcttctacttctactattttttttataaaaaatctctactattataaaaaaattaagatgtttttgccggtactataaaaatttaagatgttctattgtcggtaatttggtacgtcatcagtgtatgagtcggtttataaatttgttcgcttttgaaaaaatatatatccttcgagttggtttttaagttcgtccgcttttggaaatataggagttgtataagaaaattcgcatgctaactttagacgaacagactcctaaccgcagcttatgattttctagaaatatatagatccaagcgaattctcacagtgaatttcatcgtaactaaaccatataacaataataagactaaaatagttgtcacccgttgcagcgcatgggcttttcttttgaaaataaaaaataaaaatattaaaagaacacaatacggtattaattaaatttgaaaaaagaattctgaaattagaaatcaaaaaataagatttcaatttggaatacaatttataaataattaaaatttatgataaaaataaagaatattgaacgaaaagaccatctaaaatacatgacgagataaattaagtaacaagcctataatggagcagagtggtggcgattgatacgatatataaaaactgttaataaaacaccaaatagaatcctaataacgagagacgataggaaggccgtgaagcaaacgaacaaaacgattgccgggacttctaaaaagtaaaaataaaaataaacctcaatgataattatattcgatttttaaaatctcaatgacaataaaaaggagaagcagcgggcggggtgtataggagtatagttgcagagctgccgacggttgacgggacttctaggaaataaaaaaatgaattccaacgatagttatgttcaatttttagaaccacaatgacaataaagagtaggcggcgtacgggccgtagaggagcatagtagcatcgtttgacaaaacttctaaaaattataaaaaatgaaacccaacaagacaataaactctaaaaactataaggttcaatttttaaaagttcggaacttctaaaaagtaaataaaaaacaatgataatcatgttcgattttaaaatctcaatgacaataaagaaaggaggcagcgggcgagccgtagagaagtacaatggcaaagccgctgacggtttggcgggacttatagaaagtaaaaatgaacccaaacgataattatgttcgatttttaaaatctcaatgacaataaagagaagagatagtggacggaccatagaggagtataatggcaacgtttgacgggacgcctagaaattataaaaacgaaacccaacttgacaaaaaaaaactctaaaaactataagatccaatttttaaaggttctaaggagaatgaatagaaatagtggtagatcgaacaggcaaataaagaaggagatgatataaggggtagcaactggtgtgacttttaaaaaactatataattagaaacacggggatgataaggtttggtctttcaaactcttaagacaatgagatagctatttaataaatgttaagtaaaaccatactaaaactatatgattttatttaggtgctagccacgcaattgcgcgggccacccagctagttttattaaaatagcttggaaatgaagcaccacgttcgctgtggggctagaaattcccacattatttggggaaaaagaaaaagaaaaggagagtccaagtagaagtacaatttcaaaatagctgaaattcggaattaaaaataatcaatattgaatgaagtttccatataataacccaatacgagattaatcaaaattcgaaataaaataaaataaaattcaaaattagaaaaggaaaggagagtccaagtaggaatacaattgaaaaatagttgaaattcggaattaaaaataagaaatattaaaagaaaagtcaatataagaacccaatacgagattaattaaaattcagaataaaaataaaaataaatctgaatttagcaaaagaaaataaagaagagttcaagtaggaatacaatttaaaattagttaaattcggaattaaaaataagcaatattgaaaaaagatccatataagaactcaatacgagattaattaaaatttcgaataaaaaatatagtaatatccaaaattagaaaaattaaaagagagttcaagtaggaatataattttgaaacaactgaaattgaaaataaaaaataaaaacattaaaagaacacaatacggttgtcaatgtttgatgccgcgattccggtatttacatagtatggggatcgttggtactaggttatacgcgaggctgaggtaaaagagacggggatgaggtttttataggttcaggcccctgaattgtcaggtaataaccctacattatgttggccgaagtcggtattgctcttattcaccataatcacaccattaaaatatttggggtagcctatctaattgttgtcaatatggcggtctgaaggtctgactcgtagtcgacaacagggtagccttcttcctcgaatccgtgccccagagattagagatagcactttcgtctctcctgacagtatccggagacaccgtaagggactagccgtgcttatccctaaagtcgatatctggcgtcttgtcttggcttatgttggcttgtatgttgtggcttctattgtgccgtgtcttctatggtgggtctctcccctctcctcctagggggccttgtatttatacccataggtgtccccttatccaagtagaactagagaaaccaatatggatataatctgagtagtccttgtcgttttcatgtagaactctggttgtctttccttatctggaactcctcctatatctacaggttgtttccatataggacatggtagaactctggttgtctttccttatctggaactcctcctatatctgcaggttgtttccatataggacatggtatgtggtgggtcctgccgagatttagtcgactactattaggtatgtggtatccataaccccgacaacggtattaaatatttttttaaaaaaatctgaaataagaaaaaaaagatttcaattaggattaaaatttataaataactaaaatttgtgataaacataaagactattgaaagaaaagaccatctaaaacacatgacgagataaattaagtaacatatctataaaggagtagagttggtggcggttgatacggcatatagaaattgttaataaaacaccaaatagaatactaatgacgattaaaaggaggacgtcaggcaggccgtaaaacaaacaagtaaggcggttgccgggacttctagaaagtaaaaaaaaacacattgataatcatattcgaattttaaaatctcaatgacaataaaaaggagaagcagcgggcggggtgtataagagtatagttgcagagccgccgacagttgacgggatttctagaaaataataaatgaattgcaacgatagttatgttcgattttttgaatcacaatgacgataaaagagtaggcggtggatgtgttgtagagggacatagtggcatcgtttgatgggacttctaaaaattatgaaaataaaactacaagtctaatttttaaaggttcggaacttctaaaaagtaaaagatacaatcataatcatgttcgattttaaaatcacaatgacaataaagaagggaggcagcgggcgagccgtagaggagtacaatggcaaaaccgctgacggttttgcgggacttctagtaaaagtaaacccaaacgataattatgttcgatttttaaaatctcaatgacaataaagagaagatatagtggacgggccgtagaggagtataatggcaacgtttgacaggacatctaaaaattataaaaacgaaacccaatgtgataataaactataaaaactataaaatctaatttttaaaggttccaaaaagaataaatagaaatagtgatagatcgagcaagcaaataaagaaggagatgacataaggggtagcaactggtgtgacttttaaaaacaatataattagaaacacgaggatgataaggtttggtctttcaaagtcttaacaatgagatagctatttaataaattttaagtaaaatcatactttaaaaaatatatgatttttttttgctagccgcgcaattgcgcgggccacccagctagttgactgaaattaagggatatatgagtttgttatcaaaaattaatcaaaccatagtttgttaatctggtatggttaaattttggcacaccttggcgttaaaaaatttagtagtgttggatgtgtttggtttggtttatagtcttaacaaagttgtagtgtttttatgagagaagacttttggtatttagtttgttaccctatcaaaatttaaaaacaccaaaatttaggccttgtttctttcagcttgggattattataatctagattattgagtcagattactataagctagattgttataatctgtagtagaataagtggttagttgtttcattcctagattattagagcctaaattattgcgtttgcaagtctaaagagggagtggggtggcatggtgggtaatttttcacccaataatctggaaaaagctcacctaaatgagcttatcagattataataagctggcctccagattataataagctacttcaataagttgtctgtttctttcagcttattttcaataatctggattaaaataatcccaagctgaaagaaacagggccttagtaggattgaaattcatacttcctccatccttatctcatcatcacgaaagaatttttaaggtcttctccaattgatcagtctgtccatttatttgtaccatagtaaatagcattgttgcacgcctcacatgcatccaactgcatttgattgcatcatgtttgcatgccccgcatgcacccttgaattaggttttattgtcttggtcttgacaccatgtacaaataggacgatgaaaagggatggagggagtaataaactaaactaagtgaaaccctgtgcatttctatggaaatttagtatgataataataaaaaaataacatccaagatagctagataacatcagattaagtaaattaatgtggtttatgataatttaaatttaaatagtatgtagaatggtgattcaaacgtaaaaagtaaggtggtatgactttatggaagaagaaaagtaggaagatagtttgtaccgtagattaatcatctaaaggctaaaaacaattgatgtgatatgacttaattagagggaaaaggagaaagataatttggatcatatattaatcatttaagcactaactaagtaaggatgaactatataagtatataggatatcataaaacataataaagatatacattgaaacattatgtgaattatgttggatgataatttaacatgtttgtatttgaaaagctcttaattataaaaactataaagatatagcatgtttgcatgatgtttaaatgtgatgattgttagtggatgatgatgtgacatctttgcatgtaagtttaaggagttagtgagagataactttaagtaggataggccagaaggtagcaaccatgggtttgccactgacgaaggcgagctcctggacgcttccttcatattccctcgtcgttggagacataagaactctagcagatgacttatggattagggtgaaaatttgtggaagttagtgaaagaaattatacattagagtatgaaaaatgagtgaatttttaacatttgtcgtgtcctttgatctttaccatgcaagttgacacatgttgtgcctctatctttccctaaattaccatcgcatatccttcttgcatccgctttccctatgtttttctcacctcttctcttctctatatatctttgtcatgaatagcatcacctccttcgctatcttccgccaacttcgtcagaacgcaccaagccaaaaacacatcattaccggattactaatacaaccatttgtactatatataacccctctattttgggaaaaataagaagcgatgtttataagagcttagcttatcgaatgtgctatattttgaaacagtccgcacaagtgtgacgtttctattgataaagcaggagaaaaatacaagtctataatcctgagagattatagatagggaaaaaaatatacatccataccacgcgtctacgtctgatcctaatgctaaatacaggacaagcacacaacacccctaaggaatgtgttttctaaacgacgcctccaagaaggaaatgacaccaatagcaccgccaccgcccgtggaatgggctatatgataatggtaactcaattggacccatggtctccagtaacgctgatctatactcttcaactttgtcgttcaagccgttgcaaaattgggcaagaatcatccttagcggacacatgaatcatgctatcactgtcttactgatcgaaggtgtgacattcaattgaaattgctccaatcaacgtagcatagtcacattttttgcgcaaaattttacaggcgtacgtgcatgttttacctttgttttaatagaagattctaagtggacgtgtgttgtgtgttgtgtgtttcacttttatgttaatgcttgctcttgctgaaaacaaatgctatcactttattgaataaaggactaccttttccaaaacggtctgaatgaaggacgccaaaattctttgatttgcttcttaattctttgcacaagcctaaagctatttgaaatcagtggaagcaattatttatgttactttagtttccaattcagctctatctattctcaaaacaatttaggttgcgttcagaactacaagctcccatcatatgttctattgtttttcgttaacatacttctcaagttgcaaaaagaatatatacaaaagtttcataaagaattatattaatcaaatttttcaagtttttaactaatcatgcgctaatgaactatctcgttttatgtacacggggagaagatcccaatcccttcatccgaacacacgttaacatctttattcctctatgtcatctcgtgttgcatcccaattcaccttaattaacctctttattcctctatgtcatcttttgtttcagagggtcgtcttgtcaaatctcgggataactataggccaaatttctagccaaccgctactagaataacgaagatctatgccaatttcctctatattataaagtgttggattgatggttaagattaccaaaccacaatttggacaaactatagcttgaaaaaaaaaggagggtatatatgaccacatttcatgcagagttagctagccattaaaatgagttctaatatgcagagctatatgaaatttagaaaaatgaaaaggactccaagaaaatgtaagaaatgagtctttaaataaaacacccctagtcttaatttgagcatgatattctgaacctatcatcatattatagagcatggtgtttcatagtttcatactctctccgccacttatattttgggacggagggagttggacctatctatgtaattttttgacctactttattttaattaaataaattaaaatttattttaaatttgtacaaacatagtttatctatgtctatgaaaacttagtttacctagtttcaattaaaatgggcgaatctttacccacggatcgacctgagccatccctaccttgcatctatcgcgggaaggtgttgaaaaaacgttcaaacggcatctcacgtttggtggcccagttcacgtgggggaggaggaggaggtcctttttacaacgaatccttgtgttgcaacttgcaagtcctgtagttcacttatgcctctacagtgcaacagaaagggaaaacgaaagcggaaaaaagagcagagggaggcacgcaccaaactggggggctacagcaacgtacttcgtgccccgtaaataccccatacgaacgatgcgtaaagacctcgccaatcacatgtctatgctacctagtcttcctgaatcctgaccacacatacgagagagcagatagcgccgcgcgtgctcaatttacaatggtgctgccatgccttctctatgtgttttggtgcttaaacagagtccggtgagacgccgagtttgttatgcgagggggagagaggtacaaagagaaagaaaagatacaataggaaggagactttctcactctctccttcctctatcgcaatataaatacaacgtagcgtaaatgtaatacattttaagactataaatctgaacggtttagatccgtagtctacaatatatcccatatatactaggttacatttatattgaaatagtgagggtaatagagaagagtagaataatagagaagtcaagttatctgatgtaaagctgatgttacaactagtacatataaaaatatgttctgtatacatatatactctaatatcaataaataaacctaatatattctttgtgtgttttgtgtgcactctgttccctttctcttgcaagggcggagccaccatgattcctgggtattcccggaaatacccaacttttttttatcaaaaaacaagtatacttctagtatatacacatgtatacatattagtatacctaaatcctcaactctttgatccaaacacagctcaaccggtctcttgcgatgcctccaaccaactcaacccactccgtcatgacccatcagatatcagttgactcacttagccatcactcttccagacggccccctctcgctctccctccgtgacccacccctccctggctcggctccctcgcaccactccccatttgcaaaccctaggtggcggcgcggcgagacggcaaccggcggcgggagctggactgtgctaccgcggagggggaggccattgccgcggcgggcggcgggcggcgcccgacactccgccaaggtaaggcggtcaggtcggttgggtagccggtggccacgaggggcaagggcggccaacggcttagtgcttagacgggaatacccaactttgaaatcctgtctccaccactattctcttgatgtaggtctataccgttaaaactcctaggcaatggtgtcgagcggacgattgtagaagagccagcttcacttattagccttgctctaactggagaagatgagaaccttttcggtaaccacttgcacgtatcctaaatcacatctgaaaattttataatacccctattacaaataaatttatttatcaccaatctcacacatatcaagtcatgaaaagcaaaatgactaagatgaactttactttactaaatcataatgtaattgtttcttgctgcatttatcttccactttcataaagataaatcataatgattgcatgaaagatgaatttattttgggcaaacaaaaggggcaaataaacctgttttggacagagatgatattttggtaactttcatgcctctttactttggagagatattgcgttcatttcgtgtgattctagctagggttgttttaggtgcacaccatgtaattgcacgtttaaaatatgctgtgcatacattgatgatttgtgtttataagggaccaacaaaattaagctgatagagaggttgtcaactgtatacggaatatatatgtatggtacttgctgataaagttaattataagatcgtgtaagatgcgctacattagatatagcttaaacgaaaacttttttttatagaatataaatttggcgtgggctggtctgcctgttagcttatcaaccatggtaaaaatataaattttaaaaattatttttgtgattttttatcatagtttatcttttacatcgactttaaaccgctaaatataacacatatagttttatctataaattctatatctctactattataaaaattaaaaatgtttccgctggattttcggtacgtcatccatgtttgagtggatttttgagttggttatatatcgtctgtatccaattcgacgtgagtctaaaataagtattatacaattctatcctggcacaacccctccctgtcccagcccaacccaacccaaccggtccacaccatctcacgcgcctccactcggccccgcgcgcgcccctctcctgatcaacgtcttttttttctcacttttttctttttctccctttctttccaatatcctctcttttctgtttttttccctcatttttctctcatcataaatatttttttatacgacaagtttgctcttttgcaaatgcttttcatctacagtaaaaaaacatttactaatagaataatcaaagtttcaatatttggtccatgatgtatagagaaatggagtcactcctgttgttccccatcaaaaaatgtatagaaaaatgcacatgcgtcaacttatggaatagtcatccgatcgatttgtaaggctatgtaaatgtttacatgaggaattcttcgtgtaatgacgcaagaagcgagcgcaaccagtttcaatgttatatatgatttctgactttgttttgctattgttttgttggcctttttttggtttgtcatttaaattgacagagtttttatcaaattatgaaaattgtcttcacatgttgcaacatacaaacatttttaatagtatgtgtaaagtttatccccactaagtatagttaatgatatttctctctactctcagtaagccacatcatctcaattatttttagcccttggatgactgatctatagtccaaattgtcttactgcttttcttcacttataaagtcatatcatcttagttttgtctttggatgattaatttatattatcttctttctttttcttctcttattgagtcaaatcaccgtagtttaacttttgaacaatcaatctatatatgattttaattattataaaccgcataaccttacttgtttataatttttttcgatagttatcgaggagagatcgtcaatagcggggaatcgtgagaccccccatttgtgagttcggccgggggcggaggctcatctcttagaaatcactcgctcgtccctaggatcaccggcaagcttgcacgcaatcggattatacaggttcgggccgctatggagcgtaacaccctactcctgtgtttgggattatggatgagttttacaaagatttcttcactctaaaaagcgcactcgcttcctccctcctggagttttggttttttctccctctctcccctttttctttcttttttttcttgtctcagtgggcagggtcctccttttatagctcaaggggataccacatgcgccgcctctacctaccctctatcggagggggatcccaattcacttttcctgggctttaaaccgtgccttctccccgaagctaagcaacaaccgattctcgagtggaaccaggcgccgccccccgcctgacacgggggacaaccctgtcattccctcataaatgaacgatgacctgtgacagcccttcctcgagtgacgctcggacgtgacgggtcatacccacccccactctgccgggtacaagggtgacgtgaggacatggttgccctatccgtcggatgtgacggtgccaggccggtcacagaccggtcacatccgttggatagaggttagctaggcgcgccgcacgtctgcccttaccgcattaaatgcggtgagggacagttggggcgtcgcacatttatagctgttcagcctgtgctctcgctctttccctccgccgcgtggcagccgggtgagggcctcggggcgaagacgcgggatagcccgagggggtgacgccatgccccgaggccccccccctcccccccgcggcttccacgactcgcgtgacgcgcgaatggggctaacttgcagagtcacgtggccggaaggaaagtaattcccctctacttcacatacccccgggaccatatctccgacagtagcccccggtgctatatcaggtattgatttcctgagatcgttctgacatggcgcctcacgactcctcgagctggggttgtgggcccggcaggggatccaaaaggatatcaccgcgtggccaggttggcgtgccaaccataacagcagtttgaccgccattgaccgtgctcatgatgaagatacttgaggcgcgataatcccgatgggtcagtcagaccacgcctcgattctcccgctcgctactcgtgtggcggtagtggtgatggtttgctcaacctgcgctcatagccattgtgcactccacctcgaatgcgccactgacagacgcactaaaggcgggaacggatacaacgggcgacatgatgattgggcgcaagatgcgaagagacaaatgcgggcgcgagaatcgtgggggcaagtatgggagcgcgaaacgaggaggcaagtgcggatgaagcgaggataaaagggggcggaggcagagactctgcccccttcctttcgccaaccgcccactcgtcatttcgcttctcgaaccctaacattctcgccaccttatactgtctcgcgctccacgctctccgccacttctccgccggttgccatggcccaagacaccgatgacgcagtgcttccttcctcctgcatcacagcagacaggcaccttagccttcccttcaagatcatgccggacggtgccatcatgcgggcgggagagtcgcggccgcggccgcgatatccggagcgatccgtgcacctcttgtccttcgccatgacgggcttgattccgccgttctccagattcttccatgaggttctggatttctacgaaattcatgccttgcatctcgcacccaatgccgtgatgacgctggccatcttcgcgcatttgtacgagatgttcattggggtgcgaccgacgatgcggttgttccaggccttcttcattccacagctgttgcaaggcgcggtggtggggggatgctacttccaaccccggccaggcacagcgggtcagtacatcgagagccatctccgcaagaaatgggaggactggaagaaggattggttctacaccgcgttgctggaccatccgcgacttcgagttcccgctggccctcctgaaaggtccgctgcatggctggcgacttcggagctgggcgaggaatacgacgcggtgtgggatcgccttaggggcctgcggagcctgggtctcacgggggcgatggtctttggcgattacttccgccgccgcatcgcacctcttcaggaatgatcccgtggagcgtgggaatacattggtcccaacgaccccatgcggacgcatgtgggcgagcgctaggactggggtgcggaggacgcgaagatggtgattcggcgagtgctgggcctagactctgccgagccaacactaatcccagatgggattcttcccctctgctacgaccgcgaccgggagagcattctggccgtgatgtctgccgtcggcgccggtaggagccggtccagccgaggcggcgccagcagtagcgtcgtcggcacgggtggcggtggtgcgaccacgggcgggagccgggccggcggtacaggcggcggtggctcaagggcgcctggatcgagccacggacccggagacgattccgcctgtgacccaaaggggaaacggaaggtggcctattcccggccgccctctccactcatgcctttaattcctttttgctgtgtgcccgtagcaggcacttcttgtatttaggccattgtaccatcctatcttgttctgcaactgaaacttctttaacccctcttactcttttaccttttccattggatgcctgtgacatagagagaagaaaaaaccagggcaaaaggggataattagactgcctgcgattgacatgtcgttttgaccccccccctcgggcttgttctagcgagaagataaatccgcgctcggtccatggaacctaagtggtgataggcaagaccatcgccctgctggagccgcccagcgggactggccagaccgaggctgcgacgaccgggggtcggggatgaccgtatgtaggcccttccgatcccccggggttcggcacaacccggggcgcggcccgcgctcgtgctccctttcggcgattttcaggccgccttacggcacttagggtttagagtaaacacggattatcccttgaaccgggacaagccagaggaaggggagaaaaacggtgtccacaaaaaagtagaaaaattcattgcttgtaaaaggatacacagtggtagcccccggccagtcccgcacaaaccgaggggttgtgcgggggctggcccgtgctccaggaaagcaaaaaatctcgatgtcatggatagaaacgacggaggtgctcgatattccaggggttgggcagctctgtgccgtcctccatggttaaccgaacggagcctggccgaggcactttgatcactttgtatggcccttcccacattggcgagagcttgctcagccccaggcgcgactgaacgcggcgtaggacgaggtcgccaacttgtagtgatcgggcccggacgtggcgctgatggtagcgtcgcaggctttgttgatagcgcgcggcacgcaaggccgctccccttctctgttcttcaagataatcgagatcgtcgcggcaaaggtcatcctggttggcctcgttgtacaacacgacacgaggcgacccgagggaaagctcggagggtaggaccgcttcggcgccgtacaccaagaaaaatggtgtttcgcccgtggcgcggcttggagtggtccgattttcccacaacacggtgggcaactcctcgagccatgaatccccgtgcttcttcaggacgttgtaagtcttggtcttgagtcctttgaggatttcggcgttggctcgctcgacttggccgttgctcttggggtgggcgggtgaggcaaagcacaatttgattcccatgtcgtcacagtaatcgccaaacagctcactggtgaactgggtaccgttgtctgtaatgatacagttgggcactccgaatcgagacgtgatgcccttgatgaacttaagagcagaatgcttgtcgattttgacaactgggtaggccacgggccacttggtgaatttgtcgatggcgacgtacaagtgctgatacctgcctcaagccgccttgaatggcccaaggatgtccagcccccaaactgcgaaaggccaagatagtgggatgacctgtaaggcttgggccggctggtgggtctgcttggcgtggaactggcgtgccttgcaccgttggacccattcttgggcatcttgtaatgcagttggccaataaaaaccttgccggaaggccttttcgactaaagttcgtgaggccgaatgggctccgcactcaccctgatgagagtcggctatgagctcgatgccctgctctcgagaaatacacttcaagagtatcccgttggcggcacgctggtatagggtcccttctataaggacatactgtttggagatgcgcgcgagcttttcagcttctgcgcgatcctcaggatgagtattgccttcgagatacgcccggatgtcggtcatccacacgacctgatgaggggggtcagggttgaccccctcgggccccgaggggcgcgggtcgcccggagtcgggtcggtgggcgtgtcattggggtccctcaaagggctcggtcgcgccgatggttgtgcgagcctttcctcgaaggtccctggggggagtggggctcgtgccgacgcaacacgcgacaactcgtcagcaattgtgttgtcgcgccggggcacgtgccggagctcaagtccatcgaagtggcgttccatgcgccgtacctcgtggacgtacgcttccatttgcgagtcggtgcactgatactctttggatacttgatttatgaccagctgggagtctcccaagaccaggagacggcggatgcccattccggccgtagccctcaatcccgcgaggagcccttcatattctgccatgttgttcgtggctcggaagtcgagacaaacgacgtatttgaggacatccccgtttggcgaggtcagcgtgactccggcacctgcaccttgaaagttgagggagccgtcaaaatgcataacctagtgcccgccgcgaatgtcggcgtttggatcctcttcttctccgggaagggaaaaagggacattggacggaacaggttcgtccatcggggtccattccgcgatgaagtcagccaggatttgacttttgatcgcgtgccgcggttcgaactgcaaaccgaactcagccagctcgatggcccattttaccactcgtccaatacccttgtcacaccctaaaaattcaaaatatataaattgttgtttaattggaacttttagaatttattttaaaagcctagaagagaagatctaattttaattaataaattccaatataaaatggggccagataaaatttcattaaatactttgcttaattctataattcctagatttttctgggatttatttgagctaaggaagtatttttaataaatggaattgcatttcataaataatttaaattgaaaaaggttttaaaaagtcttcttttggctttgggccgaaagtcggcccaaaacccttctctctctcctcggcccagtccggcccagttcaccgccgcgcgcgcgcgtccgcccgctgacaggtggggtcgtcgtcaacctccggccgccgcagcccgaaaccctagtttcgcgccgccgccgtttccttccaaaatcctgccgctcctttccgtttccggtgaaattgattgaggggaaacaatctttgggatctcctctaccttttcccctttggaaacgtcggctaattcgttttggaagttcgtggaatcaagttcgattcggatcggtctctttccttcaaaccccgatctttccttcccgtcgccggccgccgtgggccttcgccgtcgcctcctagcccctttaaaaggttccccgagctctcctctacccgtcgccaccttcgccttcgtctctcgtcgtccgtagtgccctagcgccgtgtagcttcgagccgccgtcgtcgccgccgctccagccgtgcgccgccgtcgtttcagccgtcgccgtcgctcgggaaggtcgccgtagtgatcgtcaagtcgccgccgtcctcgtccgccgcttcgccgccgccgaagaccgccggagcaccgccgtcaccgccgacccgatctccgccgccgtttcaacctcatcgccgtcgccgtccgttgctcttccgccgcctttttggtcgccggtgagttcgccgcgtcgccctctacccgttggtgccctccgttcgtgccgtagtgcagccgttcgccggcgagcatgcgcgcccgagccgccgagccgccgtcgccggtggtgacgtcatcgccgacgtcatcgtcgcccttccccgtgagccggtcgtggaccgttcgatctcggccgtccgttttggatcaagtcgatctcggccgtccgttcgtgtgaaccgccgccgtgcgcccggtccaccgaaaccctagcccgctgacgcaataaatctctttttccttttcaaaaataattcattattgcgtcataattcaattaaaatcaatataagtgttttaatccgatttaatcttcaaaaattcataactaattcatcttagctccgatttagttggttcaagtctctaaatttttctaaaattgagatctacatgttaaaaatatccacatgtactgttcatgcttgtttatgtgctgttttggtgattttgctcttttctgtttagattccgtcgtttccggagagtccgttttcgcaggagaagagtttgaagagttccaaggccagcaaggcaagtcacacagatcccaaacaaccctttgagcatgttgatcccgtttaaagctattgtttctattcaactattgcatttattttcgaatgtcattgggtggaattaacctattctttgttatagcccttttgttcttggttactttattccttgataccttgggttattataacttgactagttgagctttatatattggttcagctagatattagatgtgattgcttatccatgcttagaaacattagcacactattgggataacttatgactcactattattttaatgatggcttaatgattgttcacgatggtcaatcgtgactggttaattaattacttgccaactaaaacctgataatggtgggttgtgagcacatggttttgatggtcgtgctcatgacaattaaggaccggttcacgagtttcggttgtgaaacattaaccgtgccaaccacaagccagcgtgggcaacggctttatcttttgtatagcatagttcattgcggagcaccagactgagaagtggcggagataagcccacggaggtcgctggggagtccatgccttgtttataagggggtgattatgatccaggaaaggtgcgctgtagtggattgtgttatgcaaggggtattgtcacaactcctttccgaggtaccgtggtggtattgaggcacatggtgacatgatgtggggttgtgtcttgtgggtacagtggtacacctctgatcagagtaaaactattcgaatagccgtgcccgcggttatgggcgggtctaacaatgtctttcgtgattagtctcacacttctcaccatagtaaatgatgctataattggtaataatttgattagctcctggtttggaatggtatattcctggtttggagatagaactgtgcagccgggatggttgttcagaatggttgggcctatgcaacagggtatgttgtatagcgttgggttaatattgtttaatacttaactgttttattaaattctcaaatgtttgctgaatgctgcttttgcaaaaagatgaaaccctactatgccatcctttgttatcctgtgcacttgcatatttgctgtgtggcttgctgagtatgtcatatactcaccttgcaatcattcatcagaggaagagttctacaatgatgctgatggtgtggaggattaggtgtagccttggtcaagctgcttgtggagtggagccgtctgcgccgtttattttattttccgctgcttagatctttattgattgagaggaactatctacctctgtaatgacattttattcgcctattaattagagtaataattgtactctattatcaatttgttattgtgtgcctcggctgattcctggacgagggttcacacacatgtaagcgtttggaattttagatagaaattccgggcgtgacaaccctctcggttgtgcaaaatttggccaacagggtatgtcgtcactacggaaacccgatgcgcttggaagtaatgacgcaacttccttgaggccattaagacggcgtaaagcattttctgggcctgcgaataccgggttttcgcatctcgaagtgccttgctaacaaagtagacaggccgctgcacctttcggcgggaccaattcgtgttgtcaggggctgatgactcggagcgcgcctgttcggaggtctcggggggatcccggactgcctcaggatgatgaggctcggggccacctgccaaagccaccgctcctcccttgggggcctcagggtcctcccgggggctggaaactttgggcgctaggccttcgggggatgagaggccattgcaagccgaaggggccacccgttcgccttcctcacgctcaactactaaggtggcactcaccacatggggggtcgcggccaagtagagtagcaatggttcctccggtcccagggccaccaagatgggggggaagtgaggtaagctttcagttgattgagagcttgctcagcttcctccgtccatacaaatggcccggagcgcttgaggagcttgaataggggcagtgccctctcacccagcctcgatataaatcgctcagggcggccatgcatccagtgacgcactgcacatccctaagcttgctgggggggcgcatcctctctatcgcgcgtattttctcaggattcgcttctatgcctcgggaagagacaagaaaatcgagaagtttgcccgccggcacgccgaacacacacttatcggggttcagctttacgcgcgtggacctaagactatcgaaagtttcggccagatcctgtagcaacgtgtcctggtggtgcgtctttaccaccagatcatcgacatatgcctctacattgtgccctatctgattacttaaggtaatacgagtcatgcgctgaaaagtagggcctgcattcttcaacctaaaaggcatagttgtataacaaaaggtgcccacaggagtaataaaggcggtttttcctcatctttcctagccatacgaatctgatggtaccctgagtatgcttctaaaaagcacaaaaggttgcaccccgcagtggagtcgattatttgatctatgcgtggtagagggaagggatctttggggcatgccttgttgaggtcggtgtagtcgatgcacattcgtagcttgccgttggtcttcgggacgaccaccgggttcgccagccactccggatggatcacctcgcgaatgaaatcagcctccaggagccgcgccacttcctccctgatgaaggcctgccgctccggggcttgacgccgtactttctgccggacaggacgcgcatctggccgcacggcaaggcggtgctcgatcacctccctggggaccccgggcatatctgacggcttccatgcgaaaacgtcagaattcgcccgcaggaaggagacgagcgcgccttcctatttggcggtcttggacggatcgtcgccaagggggatttccttgatgggcacctcgtcagccgaggtgaggcgcttcttggaagcgcgggacgcagaggcttctgggcctgcggctccgtggccaccgccaagttgtctgcgcgctgctccgcgcaggcgagggcgaccttgacatcactaaggacggtgatgggaccagcaggacccagcatcttcatctggaggtaggcgtagtgggtggcgaccatgaacttcaccaacgcaggtctgcccagaactgcattgtagggcagattgaggtccgccacatcgaagtcgatccgctcggtgtggaagttggtggagtcaccgaaggtcaccggaagctctacatggccaagcggccatgtgtgcctcagagtaacgccattgattgggagcgacggctggagcttcatccccggggccttgagcgcatcaaaggcagccggggagatgatgctcagactgcccccccatccaccagcacacgtttcatcttgacattgtggatgctcggggagaccaccagggccaactgcctcccccccccccgagcaacaaccgtcggatggtcgctctggtcgaatgtgagctttacttccgaccagcgcgccttccggaccgcctcatgcgtgggaacaacggccagaagctcccgcttcatggccttgaagcttcggcgagaggcgtgagcgcaagcccccccgtcgagcgtggcgacggtcccctgaggtatctggaaatccagatcctcaccgtctccaccatcatcggcggggcccttgtccttggcctcccctcgccggtcaccggttgaggtcgcgggggctttgccctcccgtcgaccctgccagttttcctcatcagcctttcggaaccgctcggccaaattcttgaccgagcggcagtcggcgagactgtggcggtaagtgttgtgtaccgagcaccacttatccgccgaccggccctcgccggagggaacagcggggctcggcttatcgccggtggcctttcctttgcgcggggcccgcgtgggcccgtctgctgcaaggacatggtcctcgtcatcggagcgggctggtttccttttgcctctcctatctcgccgcttagagcggggggcagattcgggggtagccgcagccgccgcaccggtgccgggggagttccaggcccatgcctcctccttccgggccaccttgtccgccagctcgaagagctcggcagtggtcttgggctccttggaggcaatcttctccagcatgcgattatgtcacacgccgttccggaatgcatatacaactgcgtgggctagaatgcacggaatagtgttgcggacctgacagaagcgctgtatatacgaacggagggactcatcatccttctgccgtacagcgtgtaggtccgcctcttcccccgggcggggatatgtgccctggaagttcgtaatgaactgctggcacagatcctcccaggagtgaatggagccggggggctgggtcatcaaccagccacgcgcctgacccttgagggctatgggaaagtaattcgccatgacccggtcgtcacccccttccgccacgataaccgtggtgtagatctggaggaactcggagggattgatgctaccatcatacttctccgtaaggttggggcgaaacttcgggggccaccgaacattccgaagactcgccacaaaggccctacaacccgtccccccaggggtgagtgtggggggagggccgccccatgaagaggagcgtggcgctccagatgaagaggcgccttccccgatacgggcagctcggcgctcgtctcggcgtcgctcgatgttgattcgagcgtcctgcgtcccgtagaggccgtcatgatgcctccggctttctgaggcccctgacgatgttagaaccgtggatcgcctcgagatcgtggccgattgacaagcccttcttcttgccgacgaggagagggtgaccgaggtacgcgacgtaccagcggcagcggatcggccactcgtggctaactgccgctgggcagtagtgaccaagttggccacgtcgtccagccaacgcagaacaggagtctccggctccgggttcaccgggggatgccgcagaagggcacctgctgcctgaagcgcgccttggggcgaaccgccgtctccatagtcgagacggcggcgtgtcccggcgcgtcgcggcctccctccgccagggggcggagaaagagccgaatcacccgaacgagtgagatcctccctccgcgaaggttcgcggcggggaggagttggagaaccatggcgatggtgacgaggacctcggctcgcgccggaattcccactcccggatggggtgggagtaaacgccaccgcctcctcctctacttccaggacctcaaccatggtcggctaaggcctggagaaaattgggacgaaagaaagcgacttcctctcggaatgcgcaggcgccccctacctggcgcgccagctgttgaggagagatcctcaatagcggggaatcgtgagaccccccatttgtgagttcggctaggggcggaggctcatctcttggaaatcactcactcgtccctaggatcaccggcaagcttgcacgcaatcggattagacaggttcgggctgctatagagcgtaacaccctactcctgtgtttgggattatggatgagttttacaaagatttcttcactctagaaagcgcactcgcttcctccctcctggagtttaggttttttctccctctctcccctttttctttcttttttttcttgtctcagtgggcagggtcctccttttatagctcaaggggataccacatgcgccgcctctacctaccctctatcggagggggatcccaattcacttttcctgggctttaaaccgtgccttctccccgaagctaagcaacaaccggttctcgagtggaaccaggcgccgccccccgcctgacacgggggacagccctgtcatttcctcataaatgaacgatgacctgtgacagcccttcctcgagtgacgctcggacgtgacgggtcatacccacccccactccgccgggtacaagggcgacgtgaggacatggttgccctatccatcggatgtgacggtgccaggccggttacagaccggtcacatccgttggacagaggttagctaggcgcgccgcacgtctgcccttaccgcattaaatgcggtgagggacagttggggcatcgcacatttatggctgttcagcctgtgctctccctctttctctccgccgcgtggcagccgggtgagagcctcggggcgaagacgcgggatagcccgagggggtgacgccatgcnnngagncccccccccccccccccccccggcggcttccacgactcgcgtgccgcgcgaatggggctaacttgcagagtcacgtggccggagggaaagtaattcccctctaattcacatacccccgggtccatatctccgacaatagtagattagaaataaaaattatacagggcatgttcggctgcactacagcgagctgcgacagagccgccttgcacagtattttgtgtagcacagctgtgtagcaggcttgctgccgctgtaacgtgctgccgaatacagccacaaagtgctattttacaatattatttctattaatatctatcctacatgaaaaacatgtattggtggtggttgttctccaccactagcgcaaacctgacagtgagccctttaagtgggctagcctcccactctcccatagtactgtcatttcgctctctgttttatttaaaagaaaaaaaatcagtgtctatattcgtggtcttaagtgatataggtcgtgggcataaatttgacccattgcattatatcaatgacatgtgactaatggatggaaaaccacaaaaatcataaaagtgttgttcgctttggtgtactaggattgataaccctttcttccataagaaaatttgttgcaacgcatgggctatttgttgtcatataaaactttcgaagcaaaacgctggatttttttctagttactgattattttacctttagtttatgcgttcattttgacacggcttatgagccgtacttcaaactgataataactagcactggctagtactactattttccttagattcccagccaagaggatgccatcgcgtgatagcatacatagcatggtcctcctccctcaatcagattcttggaatacttgcattgcatccaagtttcatcggtgcggccttcttgtctggtcagaaactaacaccctagataaagggctagctaaaacctaagcgcgagaccgcgagagcgaaccaaagctatgctagccattattgcgacttggcaggatttttgacatcttggttatttcagaaatcatattttataaataaaacctctataaaacttaatgaatatggctctctacctcgattctatagatatgctagcgctgggatgggatgtctcggtgccgcatacactagtgcgacattgaacctcaacgccgatgttttgacgctgacctctcctacttaatgacaactctcattttttaaatttaaatactattgatttgctttcatattttggaaaaatcgaataaatcaatgtatcgtactttattggtttgtttatactactttagaaaaattctaatggtccacctacttctgttgtattgtagtttttacatattatcatcttctcaatatcgatatgctatcatattttagaaaaactgaacaaatcaatgtatcttaattcatttctgctagtttattttatttataaaaacttaatccatgaggagtacgtaggttcctccctcttccccatacataaatcctattaatttgctgtcaaattttgtaaaacaattacaaataatgtatcatcatatcattcaatttaccctatttgttttcttaaaatttgatagcaaattagtaggatttaggaatgataaggagggagggagccacatcctcctccaagattaagatttaatagaagtaaattagtagaaaatgaattaggatatattgatttatttagtttttcaaaaatatgacagtaaattaatttgatttggtgccgaaacccagcgtgtatttagcgccaaggcatctaacgacgtagggatgcatacaatatctttttaagctaatctatttctataaaatatgtttttaaaaggactaaaatgtcaaaaatccagacaacttgcggcctctccttcctttcactcttccactgcccaaaccgaaagttcccttggaccgtgtggcaccggtgcttttcggcgatgccactctccgttgtgcccaccggccggcgtcatcctcgcctccggctttttctctcccggcagacggcgttcgcttgtaatggacgcacacacatcaccctgacctcattccgatgtgtccatccatccaatattctcgcgccgacccttgtcatgctcggaggaaagcaaagtcccattcgatactcttctaaccaaactggacaatcatgagtcacaaagtttgtaactaaagattagttagtgtgctctgtcagttggtaactacaggagtgctcactgctttatgtgcagctagccagctaacatggcagcagcagcaccagtgccagtagatctctgttaggtgcttatagcaatagcagtgtgtctgtgagaattgtcggatctcacatgccacctagatcaagaacgtgttaagctacatgattcataatgcaagttacttgtagtaggtcctaccagtaccacatttttcacttttcatctctctcatctctccctttccccaccggtaccggaggaagtcaaggtcggagagagcaagacgccgagcggagtggcccaagcagcaattgtaccgggctaagtggcggtggctagcagggtggccctagcattgacggcactgggtggagcagcggcagggcgaacatcctcctctctttcccttatcctcttccccttccggtctcgtcctttggctacaccgagcccacgcagtggcggcagtcgaggagctccttagcagcacagccacgtggggcagatcgagctgatgcccgccctccctccccaactctggccaccaccatctgtgtgtgccataatggtcacaaccgacgagctagggacatatctggcaatgtcggcgtccccgctcctctcctctctccagtctcatcccttggctaccctgagcccacacggcggtggcagcttccttgagcccacgcggtgacaacaatcttctcaagcccacgtggcggatttggccagagaggtgatccagacgatgcctcagctcattggtggcaacctccccaagcccacttgggggatctagttggaaaagtggtctagccagcggcagcagcctccccgagtacccaatcgatgccgccgttgttttcggaagcttggccgacggcagcagcctcggcaatggcatcgttgttttcctgcggctcgatagtgacggataaagctgtggcttcatacccgcttcctatatctagcttgctttttatgacaaggccggccgaagaacgggtgtttctttggacgcgtgagcttcacgtgtgtagtgctagaggcaaatgtggcagcgaatctccaacgtgtcatgctcaagctgaatgccatgtcgggcgcattttgaacgcccttagactgtctctggtaaaggtggtacatatcttctactttctttatttttatgagcacgtttatcgaagcgatgaacaatatatttatttttaaaaaaatctgtagaaaagttacttaaaaattatattaacctaattttcaagttaatttatagcttgtgtacttaactaatcatacgtaactagcacataatcttcccatccgaactcattctgtctgcgttctttgcctaaaggaaaatttctcgtacacgcaaacggagaaagctgcacataattaattaaatattaactattataaacttaaaaaataattttatttttaaaaaatcttctattgagattttgttaaaaaataaacaatttaaccatttgaaaaacgttttaatggaaaatgtgaaagtttaagtttagaaccgaagaaaaagacagggcatctaggctaacacgcaaacatttgtactgatggctggttacactcggctactggcacatggattaatgttttttttccttcttaactttttaatgaaagtattagaagaattgatcattgatgtgaaccgtagttgattttgtgtctgtgtgtgtgtgtgggggtggggggggggtgcattctgtgaaatgcattacgtgccgagcgatggatggtgcgacggagaattggatccttcgctgtcacgcccccactttcgccgtcccgttcgagacgtgacaacctactacccaccttcctcgcggccttacacaaacacgcacacactgacaccgcgacacgcacaaatgtctctgtctaatggatcgtagctgtgcttcctatatatatatatatatatatatatatatatatatatatacagtacgagcgtgtcttgtaccgtttcgtactctctttcttctcttttattcgtcgcacacgtctacaagagagtatccaaaagcttacgcagaagaacttaatatactcgagattaccgtgataatacaattattagagatgtgtagttttaacctgaggtctcgtgttcaatctctatacactcacaattttaactcaaaatctctctcttattttaattcaatatacaacgtgcgtatttgatatttatatactatagttgattgaattctaaatagctgactttccgcccaacacactgattctatttttgttttacatttttctgtataaaccttcacttttatattaactagcatgattgcgcggctagcatcattatattttctctcatataatagtatatatggtttctcaatgtattattcaaatatattaaaatgataacataattttaaattttgtactaactttacgaaactactaatgcgtaatattcgtattgtattttatataggtgttagttattgattatttttaatatcaaattttagttatttgtaaattatatttctatatggactctagactcctctttcaatattatttttaatttcgagttttcgttatctgtaaattatatttctatatagactctagtctctaggctcttcttccaatatttttcatttttaattctgattttttattatttctaattgtatttctatgtggactctaaactcatctttcaatattctttaatttttaatttttaatttcagttacttctaaattgtattcctatattgactttagattcgtcttcccatgttttttaattttgaattttagttatttgtaaattatatttttatacggactctaaacactacttttaattttattatgtgtattccgaattttagttagttttaaattcctatatggagtctatactctacttctaatattccttatttttaattccaaatttcgctatttcctaattgtatttttatatggactctgtttttctttttctccaattaatatgagaatttctagaccgtgagagcgaacatagaggctcatttttctatacctttaataagttaatagattaatcttgtatggtgtatttccatctgaatttttttttgtctccgtcattggcaaaactagagtcattggatcattgctactaatcgccgacagtatttgttacgtttttttttcttttcatcacatttgactttgaaccgcaaataagtagtaaaagtgaaaaattacaccctaaaattatttttcgtctcatacgtaataggcacacgtctttggttaagccatagctcaaaaattgcctaccatcttttgcacaatatgcggtgttagagtctgtttggatgggactaaaaatttttaatccatatcacatcggatgttggacacactaattagaagtattaaatgtagactattgacaaaactcattccataaccctggactattgactcgctcttacaactttcaagctggattttcttttttttttctttattacattgtttcatatatggctgactataaacgtaacgcttattaacgataaaaatatattttagggtaaaacttatatatatatatatatatatatatatatatatatatatatatatatgtgtgtgtgtgtgtgtgtgtgtgtgtgtgtgtgtgtgtgtgtgtgtgtgtgtgtgtgtgtgtgtgtgtgtgtgtgtgtgtgtgtgtgtgtgtgtgtgtgtgtgtgtgtgttcttaactatgtactaccctcgttctagaatataaaaagttttagagttggacacagctattaagaaagtgagtagagttagatatggagagattgtaattggttgagaagtggaggtaagtgaaaaaagtgaatggtggagagttgtaattggttggtaaacaaatattggtggagaagttgttatattttgggataaattctaaatgctaaaattgttatattttggacggagggattactaaacaaccaataaataaactaccatagaaaaatcaaaattaactctaaacattacaaggcagtcatggtgttagaatttgtatatggaatgcatatacaaagtcaattatagtgtaggatttggagttgttctatgtgtttggataaagttagtcgaatatgtcataggctctctctgaaatacagtggtaccaccggttgtaactgcacgacgactgcaacaactggtcggcagcctagttggtcgatgatagtggataccttgatatactgtagctatgttggattagaaaggagtgttttcataatctgtgtttcaaggatgttctccctccgttcaaataaacgaatctaggaatgtgacactatgtccagattcgatgtactagaaaatatcatatccagtcctatgttgattttttatgggacggaggaagtaggttttgactaaacatcgctgacaaatatcatgatttgttgtcttcatcacttcaaggtcttctatggcatactccctccgtactcgtaaaggaagtcgttttggacagcgacacggtctccaaaacataactttaacttcttgtttctataaaaatatttattaaaaagtgatatatgtatacttttatgaaagtattttttaagacaaatctattcatataatttttacattttcaaactcaacaatttgagagttattcatgatttatattcccaaggtttgacttaagcattgtcctaaacaatttcctttataagtacggaggaagtacttcataatttgggtatcgatgttgattttagagtcggtttcctaacacctagaaaaactaaggtttaagccctaggcttgactccaaaactctaattaaatcttttagaaattggatgaaaattttgaaaatgtattacgtctaaccaaaactgactaattcaaccctaggcttgcacgttttctgtctgggtcttcaaggcgacagttgagctaaacacctagcactcacctcatttcaaatgtgcttggatttaactttcttggtagaatttgtatattctcgaaaaatagctatgcttatttgagtaagaaaatgttgttagctaatagttgggaaaatgctttatatcgcacgtccgacgaaatggaaatatcggacgtctcatctaccccactggaatgctgcaaatcgacagcatgatggatcggaagaaccctgtcaccgtaacaggtatgactagctgtttctttttattcttttctcctctctttaaatattttttcttctaaattacttatccgatctacgaaccgatcacaccgttgtattcgttgtaattaaatctttacaacaagatatcatatgatcatattatgtcaaaagaaaaacatgtgtttcaaactgttaaaactaaatgtttcatacgtaacagtgatatgtttcaatgtacgccttcagtgtgtttcacaaaattcctgaaactacctgctactactctctctccacctcatccatgcacacatgcatgtattttagcaagcttcaaaataatttttctctcaaattaattatccaatctatgatccgagacatcattgtatttgttttaattaaatctttacaacaagatatcgcatgattattttgataaaagaaaaacatatgtttcaatccgttaatactagttgtttcatacgtgacagcgacatgtttcaacgggtatcttcaccatgtttcataaaatatttaaacgtttcagttgctgattttttgtttcacttgttggtcaactgcaacatttgaccgtccgatttttttggcatcggacgtccgatgggtagcttcctcctaagagcccctttgaattggaggaaaaacatagtaattttggaggatttcaatcctataggaaattttcctataaagccctttgaaacaaaggattgaatcatatccaatcctttgaaattcctatggaatggacaatcctatagaaattttggaggaaatttagcaagatcaacctcttggtaactttcatttgagtctatccctctcatccaattccagtttaatcaaacggtcattcctgtgtttttcctgcgttttaaaatcctctgttttacacttgcattcctatcaaaatccattgttttttctattcctacgttttctcaaaggggccctaatagttgttaaaaaatgttctttaacggcttaacctgatcacaatagatgataatggtctattgttagtgctagcaacggtgatcaaatttcagtcctctaaaaaaaatctccatgctactgggtggcacagaagatccaatcttcagttgatgtcgcccttcagactaagtaaattggtacggctctcgatgtacttgtgttgccagccaatgacaaggccagcgtacaactaagaagtcatgacaccaacaattaacgacaagtcatatgattaagatgtcatgtagtagacctaagcaaagcactgccgaatctcatctctctagcgtacattaaatattcagatcgtcgtcaaaaagaactttcgcatcattagatattttttccaacttgtgctaccatataataccaacgatggataatagttgagcaaatgtatggaagttgcagccaaaaatgtcgcacgaagatgaaaaggagtatctaatttgtaggaaattgcctctttgtaattttaaatattacttttacttaaaatttgctggataaaagaacataagttttttttaaaaaaaaatcggccaacgagtttgtgtgaaacctaagtacaagcccgagtaggtcgcccacaactggggactttaccagtgcgctaaaattttcagtttgttaatagtagatggcagcgcgtatccatggaaagggaacatcctgtcaattttctcttcttcccttatttctctgcgtctgatgatatattgacatgtggactgcaaattggatcttgttatttctaatggtctccaattttctaaaaccattatttcgatctccatcttgcaagagttgagcaagctctttcacgtctttcctcattcaccagaatcaaagttgagttggatgtttgaagtggtgaatatcctatttcctctggtcagtagtcatggtctcactggtcttttcttttttttttctattttcaactggaccctactcttgttagcttgtcactatggcctttttgtatttgaacttgtttacttgattatgttgagctatgaaatggtagtacacctgcaattattgggtctctttatatgtttattattgaccattgacacgttgaaaggtggttcctacatcaatgcattttttaagagcaagtttaacaatgtagctaagtgctagcttcaaaaatgctacattatctataaccaacctaatactttattaattatgaatatatactacctcacatgtcctaaaatataacaaattttagcctttataatttatcctataatataataacatctaaatcaacattctattctcaacaaccacaaccttccaccattcaatttccctacctaccttcatttctcaaccaatcaaaatcttccaccatttaattatatatactttcttaataattatgtttaactctaaaatttcttatattatgagacggaggtaatacatcatcaatacatggctcatctctctttctcacatggtttattagggttgtattgtagctggttataaatttgatctcattttttcattgccctctctgcatataaatataagagtgataatttttatgcctgtttgtatcattttgttgcactaaataacaacggatacttctactgtacactgtgtagtgagcagggatgcccaatagtgagagtgcgatatgcagctctacagttcctcacctcttttggcaatagatacaacagcaaggagttgctctttggggaaatgaagggataccattgcataaattaatcgttctttgcccaggcgttctgatgcctccatcacatgacctcacaaagaaccaaacgagcattttggatgcattgcaactccattgccaggaagaaagtacaccaaatgctgacacaagagcttggcctggaagaggattcccctcatgtcatttgttttgttcaaaaaagtgacttttgctggcagttttgtatgacaaaaccattcaatttctctccttgttgggagaaagaacaaagtagggagaatcttagggaggttggtcatcagcattgctggcggttgatgcggttgaatattgcgaccttgatgcgagagcatttgctcaaggaaggcatctggtgctgcttatggcagaaacgagagatgcatcttatttggttagaaagccagccaccgaagaaaaaacgatgtggaagattcgttcgtcatgtaagaagatatttgatgagctcctgaaaactcatgttctctcttgagtttacctggccgagaaggtagagtttgttggacttaattcagcccatggctggatgctcatacatgttcggaaaaaaaatccactttacgtctcacaagtttggctgtttgagtcaactttcatttatgcccatcaactataaaactgggtataaaacatccttcaactatcaaaaccaatgcaaatcaaatctctcgacaatatttagagtagtttgggttgatgtggcatcatagttagtaaaaagaaaataaaaatacatagggacccacatgtaagtggcggtcggttcaccttcttcctccctccccctctctccagggaaaatctacaatgaaaattatcggatgtcctgaacctatcaatcataagtataatgctttatttttgtgctaaaatgtgtcctatgtatcatatggattgtacttgtatgtagatctgctcctgcctctcactttaacctctcctctctcttctctccctgtgggcattgttgacgaggacgaccgtatgcaggacaatgtcactgtgcttattgctccatccaaacgatgtagccgtcgccggatgtgccacttgcgtggccttctccctccaccatttaggttgtgcgtgagcgcatcgtttgcaccccttgatttcattgtcgaccggccacagcgcgacagccacgattgcattgtcacatgttctcaaccttgtctctccgtccatggatcggactggcctagcagttgggggtaggtcatgcaaggaggggtatcgctgttgggagaggagccaagagtagtgcccctcatggagagggattggcaaaaggactcaatttggtgacgggtgccgtcgattgatgttgttgttaatgcgaagtagtagatctatcgagatcaagagcgacgacaactgtgagggggtggaccagagcagcttgtggatgtcctaaaagagagtggttgaattgtttccctcactgggttttggggtggcaggagaggagggggagcgagaggaatcatcatgatcgttaggcggtggtgggggaggagggaagagagggttgtgtgtgaagaggacaaggaaaaggcccgaaggaggagaagcttcttttgaaggttgatgcggcagagcaccatggcggtggcagcatgtgactactggcccaattaggattgacttgtgtagcccatgaaaattgtatgcacatgtttaataccacattgctaatttagtaagggtgaaatcaacttataagagtttatccatccaacaatataactctttggtttatccttttacatgagactaaggatggaagtgtaagtaagtccgctcgttggatgggttgggctgcacctacgcggttctagagggcgggtagtagtggtacaagagtactagtcaggaccaacgcctagctccaacgatcagcgctagccgcctttcttcccaccatggtcgcttatgtagcgacatccccgtgctcggcagtgccgccgtatgggttgcgaccaacatcaagccgtactaccccatcatgggacatctctcttgtggccatctacaacgagatcatcagcacgatgatgaagaatgccttcatcaccggtctcatccccgtcatatgcatccttatctccaagccacactccctcagcaacgtgttcatctctgcaccaccattagctagttggtttctcgacgtccttgactgtctcgtgttagggctgatgctcgagttccaccacacgacgagatcgacgttcgtcaacccctacctacttcagttacaacgacaacacgataccatacatgctagcatgtgggtcccatcaagttttttttattttttgtttctagtgccatgtatgcgtcatgtcggacgaagactaagtcaacaaaccatataggcaccacgttaatttgcactgattttgtaaattgggggacgctccacacctggttttggaggcgagcgacgcgaatgaaattagaccatatagttgagggataataattggacttttacctagatgtttcgaaaacattgtggaatcataaaatgaaggcccaacatgcgttgcaaaagttgccggcctgcagttgcggcccatcgaaatcagtccactgttttattcggccatatgaggccttcgattcagccggcggtcgccccccgttttcgccatgttgcggagataccgggcagtgcggcgtgccgccgccgccggatgtcgatggtggcgagtcaggatggcggcgcggcccgaaacagcggctacacagttgaaaggtaataaggatttggccgagccgtgcgagtcgctggcgttgacgacgcaaattgacgcgacgcgagcccaatactccccgtatatatctccagtttgcacgaccaactgccagctgcaaaaggcgagagttcagtggaaaaaacagatggtcgctgttcagaccgtgcatgcggcgctcttgccgtcgacgacgacgacgcgcaggcggccatcaccgggtaggctaccgaggcgttcccccatccgcgcacgagccggatcgtccgagacatcgtcgccacgcggccgcgagaactggcgggtgcaggaggcgctcgcacgggtcgccgagatccaggttctgaaggtccgcatcgccagcttcctcgacgactgctccgagaacctgctctggctcgcggagaacgcagcgctcgacgcgacggcacaggacagcctgagggtgctcgacctcgacggcgccgccgacgatgaggtgagagcggccgtttcttgcaattaacacatggccggggagttaacacatgacacgttcgtccgtggttgcttttctgcagataatggagaggctgtactgtaagttgggtcgttcgacgacgcgcaagcagaggagaagtggatggacttgatcggcttgggcatagacgaaggtgtatccgttgaaagcatcggtgaggaagccaaacatgaacatgtgctggtggcaagggagagcggacggtacaggactcgcaggaacgtttacctcggtgtcatgggattgatctgggttggcctgatgcagaccaccgtgttcgcggcgcccaacgtggagttggacaagtttgcggccctgtgtctcatctttcttgcccatattgttcaggtctgcttcaaggaggaaactgataagaaacaagtgtgtgtaaatcatgagactcagatcagcggaaggcagcggtagactccaatcatttggtttggtttaaagtagacagggatatgacaggcaatttggacagtaatgatatgttacatgtaataactttacacgtcgtaaaattatagcggttgatatagtttacttaactgtctggtaaccaatggacaatatccttctctttcttcccccttctccttccaagttattttagcctgagtttgatttggagatgagttgtgatggtttaaccctatccttatttttttttagagatttgctccggtccaacaggtataggtacgtcacaataccaaatcgtttttcgatcgttggatctaacaatttggatgagttgtgatcgttggataggcattgttagatccaacgattgaaaacgacttggtttcatgaggtaccggtatctcaagatattttttgctggattagagcaaatctctattttttaataagaaggtttcatctatttatttggcgcaagagatagaatgatcatattttttaaaagaaatgggagggtggtatgtatatcaatgagaaagataaagaagctgatccggatttaaaggaaatattcttttttatagattatttcatcctaactattctcaaaccaaactctataaaatgggttcgtcccgaccgatcatgtaatcatgttcttctaaccaaacacatgctaaactctataaaatgggttcgtcccgaccgatcatgtaatcatgttcttctaaccaaacacatgctttaaatggagccagctgattaggagtcacctggactccaatgcctagtagtcaatgttagtaaatgcttttgattgcctgagctcgatgatgttgttggctttaccactactagtaaatctcccaatgcaaatagatagtgttacatgtagacttccgtattccctccgtttaaaaggaaccaatttcatcactagttaggaattagttcttttgtaacggaggaaatattgtttggctatgtaagagtgcgcagcccggcccaccaaccgtagaccacccaggttatattgggcctgctccaccacaagcccaaccgaagccacaactttaggtccgcccggcacaccaaccgtggaccacctaggtcatattgggcctgctccaccacaggcccaaccggagccacaactttaggtcctaggcctatacaacccaaaaagactagtcatcgtgctcctccatcatcaattaccgatgtgggactaaacccaacgtcacacatcaacatcaacccatgtgaccccgaagacttgttatctagcctccccaccatgtgacccataaaaattgttccgggttccaaacctccccaccatgataccacatgtaacccatagaaattattccgggttccaaaactccccaccatgataccacatgtaacccatagaaattattccgggttccaaacctccccaccatgataccacttgttgcagcctgctccagcacagacccaaccggagccacaactttaagtcctgggcttacacaaatcaaaagactagtctgatgggtggggatcgcccccaccttttaaatcgtgctcccctatcatcaattaccgatgtgggactaaacccaacaggctagctagtaaccatggtcgtttttgtctcttcccgaactgaatcttgacacgtcaaatccggacatctatgtccgtatccaatgtccgtaccccaaaaaaaagaaattgttgggtcagtacaacacggtgtcatatcggaagttccgaaccaagttccacactttcactgttttcaccctgctgactgggccttgtggcaagcaggagcacatgccggcccgtcccgccgtgcacccgcgcgcgcccacgaaacacaacaccgccgcggcgttacggcccaaaacagggagccccatccgccgcctcctcgtcatccggcggcgccgcgcggctgtacgcctcacgagaatgataacgacttctgctgatccgccgcgtccctttcgtacgccatccaggccccggggggatagcatacgctgcggcgccgatctgcagtgcccgccgccgcctgacattctcacctctctgctgcctgctaattcatcggccgccaccttgtttttactgccatgcatgtagcagtggtaattacagtatgtcggtacactcattgtcatgcagtaacagccaggagagttctgactgcgcccatgtgatgaactgatgatggggtttgatttctccctgcagatactactactgcagtactgctatcgctaaacatgagagggatcggggcccctttctcctacgtccagtccaattcaggtgcgctttttaatttttcgaattgccgaatcattccttgcattttttttctagtacacatctaggcaaattagttacagtatgtaacctgaacaagaatttcctcctatctagaagtgcataattaattagcatactttatgtaccggagaaacgttggtttctagataagttcggaagaaaagatttatcatccgtggaaagaattaaaagtttccccttggtacgcactcttcgtttgcttcacgatatgttcagtgctggagaagcgttcagcattcatctacagcatcctttgatggctcatgatagctttcataggaaaggccaagcaaagtatcgagcatggacggacgagcacattgcacccacaaaccacaccaactctctcactctcagccacaggagcgaggcgtgtcgagacgctctcgatggcacacgaacagcagctactccagctcgcactgatccgagccgagcatccgatgcagaaagttcatgatcccctatgattgtacacctctcggtcctgtttggcgaagcttaagattctgagaaatagatgattggtagccagtttctcagaatatggaaaaagtgggtttcccagtttctgatttttagttcattttctagattttacaactatatctttttaaaatttaatataggggagcttttattctataagctcccaagcaggccctcattatctctctgaaactctgcagtacgtgcaaggcagcagcgcaacaccaacatgcgtagcagaggcatcagcagcagcagcagcagcatcagcagacagtgcacccgaaatccaagcgggaggcaatgattaggggaaggaaaatccggggggatgaaaaaaaaggttaatctttttttgcgctcgtatgattcgatgcgtaaaagggatctttgatcgtggtaaaccatcatcatgagcgattagtagcggtagtaggcgcctcgagatccgcgctgggccggagatgccttccatgatgctgctgggcgccgatggatcatggatgggagccaagatgatctgcctgctcctcctcggctcctctttaccattctgcatctctatgctttgctgtagtatagcctagctttcctcgactctgctttgctagggggcatttaactatctgccacttttattacatggtaattaaaaatttattactcgcagtctataacgagctagctgggctcctttgagcatgttatcttaacgagttaatttggcttgattcattaatcttaatgagttaaaagtctagcttagttcttgagcggtctagttaaattcgttagttttgttgacgcgttaattatataaacctaataattttaaattttattattatctcatatactaacttaatactccctccattccaaattgatctacatatagtttttttagattattcctaaataatcttcacatttgtcttcatttattaagtctattcgttatttgtgcgttggagtaaatagacattaatgcatgcatccatgcacacaagtatttatagcccacaagcaatatcttaatttgctattggctagaaaatattggggatggtacatgcatcgaatgtattgctagagtaaatatagtatgagagaattattagtttttcttggttttggtgtacctattaaatatgtagatcaatttggaatgaagggagtaccaaatactaactaataactcacttaaatataaatagtttggatgactaatcactagttaagacacactaactatataaagatatgatgatgatagtctatatcaatgagctaaatgagcatcatgcgagttggctcgttattcacgaggtaaaaacttagatttgtttgactcattgtaactccagttctagccaatccagcttcgctcgctacgaaccaatccgagccataagtttcgagttttgttgaataatttgacgatgaaattttgatagcaaataatagttatagtgaagtttgtccgggttcaaaaagttatctagctccgccgctggccggctgctgctagaacagttctaccgtctacgaatctacagggcagtacactacttccactcaactgctactactgcattgttctctaccgcctagtatgctatacaacgcacgaatgacttgtggccggggaaagggtggtgattaaagctggtgcaatgcaatacatgcatgcactcctctttgctcgctttttctacccccactttggttgggagcctttgaaccccagtgtggcatgcagcagcagctgatgattcccatgcaaatatactccaaatctgcctttgtgaggatgtgtttgttgctagctactgctaccatctctccctcatgggccacatccccggcctcctttgtgagctccaaggcatgctgtcctcggctattattttcaagctccagcagagccgcatgccaattgctaatgctccatcattgggcctatctgctgctgtttcatttagacctgtttcaggttcaggcagtcacacatgctactccagattcttttaaccgagcatcataagtcatttggtaatttagtatagccgtgctgcaattatggttgcaacttcaacatgctcgtatgagtatttagcgtagaaatccgggggatcttcgcgtagaagaactttctgcgcctgttaataattattagctactcaagttatgaaagttcagtattgtttttcctcttgatctttatacgtgctttcgatcaaagttcattcttaaccatccacttgcgcattattggaaaaattgaggacgagaaaaggctggactgttagactgaaaatctaaaagccagagagttctgtcacaaaaaaaaatggctctgtttcagtgacaacagcatctacgagtatttctttttgcaggcacaaggacgcagaatttgcagacgcacactccaaaaactatcgtgctgatgaggatatctcaggctctctgcatgctggtcctgcacactctgcctctctcttcccaactgtgcacgccatgccatgccatgccatgcaagcacacaggttgcaggatcgcgagcttgcaaactgcaacacacattctctcatcgggatctgcgtcgaatggcggatgcgagagagagagaaagggataacaacaagcaaagcagcgccgctgtgagcttttgcagtagcaagttggcaggaaaaatcctaaccgatcaaacggatcgagcagagattttcagatttcagtacgacgatcgacgcgatggcgaaaatttacagcgagagagaggcttagcatagctacgtactagtacttcttctagtactagctaggcttaaagatgaacaacgaatccgtccacatgttaacgcaatcatcatcagtggcgcgggttgttgttctttcgcacattcccatacgttttacatgtgcagtgcctcatttctttctcctattcttcttctcctcctcctcctcctctttctcgttctcttcttttgtgttttgggtgtatgtgcatcctttgatgccgagctctcccttttgtcagcagaggaaaaaaatggcgagggagaaaggtgttgcccgaaaatgccacggcgaggtatctgcttctgtgtgtgtgtgatactgtgatgtgatcgatcccgatgcgtttcgccgatcgatcaaaggggagcactgttcacgatcgcggcctccttttgctttcgttgggcttgctcaaaagaggatggggggtatgtagcctgcctagcttagcatcttcttgcccggggatttcatcagtacaggtgaaaatgtcaccgttaggccaatcattctcctgctgctgcccatctgtttaactgtttttgttcgaatatctgctgcctgaagtgacatcagacgtctttttttttttttgtgtgtgtgtgtggtttggtaaaattggtagcctgaggtatgagcagataaaaccagaggcaaaattttcagatatctattgttagtgcgatttgtaactaggaaattcagtaagaaggttcgttgtttatatttataagttaataacaacggaaatgctcagtttgattcgggtggaaacgtgatcttccaagaactgaatcttgctcatatcttgcattgtctgaacaaagatccaggacggcgattaatataaccacggctgtgaattagtttatggcacagcgttatctgaaccctctattccttcctagaagctcgtaacatggcccgtttcatgctttggtttctcactaatcaagacctgtaagtcacctatagaaaaaaaaaagatgctcctgtgtgcattgaggcacatcgcacatgtgagagatggagctactgttcctgatcaaagggaggctaggggtgcaaaagataaggtaccatgattaattatcattcctaagctcgagaaggggacaactttggcctcccatcatgtgcccggaacgctccctttcaccaatctgctaattagctcctcctactaggagcttgtttgatcagatgcccatcttttgtcctaaactcgcctaagtaggacaaatctgaagtggagaggacagtgacaaccgggtgccacttttgttctcttgctgtttgcatctgtttggttagtcttgcagggaaaatgaccatcctagcctgcaaaggaaacaaggagatggggataaaaagggaaagctggaaagggaaagttcatatcggctgtcaagaagaaaagcgcttcagaaggaatgtgatgctttcagattttgctttgactagctagggagaattacaatttacctgcaggtggttacttgtaggtttgtatgaggaatgacagtgctttcacgactgcatttgtttgttctagcactcaaatggtacttagcagatgtaataagattccattaacgagattccctgcaacggttctttccacgaaatccacaggccagaaaaggcctgcctgctgagtggattgactctggctgatttatggcacgaatgcgctaaactcttttaaaaggaacgtttgaatgtttgatattctcactgtgcattttagagtgacgatggagaatgaagttgtggagagatagcttcatgaaatatctgaagaaacatctccagatttatcagatatttcacgtggttcagactttagagttcacatcgtcacggcctgcccttttcttcagcttctcgtgtgttcggggcatctgcctgggaatatctgatgaaacttacgcgtaggacataatcaagcctggtgccccaagtcataaggattttttacatgcaacgcgacgagcgctgtctcgtgaaagtcaaataaaattgttgtagaactctacatgacttcatatcgctctcctgataagggcaaaaacaaaatacaggaaagtaggaaaccaaagactgtcaaccagtgctgttctctagtaaaataaactggtatttttggcatggcgttgctcggacttaattgatcatcagaagaattgtactagtagtgcttttttagactgatgaagctttcagattctagagtttgaactcgaagaaaatgaaggaacactgctgccaaagcatttcttcggaaaagggaatttggtatatacgtcaacattcttaacacgtttcttgtttgctactagttgccaagcgtgcaaacatcattataatgtttaatacagtgtcaacgggtccggcttgcctacaagattccttaggaccatatcaaatgcaaccaacaatacatctttctgttcctttttcattcctttccctgatgaataaatagtacagaacccactattgtgttcgatgattgccttttctaatcataggttaggagggaaaatacaatgatattgatgcatgtacatttattggcaagcctatcaacacagtatcatacggtgaagctaaattccttttcataagattggtctgagttataaaacaatgactacatgcatgacaagtgaaaaaaaaaagagagaagaaagtaaggtgatcaatcggccacccaaaccttactaacttgtttagttttaatggagtgggagcgtccctcaaacctaaacaactgttttatccttctcaatgtagtacttatttttctagcaaactattgtgcttcactcattaactacatcgtaattacctttcttaaagaaaacattaatattccataattatactaagagtactagtgcttgtatggatacattgatgaagggtaagaaggaaaactacatcattaaaagtgctttagaatgtgagaataatagcaagtattttgaaacaaataaaatactagaacaataaataaattgaaacgtatggagtaacatattacgaatcaagaaccacaagatataaaaattctcgtttgctaaactatgacatattagtacactctctctctcggattgataaaaaatagacgaactgtgctcaacgtacccagccaatgcacaaaatataaagagaaattgttttgttggaacagatctcataatttgaactacattaaaacagatcttgccatgcatcctcgaagaagaagaataagatcttgtggtccgagttagatctcaatctgatgaaaacattgttttgaatgtttagaacataaccacaaattaacaagaccatgatgtactcacaagtaggtggaaataactccaagcaagtgattgcaaaacaacttagggcagtcacaaccctccacctaggatggtgtctatggcattaactacattgccatgtagtacttttagcttatgtggcactatattaattaagagagagagtgaagagaggaagaaactgggtctcatgcaagacacagcttcaacacgagaacctatgtactagacactatcaagttttgcattgggagagaatagtgtcttcataatagatgaagaataaatatgattggtagaaaagagagatgatctatttattaatggcccactttaagaaaccatgggttgtagagtgtagtttctattgtgatgtcttattgatatggcaccatagacactacttatggacactatgggttgggactgccctaataagggagcgaacaccgcatcgcccctatgcaagggacttgagggatgattgaaatcatagctactgccattcttctcatctcctccacctcaccgctaccggaaaacagtacaatgagctaggatggtggcgccgaggattggtttgccacctagttttggtgcgaagaaaggaaggtgcaaggtgacgatgaagaaggcatgacgttgaaagcgacatgcccgggggggagggggcttcctccgtgagcatagatctggtgcctcctcgactcggtttggctggaacacgtgatgcgaccttacgatggtagacaagcaaacgattggtgttgagtaggttgccaatgtcaatgacggcatgagtggccacagatggcataggcaactgacacaggagaaggaagcgattgcggctgaggtgttgccctagggggaagggggggtcatagagtagcgtagtaagaaagcaactgagatggtgcttggacgaagcaacatcctggttgtttggatggtgatgacatggaggtctctaccgcatacgacggcttagacgatggcaagtgggtttatcctaggagctcctccccttcaaacggttggcatgcttctaaacctgatcactaggagcttcaagcaaagagggaggcgatggttttggtcggaagggtgttgcttggcggaagacaacaacctttggcatcggcaacatgttgaatgaccttgtggtagctaggtgtaggtggttgtccaacacattagaggtactgtgctggagacttttgtgttgtggcggagtaaaaggtactacattgggtgtgatctaggatatgataacccacgatttcatgatcctgcaaggtggaggtgtgagtctggtggattttgtgatgatatcctgcatctttgttgtggtagagtcagagatgctacatcggtgtagcaagctaggcaatataacaacttcttcgctttggcaacgaagattggaaggtacaaagagcttagggaaaaggccatgcctggtcttagatcaatgctggcgacgtcaacgttcgtgggcaattgggcatcatttctatccttggaggcgttataatggcatttctcttgcttaaatataaaacctagtatgttgttttggaccgaccttgataccgtcgtagatgatgtatctttcttgaaggcttcgcctagaaggtcatgctatatgtttgtggtggttgttgcgactaacgatagctagttgaagctgtttgatcgttatgccatgaacttgacaacaaagacttgtgatgggtctcggtaggttgtcattgtaggtttttcgtgtttctttgtctgggtttttatcggtttcacttcaatttattgtgtcgttttaaagtttttaggccaagtttcacttataaactttgtcgactttagttttctatcaaagtaggagctctctaccctttatgatggatttttatgaaaaaaaatatatagctctataccataagcctcccattgtttgtcccacagcttataagtagttgcataattttaaattttaaatttattattgaatttggctttagttttttcatcatagtttatttttaacacattgacttttaaatcaccaagacatactccatttgtcacataaaaaatcaacttatgactataaatcttgacataagctaaactagctgggtggcccgcgcaattgcgcggctagcacccatacaaaattatctattttttaatatgattttacttaaaatttattaaataactatcttattgtcttaagactttaaaagacaaaaccttatcatccccatgcttctaattttatggtttttaaaagtcatatcaattgctacaccttactttgtcacgccttctttatttgcttgctcgatccactattgtttctatttattctttctttttagaacctttaaaaatcggaccttatagtttttaaagttcatttcttgttgggttacatttttataaattttagaagtcccatcaaacgttgctagtatactcctctatggccagtccattgtctcctctctttattgtctttgaggttttaaaaatcgaacaaaattatcttttgggttcattttttactttctagaagtcatgccaaaccatcagcagttgtgccattgtactctatacggctcgcccattacctctcctcattattgtcattgagattttaatatcaaacatgatgatcattggggtttatttttttactttttaaagtcctgccaaccgccgtgaacatgttgcttaatggcatgtccaacgtctatccttttaatcatcatcgagattctatttagggttttgttaatatttttagatgtatcatcaaccgtcaacactcaattgctttacatgtctcatcaaactgtcaacggcttcgttactatactcctctaaggcccacctgcttcctcccctctttatttttttttgagattttaaaaactgaactgattgtcattagtgtttatttttctactttctaaaagtcccatcaatcgtcgtgactatgctgcttaacggcatgctcatcgttcctcaccctaatcattattgggattctatttaaagttttgtttatttttcttagatgtcccatcaatcactaccattctacttctttacgcgcatattgtcttctctttttattgttatttgtcatcggtgttctagagatggacttcttttcttttctttttattttgaaaattccatatttttcattccgatggtttttatttataaactatattcctatctgaactcttttaattatttttttgtttttggaatttattttatttgttcttccgaatattagtatttggtcatatattcttagatggtcctttattttaatagtcattgttttttattgcgaattttagttatgttcatagatggtcttttatttcaatagtctttattttttattacgaattttagttatttatagattgtattcctagttgaactcttcgttttccttttctaattttggatttttttttctaactctatgtggcccacacaattgcgcagctagcacccataaagaattatctaatcggtgcggtgttcattggcaaattatcacgtttatggagtgagtttgaacggtgtcccatgggccacggctaaaaccacgaagtcgaagtgtcctgtagcaaaatttgcctttgtataaagattagtacactcctgaacgtatctaagctattattaatttatttttattatgaaatttattttctttagaattcttattgattcgtattttaaatttaatttaatcccgcattgtgtttcatttgtttttcatctgtacggtatgtacttggcggtagtaatggtggcaataatcactgtacataaattgatatatatacatgtcttacgtcaaatggaaatgctgctagggtacataaaaggaagtgcttctatgaagaaaagaaaaggctgagtgcctcaatcggacaataagtcctattcaaattaagcttaagctgccttggttaggagtccgatccaagccagatcgtatatatttctatgtttgattttataatttcgatcagaatttattttatttttttatttcaaatttaatttattctcatattggatttttatattgactcttctttcaatattacttatttttaattacgaatttcagttatttttaaattatatttctatatatagattcatcttttattttttattatttattataatgagggagtaagagaggaaattactgcatagtagagtcctaatgggacttctgctcatgcatgcgcctgatttgattcacagtagtatttgtttcggtgcccactatcttggttcgtattgctttcccataaatctatcaggaattcaattttcatataaatgattgtattttatatacaactctatcgatcaatctacaccactacaatctgaatctactataattctatttttttcttcttttctccgattaatgtgggaatttctagcccctacagtgaacgtggtgcctccttttaaagctgttttaataatataactagctgggtggcccgcacaattgcacggctagcacccatattaaattatattttttaaatataattttacttaaaatttattaaatagttactcgttgtcttaagattttgaaagaccaaaccttatcatcctcgtgtttctaatttatttcagttgctacctcttacttctgtcttattagctcgctcgatctactattatttctattcattctccttggaatatttaaaaattggatctaaaagcttatagttttatagtttttagagtttattgtcctgttgggcttcttttttataatttatagaagtcccgtcaaacactgacattatactcctctacaaccgtccactgcatcttctctttattgtcattgctattttaaaaatcgaacataattatcgttaggtttattattttttactttctaaagttccgccaaaacgttagtgactttgtcactgtactcctctacagctcgcccgctgccgccgttctttattatcattgagattttaaaataaaaaatgattatcattggggttttttttttttactttttagaagcccgaacctttaaaaagtgaaacttcttatagtttttagagttttattgtctcgatggatttcatgttttttataatttttagaaatcccgtcaaacactgccactatacttctctacgacccgtccgccgcataatctttattgtcattgggattgtaaaaattgaacacaactatcattggaattcatttttcacattccagaagacccaccaaccatcagcggctctaccattgtacttctgtacgacccgcccgctgcgtctcatttttattgtaattaagattttaaaaatcaaatatgattattattggggtttatttttttactttctataagtccccgccaaccgccttgactgattgcttcacgacctgcccgccatttttccttttaatcgtcattaggattctatttggtgttttattaatagtttttagatgtctcatcaaccgctaccactctgctcctttatatgcctgttacttaattaatctcgtcatgtgctttagatagtcttttctttcaatagtttttttatcaccaattttagttatttataaattgtattcctagttgaaatctttttttctttttctaatttcaaattttattttatttattattatgttcttttgatatttttattttttttattttcaattttagttgtttcaaaattgtattcctactttaactctctttttaatctgcctaatttcgaattttattgtatttttatttcgaattttaattaatctactattgggttcttatatgtactctttttcaatattgtttatatttaattccgaatttaagaattttaaattgtatttctagttgaactcttattttcttttcttttttctaatttcgattttttatttttttattcagaattttaattaatctcgtattggattcttatatggactcttctttcaatatttcttatttttaattccgaatttcagttatttataaattgtattcctactcgaactttttttttatttttctaatttttaaatttattttattattattccaatattaattaatcacgtattggtttcctatatggactcctctctccatattacatgttttaaatttcgaatttcagctaattttagattgtacttctacttagacttttcttttctttttctccgattaatatgggaatttatagcctccacagcgaacgtggtgcctccttttaaagctgttttaataatataatagaatagatagatccaggttagtagataaaagttgattttttttattgaacgacgtgagtaagtatcaacgtttcatccataaattatttttatattgccaacaaattattttacggctaactgcgtatccgcttaaggctacatttaaacaaaacatgtttttagctagtgattaattaagtattaactattataaacttaaaataaaattatttattaattaaaaaatatatgtttagcggtttgggagggtgcatatatgaaaaaggagaaaatagctcactttaacgagctagtaattcaaactcagccgagctcgaccttcagaaccgagaatggccaatagattatgcccctggcccttctgctgccccgtccatttcccgtccacttgacactgatgcttcgcacgagagcagattatgccgtgataatcacctttggatcaagcaaatcacgaaaggacaaccttgtccaaatcacagggcgataaatagccagaacatggcgagatgcacaacgaagcagagtgtgcaaggaagagagagcgtgtgctgtggctgtgctgtgcgcctgtgcagctgtgctgcgtttgatcccccttcccctccctcggaaacggggaaaagcaaaacactcccaaagcccaagacggccagagaggaagaaagcaagcaaaagcagagagagagagagaaacaaggcagcagcagcagcagcagcagtagcagaggctagcagcacagagaggggccccgtgattccccccccccccccccctcttcatctttcactttccccatctcttttttttcaccattttaccactactgctgcctcacgcagtcacgacgctgaagtggtagtagtagtacgctctcaaaacccaaccttgaatccgtcacgctcactcacgcagctcacaggctcacagctgcagctacttactactggtacgggctcagggccagcagccagagtgaaggggaggcgaggcgaggcgagccgtgtcaatgtccaagaaatgtgatggcgcgctccggtgaggcgactggttaggttagccgaggagggggaggaggcgaggcgaggcgagggcgagatgacactgcagatggagccgccgccgccgccgccgaggcggtcggtgtcgacgagctgcgacctgcacccgggggagacgttcacgggcttctgcgccgcgtgcctccgcgagcgcctcgcggggctcgaggcgtccaccgccgccgcggccgccgcgccgggccgcaggtccacctccgccatccgctcgctcttctccaggccattcgtcgccgccggcggtggcggcggcggc

SEQ ID NO: 7613 - DNA, 147221 bp, Oryza sativa
aggatatcttgctcttcgtcttcctcgtccttggccgcaggtggtggtgatgggtgcagggatgccgggtgcgccagtagcagcggcaggggcagcggtgtcgttggttcggttggcgatggttggtgggggaggaggggcgggcagcgggagcgggccgtcgccgccatgtgcagcgccggcatggagggggtccggcacggcgccgccgccgtggccagcgtgccggcggcgtcggcgtcggcgttgccggagcgggccaaggtggtggcgctggtggcggccgtgatgctgctctgcaacgccgaccgggtcgtcatgtccgtcgccgtcgtcccgttcgccgcgcagtacggctggtccagctccttcttgggcatcgtccaggtactcggttcggggtcttctttaccttcccagttcatgccatctctttcacttcacttcactattagtagcacatcgcacaggttccaattcatcgaaccttaggcaagaatctctgctctgtcactagcaacaaaatgtccaaaaccataattagttcatcatatagcaacaaagtcaacgaagcatcaacgtcacaatcgcgacaagagaatgaccggaacattacaattagtagcacaaacagacaattatggcagtccagggtattagctcctttctgtgtgcaggtccagtgcaaccgtgtagcaaccaagttatcttaatacgattgttttgagagtggaacctgaaatgaaatttgctatgtgcttcacacatgaatcgtgatgcagttttctatttataagatatatgcttagctttagtggcttccacatagatagtgtagggtaccaatttggaagaaaccaatctgtgcaggcataaaggtcagggagcaacttgaggtggtatcgaataccaatatctcctcatagtggcaatattggaatttgataactggaatactaaaacatgcaacccaactgagttaagcattgcccctcttttttggtgatggagttcagcacttcagatttacttggtgacagaacatgaatgtttcataacaaattaccagctagcttaaataccattgcaacatttgaagtcattcgataacaaaaaattgtttccctcaaataaagaacggcaaaagaatttgtgcatgcttattgtatatacacttgggcaacaatatgtcttgactagatggaggttcacataaagaagtcatcgtaaaaaccaatatgccgtaacactaccggttctatatgaaattgtcaatgtgcataactaactaggccagaacaaacacagcttgctcttttattattatgtcatgcgtgattaatgatttccagatggattgacttgaggttaatcttctcatcacctgtacagtcatcttttctttggggatatgttttctcatccatggttgggggagctttggcagaccgatatggagggaagaaggtgatggcaggtgctgctgccctctggtccttggccactttcctcactccatgggctgcttctcaatccacaattatgttgcttgccatacgtgctctctttggccttgcggaaggtgttgcatttccaacaatgagcactttcttaccaaagtaagttgctctatattattttctggtgatgccaattctagttgttagagattagagattctggacaagaatttattgatgcaatcaaacacaatctcatttcgggctttcaatctcactttgaacacaaaacaggtggttcccaacacatgaacgtgctactgctgttggcatttctatgggaggattccatcttggaaatgtcataagtttcttagcaacaccgatcatcatgtcacatataggcctcgccgggacatttgccttctttgcatcacttggttacttgtggctttctgtatggttgttcaatgttgaaagtgaccctcttgacagtcgtacaataagcaaatctgagctgcaattaatcctagccggaagaagtgcatcaaaaattcagggtagcaaattcccatccttacgagaaattctgtcgaagatcgaaatgtgggccatcattgtagctaatgtggtcaacaactgggtaagattgataaatcagttatctacaaattggtgttgacatatctatctaaattttaacttccgtgagttcgaaatactatgcagggctattttgtactactatcatggatgcctgtctactttaaaacggtatgttgtctaaggtgttcaaattggtcactgtgacaacgctgctattaagctaattcctgactgctatcctacaacaggtttataatgtcaacttaaaacaagcagcatggttcagtgccataccttgggcagtcatggctctgtctggttacgtcgcaggagcttctgcagatttcctgatcaaatctggtttctctgttgcattagttcggaagattatgcaggtaacagcaacacctgaaattagacttgtgcagcacttggaagttactgatagcttagcacagccagaaacataaaacttaccacaattttgttctctattcatgcttggtacagtccatcggttttatcgggccaggcgtttcactgctttgcttaagatttgcccagacgccatcagttgcagcagtcctcatgaccatcgccctgagcttgagttccttcagtcaagctggatacttctgtaatgtacaggtagtgtttcctgcattaccctgctcataccagattccgccttaactcgaacaacctttttttttcttcttgttcaccacctcaattgcaattgtaccctatctgacggaatgtgttcttcttgattgttcgagcaggacattgctcccaaatacgctggatctctgcacggtgagtccacaaactcgatcagctgtacacaagacccacaccaaatgaacgcactccttggatcctgaaatctgacatatcttcttctgcttgaacaggactgacgaacggcatcgggacagtggccgccatagttagcaccataggaacaggctacttcgtgcagtggctaggatccttccaggccttcctcaccctcacggcggtgctttacttcagcgccaccgtcttctacaacacctacgccacaggcgacctaatttttgactgagatgatgacattacccctcgtgtaaaatctcgaagtgtagtacttccaccattgtttctctcctagtcctatggctgagccaggaaaccaataaacagatgttgattgaaattgattgattgactgccatttttggtgtaaaattgagtgcaaccgcggttacttttgaggaagcaaatcgttaatacaggaaaaaggggtggagccgctcatacgcggttcaggtgttcgacgaaattaccgagccacgcgcgcggaaggaagcgccggggaggggcatggagcggcggtacccccatggcgcgcgcgcgcgcgcgggggggatgctggctcgccgccggtggcgccgcgatggaagacccgaagaggcgagcagccgactgcgcggcgtcggcggcgtcgcgcaaatccatggctgcgaatgcaacttttcggccgtggatgtggtatgtgtggtggggggcgcgtgcgtccgttgctctcgggtgagaaacgtgggccggtggattgagtgggattcttcgctttgggctatgtaggccaatccttcgtccggcccagctaaaatttggcctgtacacgtttggctattcaccggatcatcccatatcctcttggtatttcctagctcgaaatcagaatgaccataagctgacagaactttttatctggcaatgacccattttccatagacacacggaaaatatccttacagcaaagagaaaaaactgacagaactggtactctatccacttacacggttacaccaatcattcatgatactgagttttgagtatgaacagtgaagttgcatacgacaagttcacataaaacacgatgaagagcaggacagattcatgccttataaaccttgcagttgcagcgctttcatttctctacctttctctgagttcctccgatatacagaaggggctgctctatgtgctctttattctcttcagatgatttataaaaagattcatacagcagaagggaacccggtcaggactcaggagtcactcctgctaggcttgtttgaaactggaataacctggaaaaggaacacagtagattagtaagtcaccagatgaccatatgcaactcggtattggctagtccacatacatttttactgccataccgtctctgaggatggtatccaatcatttgttgcagggttgctcatgcagcggataatgctgtcagatgagtaggcaacggttgtcacgttgaaggagctaccattgggtctttccactttgataaaccctgtaccagtctgtaaagataacaattaactcaaccatttcatagagtattgtcgttttgttacagaatgcgcatggtggtgaaattagaatcgataatctgttgttcatggaaatgtattctatataaggtacacatgtttttttttttttgcgaggatataaggtacacatgttagtgcccctgatctgaatgatatgagccatcacatgtgacacaagaactccacatcagaactttggaattcctaacaatcatcaaccattagttctctttgcagggcctaaactatatttatgttttccatgccagtaccggagtgagcaatgaactgctagctagatacaagaggcttcggaaatgcacaagatattactggcaagtggcaacaaaatgcacggcaatgagtttaggtatgtaatggttagcatgtaagttgttttgagaggggaagactacactatacttaattttcatgacagactaaagactccagatttgtgtatgcattcgactagacagcagagtctattaagagaaatgcttgtgcaagaaggccagtgttccggaatcgcactgggaaccagaatcgacagatatacagcttatttgagcactttggttgcaatgacggttcgttgcaggcttgcagccagttataacattatttgatagtatttcaagggaaatgctatggtgctcaagtcttttttaaggttctcgtgcaaacaaactttcttctctaacgaatttatgactaacatgcgtcttctcggaaaattctagccattcaattgaagactaggtaacatgttatttatcgacaggtatttgatctcataaaacaaaaaggtcctgaaaaatattactaacaaattctttactggtatatcaaatttctctaaagaactagtatatgcccacatacccacatctacgtgctataaatttggtgcttggtaggcttcataggcagttaggcacaacaatactacaaagcttaccgtgtggtgttgcttgtcgatgcaattgagcccgttgtagtattgcgtctccacatactcctccccgttcacatccccaccgtccagcaccaacttctacagcaacagtcagtaccaattagtaccaaacagcacgctcacatcgatcgattcagcagcaacaaattaacaaaaccagaattccacaaggacgaacagatcgccaacctggggtttggcctcgaggtcgcggagcctccgaagctccggcaggtcggcgtcggcgtcggcctccgccccaccctccccggcgtccgacgggtcgctccgcggcggcttggaagggcgcctgggggccatgctgtcgaagtagccccgcacctcggcctccacccgcgccgcctcctccggcggcaggtgcgggtcgctgcgcgccggccgcgtcgtcgccatggcggctcagctcggtccaagactgggttggcgggcggtggagtcgccggtttccggggggcggttttgcgagcgcgaggatgtccggctgacaggtggggccctggtacgtgggcaaggtggcgatgccgtgaatgtggatgagatgagatggggacgtttgatcgcgattagctggggttgggccgggcgaggtggcccactgttccgtgagccgtgtgaccgcgacgcggcgtgatggattttgcgagacggcgaagtcgagaacagtaacaatcttcatgtgcccgtgcaaatctcgcgtgctagcgacttcccaattgtaggatgtgatgtgtttctatcattgttcaaagtacaagaaattttcctttattttccaagttctctgtttttcactggcattcatgtattcctttttgttcttttatttctgaaatcttacttgacaacatgatatacctttctaaattttagtttggtttacgtcccaaaggatttccaaccgaccaaacgaataccttcgcatgatatcgtgaaagggaaaagtccacttttaactctctcaaataaagatcgaatctaattcatgtatcatcaattgtaaaatcgagtgtaacagctatttcaactattaaaaccagtagaaaattactcctacgacaatattgagaataatattggttgacatggcatattgaccacagtcaaaaacaccgagtcaacaagaaaattgagaatactatatggagcccacatgtcatcctcactattctcctctgtcttcctccttcctctctcccccatctctctcttctccttttacgaaggtagttgttgatggcaaagaggtggatggggaatcggtgatggcccagtcccgcctaatgcgcccacaccactttggcatgtcgtcatctctactacgatagctggactccacaaaagcagcggtaactaacgaacctgtgataaattttgtggtcagtcacgcatccagagcttggcaagcccatgcaacatctttctgatataagtgtgcaggatggaggggcccaccgtatcccatatctaggaggggccggcgatgggggccgaggctgattgacctcccttcacgtcggtttccactgcagtcactagcctgtagcccagcagcctcctctcagaagccgcccacatctctttcttcctcctcttcctctctctgctatggtaagtgataaggcccatgagtcggagatggatcgagcaagggagggacccgaggctagtggttgcaacagggccggtattgtcgaaggggaggtaaagcggtggggcagcgcaaagaggaagatgcttttctgcgagcttgattgcaaaatccattggagaagggatgggcccccgcgagcatgagactgcatcatcgtcgcatagggtggcagccagcaggtcacggctgtagccacagatgatactaccaatgctggaggagaaggcagcatagaggctcatggggagagagcgatggcggcgacggaaccccgacgtggtcggaaggctatgctaggggccgctccccttccttctaccatgccttctccttcgctcctggcccgccaaagccgtcaaccaccattccccaatcgagctcgtcggcgtcatcgctatgtgcccatgtggggaaaggaaaagaggacaaaggaacataaaaggatgagaggagaagaaagagccggtgacactaacatgtgggcctcacatgctgactcaatcaattagacctagtcaataagtcacgtcaatgaaaaccactcttcaaactgctgagggagtcaaaccacaacggtttcgatagtttgtcaaaccactcttcaaaccgcaagatatacgatattgtgtttaggggcacgaattagattggaggtatactcgagggagctaaaatagacttttccatcatgaaaagccaggctaagaaatttgttaggtttccatcatgcgttagtttccagatccaaaataaagccgggcccaaaatatattcctcgatgcaatttgtcatggatcgcgattactgctagcgatatgggcctaccttgatcaagccaccaccgcgtgggttttagccgtcggagctgcgccgccgaatcccgccacacagcccatcatccatcagccccctgatgacgcagcgccgcccctcctgcggccgggcttccgcctccggcgagggccacgtgatgcgcgccttcgtccgtacgccctcgccgtcctcacatcgcatcgtcaaaagcttccgcaacatttcttaggctgtgtttagttcatgtcaaaattagaagtttggttgaaattggaacgatgtgacggaaaagttggaagtttgtgtgtagaaaagttttgatgtgatagaaaagttggaagtttgaagaaaaactttggatctaaacacggccctaattccattccttccaaatttacaagtaaggccgttcacaatgcaaggagctggcattcagcctgagtcctccacgtccgccagcacttaagattccatgccacatttcttgatggcccaccgaaatgaagagaacctgtgaacctgtgaccaaaacctgccactcggtctttgatgatatcaaggcaattgcagtgcgtggggctttgcctcgcctttgctctgcatggatttcgctatgtgactcttgtgtcttttgaaggtcttcatcctacttgtcagttcaggacgagcaaaatgcaaaacgcattgctattgcccttaacaagctacaaattggtagagggggacggtcttagtccttatagattacatcaattggtgtgtaaactacaaagtacaatcttttaatgtgtattcccatcataatctctgcttgtgatttttagaatcgctgtcagcgacacgctcaatacacaccgaaggctttagctgaagatgacacttcacctgtgcgatctacatcttacgtgatgtggcacggaggaacatagctgccgccacaagtgttcagacatcacagaacgctttttctggagtaaatgagaattatacttctactactaggtgtcagtcgctcagaattcagaaacatatcaagaatcaaagatgctgttaggtgcccggtggaacggacgcaggtatgcgtcatttctataagacatgatccctccatcccaactgcacagatcagacaagttgattggtaaatacatatagtgagaactgaacgctgaaagagagttgtaaaattacaccacattggaaaatacaagttgattggtggtgtaattttttttcgttttttcctagctacgacccttcagagttgtaatcttatgattttttttgttttatccatagaacttcgcaccgtttcgtgcgagtcgttcgaaaaaaaagctgaaagagagttgtaaagctccagccagcagggccaagtgttcatatgttccatgtttctgtaagtagccagcctaagattttctcaggtgatctcaccgagcttgaaaattctgcagatggtgatttctgcagccatgaatgattcttaagccttttgcacatcatctttccctctccctgctacgtgctggtttggaaacctttgcgacctcatataacaaagagcagccacaagctttggagaaacctttatgagacctttcagctcaacaatccatattgatctcacagcgtgcagtttcggggtgcggaaaagcgacaggtatagcatccctgattggtgtgtagtgggatgaatcacgctaaaatcagttcattcctcctaccgataatgggcgacgcactgatgaggtgcagaataatacaagattgggcgtcggagatagcctataaaccactctatggatttgacacgcaggcatgtgtgcacatgatccgttggggctaagatcaaggaacacatcaagaagcaagctctttgaccggtgatgtatttcttatacgggagttaagctagtatcactctctaagtatgaatcactgtactgtattaataattcactggcgtatagtagtgctttagatagttagatgatgatctgacaggcaatttgcttgtccatgggcatgagttgggctgagctaagtgtgatgtgagcaaatgtcaacatctgacgatggccgatctcatcttcattcatactctttaatttagtcatgcaaaactgataaaaagagagacaaatcgttcctcgtcactcacttattggaattgatcaagagcaccgttgacaccaaactagtccacaaatttgtatgctcttttttttttccttcatgctgtggcctcaaaagtcatctttttttttttccttttcgtggtcgcgcgcgagttatgattgcattttattcagaaggggtcctaatgagtctggacgtaagagggcggttgcagaggccacttgttgttttgtgtaataaaatttgtgattaggacgtgggggagtttggattagaaacatgtactccctccctgccccatattatatactccctcagtcccaaaataaatccaatcctaaagattcgtatttagaattaaatttattttgagacgggagagtataagttattttggtttataagttaactttgtttaagtttgattaaatttataaaaaatgtgataacgtctacaatataaaatagatatagtactccatttgttacaaattacttgtcgttctaggtttgttctaaattaaatattttaatctttgaccatcaatcttcataagctcatatagtttaattttataagaattacatttttttattatatacttcacatgttattaaactacatagatttctaaaaagtaataatcaaagaaaaatatgtttgacttaagatatacacggaacaataagtaatttgaaaacaatgctgtggagattatgggtaccccatacccacacggcatggttatccgactagttataggggataacttatatatatgtaatatgtaacagatcatgacttgggtgttacgtttccttgtatattacggaacggcctaaagtcctgatctaggaaaccgataccgtattggttaaggtttctatcttgtaatcctgccccccatcctatataaggtgggcaggaggccctctagggggcatatatgagacaacctgatcgtcagatcaatacacactcggcggattcaaatccctaaacaggagtagggtattacctctcattgagagggcctgaacctgtctaaatcctttgtctccacatccatccacttttaggtctcgtgcgctaccccgtttcattattgccgaattcatgtttcgacagttggcgcgccaggtaggggttgcgtcgagttttctatcgacgagtgcgatggaatcaactccacgagtcgccggtattatcttcgcttctgtatcgtgagatccgccgccgtcgacaccacccgccgatcaaatcaatctacagagagattcaatctactatggctgccaccagcttcacttctgtcttccccaggatctttctggacttcatcgctgccgccgaaaatccgaccagccccaattagtcggctaagagatcatacgtggcatagcaatcaacagcgagatacaagactggacagctatggagttttttcttttctcaagatcagccgtggagatacatgcatgaatatgattgaacagcatacaccggagagccacacatgttttgatcggtcttatatcaatctaaccgtacatgtttcctgctttatcgctttggttcttgccacatacaagaccatgtcgatctcgtttggtcgccgttgtattcatcagtttcgtcaaaaaggttgccgtactgccgcagtcatcatctgtatcaatctactcagcgatgcagatcggttcccagctgccaacgcctcttgccgactgatatcaaattatctggcaagattgaattactagttcaaagcggaatcgacatggacacagagacagcgtcattagcaactacacgtggcatagcaatcaaccaggaagtaatgatctacacatgtgtgctcctgatcgtgcatgaattgggccaccgctgcgcactccaaaaccggccgtgggacaacatacgtgcatcaagataaactactatcaggtttatcgttttaaattttcttatgtgaaatagattaattaacagatcactaattattatttgatctattgttttaacgcacgtaccgccggccgccctcgtcgctgccgattggattacacgcctccacggttggtgtgcaccgtcgccgttgctgatggcgacatcctcttcaccgccggcctgcctccgtcgccgccgagtggtgcctccgcctacacggctggtctattatgccgccgctgttgggcgtctacgacttcaccgccggcctgcctccgtcgccgccgattggtgcctctgcctacacggctggtctattatgccgccgctgttgggcgtccacgacttcaccgccggcctgcctccgtcgccgccgagtggtgcctccgcctacacggctggcctattatgccgccgctgttgggcgtccacgacttcaccgccggcctgcctccgtcgccgccgagtggtgcctccgcctacacggctggtctattatgccgccgctgttgggcgtctacgacttcaccgccggcctgcctccgtcgccgccgagtggtgcctccgcctacacggctggtctattatgccgccgctgttgggcgtctacgacttcaccgccggcctgcctccgtcgccgccgagtggtgcctccgcctacacggctggcctattatgccgccgctgttgggcgtctacgacttcaccgccggcctgcctccgtcgccgccgagtggtgcctccgcctacacggctggtctattatgccgccgctgttgggcgtctactacttcaccgccggcctgcctccgtcgccgccgactggtgtcttcattgttattgatggacgactttgttcccacattggccacttctgccatcaccaaggggaatattacaaagctaagtcatcatttattttattctttatatgatatttttccttttcctctgcctcactacaccaattggtcctccattgagtagtgagtcgggggctacagatattatatcatattttttataatatttatcttgattgcttgcgacatattctgagtacaaaagtgcctatcgagttatggagttccatcttcctatgctttccgtttggtttgccaatggatagttgcctttaggccgattcctagcacccgggggctcgttggatggaccgagtaacgcaaggtgctaagtattattcggaataaatcaaaagcatagagataagataatttattttctgctcttaataattgcaaaagtacccgagtagtaaactccgatccgtgaaactttgttccattaatgacgaactcatgtcactcatatgcatgtttgggaagtgcttaggccgactcccagtgcttggtggctatgactagtcgggcagagcgtttaaacgtaataagtcatctgctcggggaaatcaaacttgacaagaggagaaatacatatttataaatattttaaaatacttgattttttctcgagtattatatttatatcagatactactcatcctatatgtttgttctgcaggatccagatccagatatgcataaaagggattcatggctttaagcttatctcttacgctctaggaatggatcagtcagaacatcaccaccggctcgcctcgaccgccgccgactggtgtttccgcctgaacggctggcctattatgccgccgttgttgggcatctacgtcttcaccgaccggccgccttcgccaccgccgactggtgtttccgcctgaacggctggcctttatgccgccgttgttgggcgtctacgtcttcaccgaccggccgcctcgaccgccgccgactggtgtttccgcctgcacggctggcctattatgctgccgttgttgggcgtctacgtcttcaccgaccggccgcctcgaccgccgccgactggtgtttccgcctgcacggctggcctattatgctgccgttgttgggcgtctacgtcttcaccgaccggccgccgcatccgccgctgactggtgtcaccgcctgcacggctggcctgttataacgccgactgatgctatcttcttcacggctggctacatcgcagtcactactaataggcatcagtatcttcaacacaagctgcctacgtttgccatggctgccgactggtttcttcacttccatggctgcatgattctgccagtgttgattggccttaccatcttcatcgccggtcgtctcgtctgctgctgactagtgccctcgcctctacatctggtttatacagctaccactactgatggacatcatcatcttccgtcgccgactgattatgccgccgccgactgagcgacttcatctttattatcttcggcactggcaaactctattgctgctacttcgcaagttttgctacttcaccaaccacgacgtatttgtgagcctcgacatctcggcatgcgatgccatgttattttactacaacaagaggctctccaatattcatgatttctacttggacatcttcaacacatatcttcaatcaagcaataactattcgacgacaagaggctacagttttcgactctatgttcagttgtttcccaactaatcaaagagtcgggggctacacaaatacaaggctcaaaatttgacaaattttatgtcaagctgaagaaatcaattcatcaacccacgagtcaactccaggagtcattatcttcatctttgcttcggagcaaacattctacttcaacggttgacctactatgcaaatgctgatgagcgtctttgtcattatcattggttgctacattgctattggctggatcaccgacatcgtcatcttcatcatgtcggttgcgtttgtcgtcgtcaactacacaactttatcgctgagcgccttcatattcattgctggctgacctgactgccgccgactggtttcttcgcctccatggctatgcgacttcagtacttttgattggtatcactatcttcactaccaccaatatttttgccacctctggtgggcaatattctctctatattggttgtcttgtctctatgccaactgcgtcagctaccatcaatgaacaattgtgactacgtgctcaggggcttactagctcaaatacaagtattatatcttcaatttggacttgctccggatacatgcaacatgaattcatgatcatgggtctattttctatgctcaaagactggactatttattattccccgtaagggttatcaaccgaatacttgcgccagtcgggattcaatttttatatctattttggagtatcccataagggataatcactcagatcagaagctattcatatgagctacgcttggtctatattacccggaagatttattactcgggagcatgttacatgtgtcatcctttaaagggtgtcgagggcatattttttggcctaggcctaatatgtctgcagcccatattttcaggtgtggcctgtcacgttcttttagggacttaggcactttttgcttaggccaaagtgcgcgtgatcaagtgcccaataccttaaaatccttttataccgcagttacttaactttttaggagttggtacaatgcatcttaaaaggtgtcaaacagtaaagctttatatagctgtcccgctgacttttttatatataagtcaaggtgctgtttgggtttttaagcaattgattggatacaatatcatcgcttttcgccacgtaagtgtgcatttttattgaccaatattatgacttaggctaattatatattgtggccattttctaggcggttggtaaatcctttatgagtttatttactcggattttacaccacatatgccatatatttccaggtgtggtgaaaccatgtgtcttctagggacttaagcacatctgttaaagcagtgtgcgcatggcgtatgcccaatactttgaaaatttctttattcacaatatacaagcttctttatagctattttgctatatcactcatcatattttacaaagcagttggtatatcactcggatcatgttatttggaggattcacaccgcatatgctatatattgatatcaagtcacttggttgagtacgattatcaaaaccactcggttggttggattatttattccttgactatatgcttggtttgttcaattaaccacattgtcgggggctacacctattaggtgcatctagtcggtgcacctgactttattttccagccctccacagtcttcagatttggtaaaagtactcgggagaccatgacaaagatgattgaagcactcggctttggagtaatctggttcgagagaagattatcttttcgactgcgaaggtctcaggggctactgtggagattatgggtaccccatacccacacggcatggttatccgactagttataggggataacttatatatatgtaatatgtaacagatcatgacttgggtgttacgtttccttgtatattacggaacggcctaaagtcctgatctaggaaaccgataccgtattggttaaggtttctatcttgtaatcctgccccccatcctatataaggtgggcaggaggccctctagggggcatatataagacaacctgatcgtcagatcaatacacactcggcggattcaaatccccaaacaggagtagggtattacctctcattgagagggcctgaacctgtctaaatcctttgtctccacatccatccacttttaggtctcgtgcgctaccccgtttcattattgccgaattcatgtttcgacaaatgcctaaatatatttaatgttggatttaataaaactaatttggtattgtaaatacattttttataaacttggttaaatttgataaggttaggagcctcttctacagtaattttcttttaagaaaatttaaaagtttgattcaggacaaattaaaatgacttataatatatgaagcggactgggtagcatttcttaattttatctctagaacggaactaacttttcactaatctgccagtatacctctcaacagacttatttttccactccactgtagcacaaagctggtacgggcaaaccgatataaaattaacctgcaagcaagatggcgtgaaacatattctggaaaggaaaaagtagagagcgagtattagtattttgttgcggagaaagacgacaagaacaacacgataatcttgtctgagatagccgccacagcttagtggtgcattgcacactaggctctaggtgattaagtggtgtccttttgctttctgatgttgggtgagtgtgtgtgtgtatggagggggggagccggatcgagctgcgttgtgtgctccattatcccggcgcatgcgaccatccataccctgaaaccgacctgtggcccgacggagagtgacccatacttgaccatgcccgacccactatctatttctttctctgtgtggatgttcgatggtcggcttataaaccaaagcgaaatttaaattttaaattaatatttttagtcttatttttaacagattaagaatataaatataaaagttgtaccataaaatcatcatttctagttgtttcgtttattttccacctcttgtttattgttgtcactgctggagaaaccatcttcactcccggttcgcagcccctcacaaattcacaaaaacctcatagatcatatcgccaccacccactaccgaatcgcgtgcggctcgctgcctgtggcctgccagtgacgcgcctcctcccgctaacgcccacgacgcgcctcctcccgctgacgcccgcgacgcgcctcctcccgccgacgctgccgacctgcctcctcatgccgccacacctccacttgccgccgcacctccacctgccgccgacgacgctggcggccagcctccgcccgccgccgcccgtggcctgcctcctcccgccagccgcgcctccacccaccgctgccgacgcggctccgccctcctctagccaccgctgatgcccgtggccagcctcctcccgccgacgcgcctccgcccgacgcccgctgacggagagagctggtaaagggaggaaggatctgaggagagggggggatgtcacctcggagagggctgggaaggggaggaggctgggatctagaggagggaggaggaggacgaagagataaaagactaaggatgggagcgcgaggagataaggatgaaggaggagaggaggcgcatgcggcagcgttttttttttcaatctttggtcccggttggtataaacaacttggtactaaaaatagtgaggggcctgacacaacttgacaacatgttgaaccgggactaaaaatgatctttagtcctggttggtaacataaagtgtcgtgccgcttttgaaccggggctaaaaatgtttttttgtcccagttcctattcgaaccgggactattgtggattttgcaccacctagcaaagatcagtttttcagtagtgtgtgtttaccttttcgattaagcgccagatcactaccctcggcagtatgcgggttttcataaatgtttatcaaaatttgacatatttcgatcaaaatttggtcaattttaatgttttatatttgagttctcaaaaactattcggaatttcacccggagtatactttcttggggtatcgaaacatcaaaatttcgcgattttcggtcagttttcataaaaatgtgaacatgattattgctcaaccaatgagatatagtttgtgtagtccattgctacatcacattctggtgtttatacgagagttacgatgactatgtatgtgtacatgtacgatagtctcgtgctctcacttaacacgttcagcgcacaaacacaacattattgttcctacatagatcacgcatgcgtacgttcaatctgtttgtgatatatatatgcatctaaaagaaagtgagccattatcacgagatctgcatatatacatgttagtatattgctccgtacgatagtcattggtgcgtgtcaacttcggttttgatcgctcgacgagtcgatgataggcatcaatgcgactttcaggtcccacgccgtggaacattgcctcttacaccaacccgatcaatcatcaatcaaggccagcaattaaccccaaccgaaccctgcaccgtagaacctatcttgccatctgtacacaacatgtacacaagctcacgctcgaatgttcgatatatccctttcggcttaattaattacacgcgtcgcattaaccactcagatgatgaccaggttaaccatctgttattagttaatttaccggacaaacactacttagaaaaaacattttttacagacggccaaaagtaatttttccaggtagggaaaggaccgcctgcagatcaacgactacgaaaatcattcatttttataggcggcccaatggcccgtatgtaaaaatcctctagacgaaaaaaaaattgcgcccagccagccccgcacctcgccgccgccgctctcccccggccttcctccggccagatttgtaaggagaggggaggggagccgcaccggagccaccgtcgccgccccacgcggcatcgtcttcgccccgcgcctcgttgacgctgccctccccgggcctccctccggccggatctgggaggggaggggaggggagccccgccgttgccgccgtcgccgccgccgccccgcgcgtcatcgtcgccaccccgtgccccgcgcctcgccgccgccgccctcctccggccggatctgggaggggaggggaggggagccgcaccggagccgccgccgccgccgccctgcgtcgtggccggccccgcgcctcgcctcgccaccactacccttccccgacctccctccggccggatttgggaggggaggggagccgcgctgagagccaccatcccgcgcgtcgtcgttgccgccctgtgcctcgcctcgccgccgctgccctcccccggcctccctctggccagacctgggaggggaggggaggggaggaggaggggcccggtggggagaggagaagaagtgttgagggagagagagagagttaagagggaaatgagtggtggaggggtggaaggagaagataagagttaagtggtccgtctgcgaaaatcattttcgcaagcgccgcttaagtgatccgcagcgaacttcaccccaatttatatttttataggtggttatttggctaaagggttatgtccgcctgcgaaaaaaagatcctatgtcaggaaaagtgatttttctagtagtgaaaccaaattgcaaaaatatacctgttcgggagggttttaaatcattaaatctaactctaaaaacggagtatggaacggacatatgaagcagcctaaattaaccgtgttgaatcggttccactctttcatatcactttagcccttcgttttctgggtgaagtttaaatcatttgattggactttaagaagagatgaatctagagctagcggccggagcctgtcaaacatgccttaattataactctcataatctaatattgcgctggttaattaagctggtgttactttctcacttgttacacgggacccatccgtggatgtgattagctgtagagccatgctgtgggctgtggcatggtaatgatggtacgaaagccaaggcggtgccaagtcaactactagctgcttctagtgtagctttggcacgtacatacaacggcaaagtcagcttgtatatatacacggcgcgtggcaaccgtagatgccagtagagagagcacgaaaaattccagaagaagaagcgtacgctgctatacaaaaggggccttcacgagaccacgagtttcaaacatgaatttaaaaattccagctctgctgtatgcttcaaatgtcaacgacttgcacgagttgaatcaacggcaattaaacaatttaatcgcacgtttcttgaaccattatgttttgcctatttcaagtcactactacataaacctagataggtaaaactagataggggtcgaatttttcaaccgacacatagaaagcataacatattagaaaaatcaaaggtgctggttacagaaccgacacctttaaggtccaaaaaaaagaaaaaagcggcttaatgcatgggctcgaatcgagccgatgcatcgagcagctccccttcacccgatttcacccaacatttaattcatacaatcaattggcatcaagaattcaagaacattgatccaagaacttcaacaacatcaacacaaacacaaaacacagagaagatggagaggatggacgacggcctccgtgaagaggatggagtggcatacgagcagcacgtcgggtcccatctcgcacagctcgtcggtggtggcgaagaaacagatctagcagcacgtcggaaggcgttgcccgtcgttgccgcctcacctcccaccatcgctagccgcacgccactaccatcgcctccccccccccccccgggtcggatctggcgaaggggagggtgctgcccgtcgttgctgcctctcctcacaccgccgcacgtcgttgcgaccaagagagccgacagagagagagaggggggaccgagagagaggggagaggatgcggtggagattataattaagacggagaggatatggatagatggtgctgtgcggtttggctcagctcgattaaggggtgtcagtttttttaaggaaaaagtacgttttacccccgtactattgcggttgaccgaaacccccccccccccaccgaactcgaaaaccagtcatttcgtaccccgaactattaaaaccggatagttaaccccccttaagcacacaatggggcggttttgactggagtcgtgcgcacgtggcagtccaacgtggcaaggcgggctgagtcagcatagtcgcgcctggtttatagacttgacccagaaaaatttcccctccctccctttctctctctccctcccaaaaatttccccttctctcgaaaaccctagctagcacaggcgatctcgttggcgactcctgcacggcggcgagggtggtgcgctccaaagcaggtgggtgtcgtggtcagaggcgacggggccggagatctccaccacggacgcggcggcgacggtctgcagtacggccacctcgacctcgttggcatgatgacgagctcaggtacgtcccggggctcaaggtcgtcttcttgggctggaggtcgtgaacgaggaaggatgcagccgccagtaccatatagggaggggcctctcgattatgagccgccagtgcggctaggtggatttcgtggagtcccagtaaccccgggagaagatatttcacatgctacaatgcgcgtgtgagtaaatttgtatttatttttgatttggctcatttgtttggtttcaaactcattcgatcttggattatacatttatttgtgtagtctggttggttgcgatttttgggagtggcatgaccctgagtcagatccatattggaagcaattcctgcttgatttgaggaatgctgtgtggactgtaagagaaaaaatcaatgggctaaaggctcatctccaggacagcaggaatgaagccttgaagaacaggtacagttgggacaagcttctatattgcagtgcaaaatagaacagtgaaatggaaatacaaagaaataagagcactagttatagttggtggagcatctggctgaacaactttcgtacagcctgctaggaatccctgtttgcaagcagccaggcaaatatatatccttttgaatataggactaggctggtcagtatctaacttgacaacaactgtactcccaggattactcctcagcaactctaactgatagtcaaagattctaaagtattcacccctggtggactcatatatcttcctgaatacaaatgctttggctctcttgcactgcccaacactaacatttgcaaacatttcctctgaaacagtggactgcatgctctgtatactccaagttggattatctgtgatcatcttctcatacttctgagcaatcctcttgtatgtcactaggtggttatccttccttggtgggcaggtgtgttcatcaactagactagctatttgccagctttctgtcctgctattctttgatagcaaacaagcccacgggcaagttgccaaatcacacttggcccttgttctgtaaccttcatcctttataaaccttatgaacctcttgctgtccagtgcaagctgcaccactgcctctttgaattctttcttgccatcaaatttcattcctagtgcaagcctagcaattggcctattcacattaaatctgggggtatttggacttctttctgaccagctgtccatcactatcctcttcataggaatcatcatctgcactgctattgtcatatgggctagcactgtcatcaccctcaatctgaaccaaagctctactatttgtctgcctagatgacccctcacatataacatcatccaaattccctacctcaccatccttcagtttcttcttgaactctttgtaagccttcctgatttgctgaacctcttcatcttcttctgatgaacatgagtctccaccaacataatcactgtcagagtcagaaatcacaggtttcttcggcctctctttacctactaccactgccttccccttatcactaggttcagctactaccattgctttttctttatcaggtgtacgaaatgctcgcacttgttccagatctctctttgtcttctctggtgtagacactatgacaagaacttccttccctatattcaactcaaacaaatcctcatcttcctcatcatcccattcatcatctgcaggagatatgtcctgcagttcatcttcaaagtcactatcctccttgctgccagactcactggacccctctgccattactgtctccacataaatatcagcaacaccaccttccccaacacagtttgacatataattgtagacctcatcatcaatcaaaaccctcagcccatctgcaagttctttgccaggaaacaaccattgcagaagcatgccagggatcacttcacaatgatctttcaaatgtccaactatctcaggcagagagaccttatcacgtttgatgtaggacatcccctcagatccaccaatataaaaggtttccctcccattgttaatgaaatccccaccaaagtgaaatctaacaggtaaatactctagaggatccattcttaacctaaaaacaacatagtaatggcagtacacaatcaatccttttgcctaaatcaattacaaaaatcaaaggaaaacaaactctcacacatccaactgattccatatgccctagtaaaaaaatcctacacttttctaggatctacatcacatacctgcaaagcctagctgcgtcgctcttacttcatcctcctcgacaagcagctggtgctggccgatgtggagagcgtggccgccacgaccgtgccgcagagatccctcctcgtcgcctttgagcgtgccaccctcgttgccttgggcgcagctcactcgccggcgtggagtgcgccgcccatcctcaccggagtcgccgacgagatcgcctgtgctagctagggttttcgagagaagggaaaatttttgggagggaggggaaatttttctgggtcaagtatataaaccaggcgcgactatgctgactcagcccgccttgccacgttggactgccacgtgcgcacgactccggtcaaaaccgccccaatgcgtgcttaactattcggttttaatagttcggggtacgaaatgaccggttttcgagttcggggggtttttcggtcaaccgcaatagtacaggggtaaaacgtactttttcgtttttttaataggtgcatattttttaaaagaaccgacacctatttttatattataggtgtaggtttttttttcctaaaattgacacctctagtgtttaaaggaaggtgtcggttctgtatatttttcatcgtgtggaggtgggaaaagatctataggtgccggttggtacctatatggccggtccttatgagaatttttgtaatagtgagtttgcaaaagtagtgtactgagtactgtacgtacgtaaaataatgtctaatcaaggccgtatacgaagatctggacggttagtttgatcagtttttctcggccaagagcagcaacggagcaaccaaacctgacttagtcgcaaacggataaataatctcataaatttataacgtacgatcggtgcatggtcttgctcgtctaacgaactcctcgtccctgctactgcaaatcatcgaaactccagttgaaaattagttgggcttgcacacaagtgctgtcctaacatatgcatcagctggaccacctccactggccataaagctcacaatggaaaatcttgcacctgttttaattagctatgatccaccatagtatgtatatggtccatacatgcatgcaagggcacataattagcttaattaattagctagtccttttcctgtgcctcaaaaagtgacaaaacatttcttatgtgcggctctagctagctaaggtaagtggacccatcaagttcgagatgatgaaaatgcatgcatgtttgtagaatgaggctgatttgtgaaggtttaggtggtgtttagattcagggaccagtcctgttacatcagatgtttgacactaatttgaagtattaaacatagactacttacgaaactaattgcataaatgaaagataattcgtgagacaaatttttaagcctaattaatttataattaatacatgtttactgtagcatcacataagctaatcatggattaattaggttcaatagattcgtctcgcaaattaggccagagttatgaaatgagttttatcaatagtctacgtttaatacttgtaattagtgtcaaacatccgatatgatagggactaagaattttagtgccatccaaacaaccccttagtttgcatgttccaagatatactttgatgatcatcgacatgcatgtgggtgtaaattggatttggatttgtcttattgatgctctaccatatcaggaaagtagtcttagacattataaatagacgtgacatttttcataaaatagggggatacactgtgatacgggtacaaattaaactatacaaatacaacaagacactagcttatttccatccaaagtcatgtatataaagcttgtttcggttagaggaaaattgtttttttactgtttaatctgcagattgaatattgcaatcagaaggatgaaaaaaaattaaaattggtgcgtcacacgaagttgctaaaattacagacatggcatgttctagatcaaaattgttgtaagattcccattggcccaatttgccttacccacaaactgaattccctttccggcatctttgtctagcaggggtaccgagtgccgagtacaacctaaacgaccaaaccgttgcaagccctgctctgaatcgatcatctccatgactcctttctggtgttttggaaagcaaagtcttgcaccttacctctttctgtcttcagtccacccggggtcaaattgtagatgcctctctgcttccgtttcttgggtaactgttcagcactcccaagttccaactccaagtgatcatgatagcaaaagaaaaggggtaaataataaggaaaagaaaaaaacaagacgcacaacaacgcaaacgtatacagatcacatgtacactttctgcatttcttaaacaaaaacagtacaaagaacattccattattccatataccttcgagcatgcttgccatataaaggtgccatgtctgagtcatcctaccaaagtagtcccaaggcaaacccaatcaacccgacctaactaacgccctccgtcttatcatagccgtccattgccacgatcgggcggccgcgcgcgtagtcaccgaccttttcgtaacaattcagttacaatgtagtactagtacaagtctattgtagcacagcttcacgttgccgaagcagaggttgcggtgcggtgccgccggtgcggctgtcacgtatatgcgcgcagcgcgcagacgatcgattcgtctgcgcatacgagctgacgcccactactaaaaacccacggaaacaacgccacgcgcggcgtgagatagatcgattcgttcgatcgaggcgcgggactcgcccggtggatcgcgttgcgtacgagcgtacgagggagaccgacgctgcagcgcacgtacacacgggacgcgacgagacgctgcagcgcagcgcagcctcgcgcgcgcacggcgaggggaagaaacacgcacgcgggggctggatcgcgcgctggctggctggggggaagcggcggttggcgagcagagcagagtgagttcccgtttctttctttgtgttcccgggcttttctcccattcatccacgcgccaccacgcggatcctattcttaggctcccgcggccggacctaaccggggcggttaagcgagggccgcacgttcgcgggaggcaggctatggccacggccgcgacgacgacgtcgtccacggcaaccaccaccaccaccacctgctcgtcaccgtcgtcgaccaccagccccatccacccggccgtcccgcaccggcggcgcctcaacgacatcgagcgcgtcgactacgcgcacggcgccgcggccgacgactgcgcggcctgcggcggcgtcgcgcccgacgccgccctcgcggacgacgacgagtgcggccacgggcaccccgtcgtcggggccgtcacgccctgcggcggcggcgggagggcggcgctgctgttggcgcggaggaagcgcgcgtgggtcgtcggggcgggcgggcaggcgtggatgaggggcgtcgtgctgtgcctgctcggcctcgtcgcggtcgtcgggttcttgggatcgcaccggcgaggcggaagcggcggcggtggcggtggcgcaggctctggcgccgttggcggcggcggcggcgacgacggcgggaggctcgtcaagaaggtggaggtggccgacgccgacgtgatggggtggacggaggagaacctgacggctctcacgcgccgcccgcccgacccgccggtgcgtacgtgcactcgccgttaatcactcgatcaactcttacttcacttgatcgacactcttttattaccaagatcatttagtcggtaataactactccgacataatcacacctgctcttggttttactctgggaattcaatgaactctctgaagtgtgtttcttttctgatcaaatgggactaatgttctaatctaaaagcattttttagtcaatgtctaatcaaaaccatttttttttgttacaaaacattggtccaaagggaaaaaaaagaagaaaaagaagatacagaggtgtgcttgcatctaggccagctgaggattgagtatatgagagaaaggatggatgataacgacaaggatatttgcttgtatttgttgctagcgtgattcattggcataaaaaaaagggaggcagagactatatgacattatgacgttagtttcagagtctagaaacaaagcatcccatttaaggcatttatctctcgactgcttttgtgcaaatgatttccttgttctttccgctgtttatttgtctctgcaaataagacgcatcgctttagttcttttttttctggtcgctgttgggcaattgcggcctcgcaagctagtagtcactcgtaatgagatgttaggacctgactgacctgcggttggtgccgttgaggttgctttcacttgtaattgtcaagtgatgcatttcaaggtgtgaaaaaggttttagtgcataaacagaaagagttttgctggtaaaatattaatcaatatcacatttctgttctctaaactaatgttaagttttattgcacaactgagtttaattgactaaaaagggacgtaattttccatcagacagcttaatattgtaatgctcttcttttggggtttgtgattgatagacttcgtaagattcatatttacccaatcggcggttctcttaggcgatcgttttgagtcagaatatatattgagaaacccttccttacctggtagtggtagggacatcaagatttatggctgtataggtttaggacagagctggcagagactgtccgaaagcaatattgtgcttatgttcagacaagaaatttcattcacgaaagcaagacatccattcaaatgccgtgctgtgcggcctgaatttactcgagtttcctttataacatcgacagatacctgagatatggatgaagccagacagtgagggttatagccaatgcattgaacgcccaaagaaccagcgcagtaatttccctctctatatctttcacttcaatctgttccagctccagttccatgctcatgttctctagttgggtgctcttattgcagggactaacaatgcaactgtcggttatctaattgttgatgcaaacggggggctaaatcagatgagaatgggtgtacgtatctatttaaacggtttaacatgcaacgcttttcagctaacccatactccttcgaaattattcttacagataagtgatatggttgcagtggcaaagatcatgaatgcatcactagtaattcccactctagatcatcagtcattctggactgatccaaggtctgtaccttttctactcaaggatcatccctcatgcccttataaaacatcaagtaaactgaccataagtccttgaatatagtgatttcaaagatatattcaatgttgagcacttcaaggaaatattaaaggaagatattgtaatcgtggattcccttccaccaacttacaaaagggtgaaaccctatatgagagcacctacctcctggtccagggtaggtgttcaaaaacatttgttcctgcaattgcatagcttagaaattcaggaaatatgagcaagctaatgaattgatagctccattttgcaggcttcctattacagagatttttcaaggatactaaggaagtacaaagtagtgaggtttactcacacagattcacgtatagtcaataatggtcttgctccttccctccaacgtctccgttgtcgtgcaaattacaaagcacttcaatataggaaggagatagaggagctcggtcgcaccctggtagatagactgagaaatggaatggatcattatattgcacttcatttaaggtattgaaaattcaaaacattcagagaccaccttacttcatttcctgcaaagaaaccgtttacagatcagcaatcttccattttgctttgttgattgatttacagatatgagaaagacatgctgtccttcactggttgcaatcacaacctgacagtacatgaggcagatgaactgacggacatgcgactcaaagtgagacactggaaggagaaggagatcaacagtgaggagaagcgactccaaggcggttgtcccatgactcctcgtgaagctgctgtcttcctcaaagctatggggtatccttccaccacaaagatatacattgtggctggtgaaatatacggcgcacatagcatggatgcattaaaacttgaatacccgaacatctacacacactacagtctagccacagcagatgaattagaacctcttgagttgtatcagaacaggctagctgctgtggattatatagtagctcttcagagtgatgtttttgtatatacatatgacggaaatatggccagagcggtgcagggtcacagaagatttgaaggattccggaaaactataaaccctgataggtatgtaccttcatacaggtcaagtttttttttctggttttcaacttacaatatatatatttttatctgtaggctgaagtttgtagagctcattgataagctggatgaaggttccatggactggaatgaattccaaagtgaagtgaagaagcatcatgaaaacagacttggaggtccatatgacagattacctggtgaaagtccaaggcaagaggaatacttctattcaaatcctatccctgggtgcctctgcagaaaggtacaaaagactaggtaaaatagattaatctcaaagggagatgattcagtcttcaaaaagacatgaattgtacagtcttcaaaggaaaatagtttcgcagctgcattaaggatggagatgacacttcctcacaagtcacagattgcatcaaagtggaagtcctagtaaactgacagagaccggtcattttgattatttatcctagactgacaacactcgtagttcagggcgtggggccaagaagtgctgcattttcaaagaaatgttcatccaaggaaggaagatgagattctgaagtagttgaagaattaaatgtatcatcgattataggaacagccagaaggaaaactcttcatggaggctgattgtagttagtccatacacacttcccctgttcttgacgttatctgattcgttgtagtgggcatcttacatctggatggattcataacagtaatggaacaaaccacactatcagtatagaatgacagacaaatatttcagtagcttaggtcagatcaataattctttgtaatctagcaatgtgccaatgtcatgcacatcagattagcttcttgtaaaagtatgttctttgttgcagtggcatctgcatctgcactatcctctaggaggaatcaatgtgagtttcagaaacaaattagaaacaaagaaatgcatgaaaacaaaaggaaaaccgtctaaggaaggtggcttcaccccatgagacgtttaccgaggcaggaggcagtgtcgaggcggaagtcgaagacggcggagaggaggcctcagacgcagaggaatcgggacgagcggaggtggtcgggggatgcgagtgtgccatgacgggcctgagcgagctcagcgagcagtcggaatccggcactgaccacggccacgacgcggcggcggggttcggacgaggcgaggaatacaaacctgccggaatcgggtaccccactcggccactccccggaagagtagcgggagagccggcggcgatccggcggcggcgcggggcgcttctccgacacacacggagaccggcagccggagaggcccttctccttccgaaagacacgggccgcgcgtcagccaaagtccagttccagcccaattaacagatttaacacagaccgcacgtcatccgcagccccattacggcccaaccaatattgggcctcatcaaacataatactctttggaataagttcatcttgggtcccttcattttacaccgaatctcaaaaccagatacaaccggtccctgaactaaccggtgcaaacgagatctctcggcattttggattttggaaggcggttttgtctgacgtggcaccttcgtggttggtttgactaggtctccgttccacgtggcattgacatggcgcttacgtggcaattatatctcggaaaaataacaaaaaccatgggcccacatgtcagctacacacaaaaaaaatttaaaaaattgtgaggcccacgtgggccccacatgtcatatcctcccctcactcaactttccctcttcttcctcatcgcgccgcggcgccacctcacagtcattgtctaagtcctcaccgcctccgatgacaacaacggccgaagcatgccggcggcaggccgcaggcggcagaggtggccaaagaaggaagaggcagagaaggtcgccggccagcgcggcagttgtggcgggttatctcctcccaccgccgttggtcgctcgtcgctcttattgctgaggtcgggcgaggattttctcgatgccggggaggggtcggcagcggcaagccgcgggccgcgggccgcgggcggcggaggtggctggaggaggaggaggcaaagaaggaggttgctggcgagcgcgacagctgtggcgggttatctcctcccgccgctgctcgccgctcatcgctcttgttgacgaggtcgggcgaggattttctagatgccggggagggatcggtagttaggaggatggggggtcggcagcggtggtagaggggtagagatggcggcatcgttgccaagaacgacctccaccgctccaacccggctgacacccaccgaaaatagagctcctcgccggggatggccaggcaccgtgggtgggggttcgatggtgacgggcgaagggagaggtgcgcaacggccgagcgtgtcctcaccgccgggatccaaggccgccgtcgccagtcccccggacgacctcgattcccgcgagctatccgcctgcccgccgccccgttgtcgtcacgcgccgccgctcgccactgctccttgcagactgcagagcaagggagagatagatgggggatagagagaagagagaggagtaaggatgacatgtggggccgacgtgggtcccgccattttttattattttatgtgtgaaactgatatgtgggtcccacgggtttttattttttaatcaaattgccacataagcgccatgtcaatgccacgtgggacgaagatctagtcaaaggagccacgtagcacaacgtcagccagaaccgggaacaatattgtccgagggacctcgtttgtacggttttgtaagttaaaggatgcattgtacccgattttgcactgaagggacgaattttggactcggcaacaaactgagggacgtaaggtgaacttattccatatctttagttggtctctgttctgtaaattggcatatttcttgttcttttgtttgcttgatctttttttttaaaaaaattagttaatacttaattaatcatgtaataatatgagcttcgttttgtatgccggggagaagggttgccaacccctccttccgaacactacaattcctagttctgtacaatgcatatggaactcttgaggcttatttccaacgttatcgaagtgcttgctcttaattgcccatcctgaggaacattttgcacaaagttattttgactgtattttacgaattttggtcttttcctcggtgaaatttgtttgagcatacacgagccactgaccagagcggagcatgacaaatacgggcgtcgaaatgccgattgcatccttcatctggatctggattggcccattatgtctctataagcttatttgggcccataaatttcactcaaaaggaataagtccattttacctcccacatctcttgcccttcgtcgaataacatccctcaactaaataatttttttaaaaaccggtgcaaatcaactccacatgtggttctgtaagtggtttatgctgatgtggcagccaggtcatcaaagcgattgaaatagaagtgggtcccacatgtaagtgacaaatgctaaaataaaaaagtggtggggtccacttgtcagccctattttttcttatcttcttcttcccatgtcccttctatctctttctcgtagccgcacgcgcggaggctgattcggccagccgatggcggtgaacgttagtcgggggtggcctcggagggcttgaagacgtgactcatctactcctaccccccgtgtcaccagggagggggtgtaagagatggcttcatgctaaccttcctgaaggcggcgaagacgaactaggcgaggctcttgagcagcgtgcccggtggcagtggcgcccttctcatcccagcgagctcctcctctgcgctcggtgggccgcaaccacccgatgagctccccggcggctggccggccgtggcctcccgatgagctcctctcccgcgtccggccggctgcggcatcccggcgagcccctcccccgcgcctggcccgccgcgccctcccgacgagctcctccccaacacccgccgccgccgctcgagccgatggaaggcgtgaggctgtaagatatgaggagatgaaagagagatgggaggggtgataggtggccccacgtgggtcccacctattctttttattgtgaatgccatctagatgccacgtgggatgaagaattagtcaatgtgccatgtggatgccacataagctataactggactcaatactgtcttgggggtcgatttgcaccggttttcggagatgaggtagtcgttatacctggtttatctaccctatagttcaacaaatgcttttactcattcatcattcatcatgtcacacatccaatggcccaaaatcaacagaggaggtagatccgaccgcccagcgcatctctcgcatctcccaccacacagagccgcatctcctctcctcgcgctctctccgcatcctccaccatcagcgccgcatctcctcctcggcgtcctagcgctctctcgccccctcgccgccgtgcgcctccccctcgctccctcgccgccgtgcgccggatttttcattgaatcgacgcgctccttctccggactagggaggggaggcgcggcgatggacctcgcgattcccaaccctaacccccgccgccggcgcgtagcgccgccgccgcccctgctgcccaggatccccccgccttttctccttccgcccacctgccaccgacgccgccacccctggcagtgactcctcctccccgccgccaacgccaccgccgtcgacgcctactcctgtggcagtgtggaggactgctgcttccctgtctccatcaggtgtgtgcacgatttgtgtttgttaaaatgcttatgtgaaaaagctgtgggtatacaatgatatgctgcagattatcttttcctgttataggttgatcaataatggtttccttaattcaactttcatattgctgaatcttttggtctacattgatagctgatgcattggggtgtgattatacaaatgatttctgttggtaatgatttttccctaccttgcagacagaggaataccggacagttttttttctttcttttcttctgttggggtgggttcatttcagaaatacccaatttgttaggttgaccacatgtccccattttgatctgcaaggtcacagacaattctcttgtaatgtgtatgtgcattgtttgtcagaaacctgtcgaatgggaggcaccatcataattatatgatctaataatatgaagtaaccatcaactgatctgagtgtggaggtaatttctaaccctcacctctgatgtttgatgaatttcattttctcgtatatactttgtttgaccagatttcctgctatgtaaatacacatatatgattgtgtacatactagctagatctttcctcttagagcatggacaatataatggttcaggcgactattatctacataatctagaccacacaatagaatattttaagcagatttttcataagtgccaaccactgcctatgttttgctattaatatatagtatagttcctttcgagaatttgcacaaagtctatagaaaatcagaatataagtgcgaccacggccttcctgaaagttagaaaaatcttctcaagcatatagcatatagtctgatggtcatttcataaaaatctcttgatatgattttataagtgaacataccaaattagtttgaatgtacattgttcgttttcacgggattccgacatccgttgtcagtgatcgagatcctgttttcactgggcacttttggagtgagcttttccggttggctggtgtcaaactacatatgagctcggcatttcagaacactaggacaaataacatgttgtatacattctgggatgcctgaatatatggttgcttatgatggaatcagaaaatgataagttctgcagtattttcaaatgcggaagctgatttagaatttgagaatgttggctcatgatgacaacaactctgtacatgtacattctgcagatagagaagcttttcttgattgaagcattttaagacttgtactacaccagatgtgcccccttgagaaacaaaggttagtgttctgctatcgagtttttttttagattgtagcaaatagagattttgttaatttttaatcaaatgtgaagctaaacttctcattaatctgggattgttttccataattgtcccggtgtcagagattgacaattgatttcacaaccaaatgaaaggtagtgtttttctgggaatgccatcaggggcgcagatctgagtgtagtcaaaatccttcaatttttcaaatccgtttggtaaaagttaccactttctgaattccatgcaaggactgacttatgaaaattttactgtatattattgttctataatttgtttataaaagtaatgcagtaatgctataggaatgatgggaccctaggagttagtggcatatatcatcgacacacttgcatggccaggggaattataactcaggtgctcaccgaggatcaactgtccaggatccaggatttttagcatttgttttattgaacgctggaattacttttctcctcgtgccatctaaaggtaacttcaaagctaaatggctggccatgtataatcctaggagcataaatatttttacaaactatataaatttctttgtgaaattttaatagtgattcagtgttgcaacgggaaatgctatatacatggccagccatttatattcagtgtttaagtcgatatattgaccacagatttggtttatatcagtaaatggccatgtttttttcccaagttatgtttctaaatatgtagactgtggtacgatatttataaagttcaagttgtctttgtttcccagaaaatcttaggtctagcagacttacttagtttctgtttacaaatgaataatcgggtagtgaatactatacctgtatatttgtactactctcttatttagtaatgtatctaaaataatgtagactgtactacaatatttatttagatgcatatgctcaatttttatataagtatatgctgcttttacattacttttgtttgaatgtacatgctgatatgaaatttggagagctttcttggaatgtacgctgttaagaaaatttagataaattaaatccttatgccttatattgtttcttaaacacacctataagtttgattggagaaggggacattaaccaattgcttgaaaaaggtgttttgttagctcaagatatggtggaatatttacaactgttttagtaactcccagataatctttctctacatacatgcataactaatttctctaggataatgacacatttctgattcgttaagggcaaactttgaagtacatctgttatgcgcgagatattcagtttatatttctaaacttgggtgcactttgaatcaggacgaataggctcagttggatcagttgaatataaagaagtggtgtgcgattagttttttttgtaaatagctcaagttagttttcttccttgtaggatagttacaaaaaaataaggtaaacttgcatttcttgcatgagcaaagttcattacaacctatctaagtataatttcctgaagagtgtttatagctgaagttgtttcttctaattttgctgaggttaaccctcctatggcatgcatccttctaaattttgctgaggtaaaccctcctgaaattagtagggtgcacgaaatactactgtttttttaatttttgtacagtggcattgaacatggttttgctctttgagatatgatgcttccctcatgatcaatgaagatttgcattactttaggtgatctgctcatgtttgggtgtttgggtaaggaggagaagaaatggctggggtgtcggtggtaatgaggttgttgtttcagttatacagttccgcataattgtgtgacgtcctgactaatcctgactaatctgtatgaccttttcttccatttacaaatgcttgtgtctctccagttcacctgtgagggagatatgaaatcaggtatgagtaattcttgtggttttgcttctttttctggacacacttattttcatccattttgcagcaagcaatagttaggtatgagaaagaatgtgccttacaattaactgtcagtggtacacataaaactattcatttactcttctttcctggtcatattgatacaggttagtttatgctcttactcgaaaaaaaaaacaaagtacatggtcttactatttgaccgtttgattaattatataagtttctgagaaagccctgaattcgatgtactagactcgattgttataggcaactaagtaaaaaaaacaaggtgatccaataaagtattaaaacacccatggatcatgttgctaccctgtggtgatgaaaagagacataagtgctagctactattttttgtttaatcatgaaacagaggcttcatgaaaccagatcaagcaagtcaaatgggattgcatcataggtaagatcaaagttttcccctttttgacatcaacagcgtattcttttgtctgtagagattgtatatttgttttcattcatagaggttacatcatatccaagagagtgccaaatctgtcatgtagcatttgtctttttttttttacccggcctctacatccaactggatatatgcaacctttttaaattaagaacttagccctcaaataacccaatctgaaattcgctcctatagcgatttaaattcaggaccttggggtgctactcaggttactgcaaccattaggctacatacccttttacatgttgcatttgtctagattattgcatttataagcagtaaatctttttcggagcaaatagcatttgtgcagtgaccaagggtactatcttcttgatttgcttgcagtctcccattgtttgctgagaccatcaatactcttgcatggatgatggttcaattgaataattaggaactgcaatactggacgaggcttgtttgagttttctttagttctcttcaataagttacctctttaattatatggcttcaaactttttcatattcccgagagcatgtctgtatggcaccaaactgttcacctgagcaaatggtccaataatgaattgtgctttgtcatggtacgttgctaactgtttgggccttctggtgcaattttatcattgagatattttgtgcagtgatgaaatgcatatttgtattgtacgatacttttatattatcaatagtaatttactttaattattttttcaattttaaaagttgacctgttaaatgaggtttcacaggtgcattaaaatttattgtgttacaatgaaacctgttgctacaacaatcctaggatatcaatgtgttacctaggtgcacttcttgggtgatgagttgtgggagttgtccatatcctcctggaaaatgtgttgacaggttatgcgaggttctaggacagagacatggggatatagttctaggacggaaatatggggagagatatgtatatcgttaggcgtgaagttctgatggtaaatttatggagaaaaatttgatattgaccgaatgtatctgtgtgcaaattgtagataaaagaatgtcaaatgttctgttttggagaagacatgaaacaattcgtgttataatattggtgcatataccttttatgcaaatatttaattaatttatattctgtgcatatataagatgcgattaattgctccatctaaatttactactccctttcacaaaaattaaaacatatgattttttgaattattttaatttactactctctttcacaaaaattaaaacatgcgatttttgaattattttatcttggggttttgcgtttgactacaattttatatttcaacaactttataaaatacaataaatttgtgataaaggggagttattattttaatgataaatatgggcagatcatttagcattcggataaagacatgtatatcttgcttggatatttgtattttagacatgttttgaatatgtttcttcaaaagttattttgatttgtattgttaaatattaccgtagcgttagcacgggcagattactagttcgacgaaggcaagagatgagggaggtaaaatagacttattcccactcaaaaagcttaaaatgacataagcccgatactaaactaaaggcccattattagtataaaacactgctggcccaccgcgttcttccgcctttactgtaggagtgttaggtttagggcttccgccgccgcctcctcctccaaaacctcgtcggcgcgccgccgcggccaagccgctgtgctgtacaagaaccggttcggcgacaacgtaagttccgtgcccgacgaggtatttgttcgctgccccctcctcctcctcttcagtgttccttttttttctccgagagcatcggtgatgttacatccatctaaactcatccttgcactatgaggtcaccggtgaagaaaaaattgggggaatatgtagtctgagatgctctgttgatcctctccttggatcattcttttctactgagctgatgacgcggctggagatttcagctgctgtttgttttcgttttctgaagcctgagagcaccagtgatgtttacatccacactcatccttgcactatgaggttattaccagtgaagaaatcattgggggaatatgtagtctgagttgctcctgcttttcctttctcgcgattctgctttaatttgtggatttatggttgattttttttggctttgcctttatgcttcttgattcctctcgtggatttgtggttgatttttggctttgcctttatgcttcttgggttcctctcgtgaatactgatttcagcttctttctgtggcttgatagccaccaggtagatggggaaggcaaagcgtgcgtcgatttttatcaggcttgtttcagcagctggaaccgggtttttctatgtgaagcgcaagaatcctcgtcggatcacagagaagcttgaatttaggaagtatgatccacgagttaacaagcatgttctctttacagaagcaaagatgaagtgagatggtgctgggcaaatcttctccacaatgtgcaaagctgaataacctgcaaaaaaaactcgtgtcaggattcaggaacctgtctactgttaagaatgctatgatcagtttatcaccctgttctggttccagcgttttatgcagacaatttcaacaagtatgagtttgatcttgattagcactggaattctgatgttatgcatgttggttttgttttttggaatgggctgtaagcctgcaaactaggaatgctttgattgttttaccatatccccgttaaagcaaaattctatcatggcaacttgtagataggattcaccatactgaatttgactgtatgtattcctttaaacatgtttgtcaatacctggaagttatcttgaatttggccatgatctgcattgagacaaatgattcagtgtaccttcttttttttaacattggtttggaaaacactacaaaattcctttggaaacattgtaaaattctccgatccaaatggagcctaaacatgtgtgatttgtaagattggcaggacctggtattcttcttgaatatgctgcaacctgtactgtaagttgtaacagaagtagtttagactctacaatctgaacttgtttgacaagaactcaagataaaggacttcagctgctccacaagttttacctgacctggcgatatctgctgttaagcaacactgggacttctccgggcttctcttcatcacacggatcactggacctggcttgctcattgctgcattttgatcatggattttatcgtcgatggttgctgaaagcgtttcagtgttgcaaatttacatttctttttgtgcttacgacctttcagaattgtaatattgtaatttttctcctgctctatcgaaaaaaattacagccgttcgcatctagaatttgtgtgggccgtttgctttaaagctcctgtaccgaaggcttcttgtatcgtcttgggcttgtgggacaacacaaattcgcaattgtttagctcaaaaaccttgttactccaaacaaaatgaaacatttcaatcgatcagttagacagtaacaaagaaacagaagaatttcctggagaataagcattcgtagtggtggaccaaatcgctcgtcagaatgtcagaatctggctctagcgacgggttcctagtttcaaaggagggccaaacttgggcctttccttttgccgggcgtgttacagcctggtaattgggcttggtcttagcttatgctttcttctgcaacagcaaccgctcgtgtgacctggaccactttgcctgactgaaaacacttgaacctctgctacaatttcacccaaaagaaactacaaacttctgcaaagtggatagcacataacagcattcttttgggtaccctaggttgtctttagtcctcgtagtgctcgattgacatctgatatggtagtacagtagttcctcatcttttagtgaatttctccaatggtggttgcctggttggccctggttagatgtttcaaaaatattcagcatgtataatgtattaatccaactaaactgtgggagctcgacaagactaggctgtgtatcacaggtgcagacttgcagaactaatgctcaccttggttttgtttttgttttgaagaaatgctcatcttgttcctggacatctgaaatactacagtttttttttcgcaaacgcgtaaaaaaattacacgtcatcatattagaagagagcaagattttaatatacaacgtaacaggccatggagacatttgccaggggaatggaagaaaaaaaaaagaacacggaaaggaaacgaaaaaagaactgctaacgaaaaaactgctcctatatagagggaggaaaaaacggtggagccaccctaatgtcccaacaagtcttcaaaacctacggtgccaacaacagaccacaaccagacttcctgaagaatggactccaagaccacaaagaccgagacgaaagagaccacagagactacagttcacaatcagtaaatgatcatatcttgttaaaaggctgcggcattatctacttacattttaacaaatgcaacgcaattatcaccgagacaattgcaacacacgcatgttttcggtagcttatgtattatggattatcacggtgcacttcccaagcttttaaacggtacaccttttgcaaaacctttcttcgttcgtatttcttagagaacttttcaaaattaacttatgaactttacaaaatgcaattccctcgagtaaactcagtttcatttcaccatccactgtttataaagagtacgcgttttctaatttcgcttcaaatccttacaggtaatccccttttaaaatgatgcctacaacaacgatgaacgatgataaattgggtagctgccatatgcacatgccacttcatgacgactattccctccgtcccaaaatataacaacttttggttggatgggatatatcctagtactatgaatctggatatgcctcttgtctagattcgtagtactatgataggttctatccataaaaaaattactatatattgggacagaaggagtacaaagctataggtagctagccctgtatagtgaaataaatctagaggattccatgatcttgcttgcagccctgcgccgtcagtacagttttaatgtaggtcttagcttgatcgtcttcgacatgtctgcctccggtacgttgccatcctgcgttgcaatcatggcgcgatcgagctaacctgcaacctaatccttgccatgattctagtgtctcctcgtctctttgtcacgaaatgttgctcctgtttttatctgctcctactcatcttattcatcatgttttgaggcattaatttcttaccacaacatttggtttgagtgttcgccaatcgacgtccatgacgccacaacatatggccctatttacatacatttattctgcgtgattatattgaatcctctatcctgcaaagcctacctatatatcagccatggcattaactcgacctgattcttttcacgctttagtaatgacaatgctgctgctacgacatccacagtgtgcctttgcatcaatacgtgcttgtacacatgtagtactgtcatcgccactaaatgtgctgcaagtacgtacttgctagaaaatctctagccattatagactgtaatatcggttgctagtacacacctcgcctctctccgttaatttatagccttccattggttgctgtctgaatttatggagacgcaagctagctagagttcctacttcctcttataattcggaagattcttctgctctgcacactgatattacatatatggacacaattgttcatacatgcatgtcattgttttccttttgccatcttgcttggctgctttccattaataattggttgcaaagctccagtaattgtctgctatcttatcttttacaatacatatcaagtgcaacaaatgtctgaggaaagtgtggtagaggtcaccaaccaaaccatctttagttactgcacccaaatcactactagcattcactatacatatatgcttctgttggactgattatttgtttgctgtgcatgcagcaggagtgtttcaatactcagtgggagtagaaagactgagcatgcagctaacagcctaggaccaagagagtaggtatcaagcctggctccaaaggcacttgttagctagaaatgacttaacaattaggccctgtttagtttccagaaagtttttttcaaaaacatcccatcgaatctttgaacacatgcataaagcattaaatatagataaaaacaaaaactaattgcacagttaaaggcgaaattgcgagacgaatcttttgagcctaattagtccatgattagccataagtgctacagtaacccacatgtgctaatgacggattaattaggctcaaaagattcgtctcgcggtttccatgcgagtcataaaattagtttttttattcgtgtccgaaaaccccttccgacatccggtcaaacgttcgatgtgacacccaaaaattttcatttcgcgaactaaacggggccttaatcacaccttgcttagaggttacaaagactatctaggacttaattgatgttgttagtatgctagcagtacagtgtatggattgttcctttgttaattattgccattgtgggacggttgacgcctaaccactgctagctaatccccttttctctttcagggcttcaaagttcaaagagagggtagcatcatgcttgctttagtcagaagaaagtcactcacatccctactgttctagctttcagttgagatcaactcaatcaaagatgccatgccttcgaactatacaagcaaatcgcatgcccctgcttatagtcactggacggagggtcctatgatctttgggccccactttcggtgacattatgtacttcagaaggatggagaaattagagaatttattagaagtaggagtattgtatatgtgtctccgggaatggaccatatatggggatatggatagctgaatggaaacagcacgaaaacataaaatattttttgaactttgccgtttggatagtagcagggttggtgatactttgcgtctttggttgttaagcagttagcatgacgttctggtcattttgctgcttctattatttcgctagattccctctactttgcctttgccggttttgccatgcttttaacagtttcctgttgtgcttccatgcatgttactgaactagttagtatcgtctaaatttgatgaacttctttctttttttcccctttttacacgaaaacatgagcttatgttcgttggatagcagcagccagcaagattatagccttggatagctggtacgtcttacgttcttaaataattgattgtttaagtttaagcttgttttatcttcaaaaaaaagtttaagcttgattgtctgtctttttttttcctgaaaaaaaattataaatgctttgttggtgctagatgggatctgcgctccgaactccttgaacttgaacagtagtacagtaccatcaagattttgttggtttaatatacaatagtagttcacaatccccttaactagtttctaaaataataatggatacgtggaacaggaggcaataacgcacacaatgaaaaatatgccactacttcaagttccgaaagcaacctttatgggatggttttagccaattttcgtatttagggcccctttaaatcgcaggattgagaaaacgtagaaataagaaaaacatagaattttgatagaaatgtaagtgtaaaacagaggattgcaaaacacaggaaaaacataggaatgaccgtttgattgaaccgcagaaaaaacaaaggaattggatgagaaagatagactcaaaggaaagttaccaagaggttaaagttcttgctaaatttttccaaaaatctctataagtttatccattccatagaaatttcaaaggattgaatatttcaaagagcttcataggaaattttcctataggattgaacctccaaaatttctatgtttttcctcctaataaaaagggtccttacttttgcagagtagaattctgaatgaattttgagatatttgttcttcaaaattcgtgtgaagttatccatgatccaaacatataaaagggttatgactgcttagcaacaagaggtaccaaaagataccaagaactctacactatcttctcttttttttccttcgagaaactctacactagttaactataggaagtatcaaagagttactgaaagctaagggcccctttgaatcttaggattgagaaaacataggattttgatagaaatgtaagtgtaaaacagaggattgcaaaacgcagaaaaaacacaggaatgaccgtttgattgaaccgcaggaaaagcacatgaattgaatgagacagaaagactcaaaaggaaagttaccaagaggttgagggcccctttgaatcgtagaaatgaaaaaacggaggaatatgaaaaacataggattagtgacaggaatgtaagtgtaaaacagaggattgcaaaacacagaaaaaacacaagaataattgccaaggagtgaacctctctagcgggaggacgtgagaaccccctttgtgagttcggccaggggaataaggcgcgatgatcaagagcgtatcttcgccgtgggattacgctaacgtggtggatggcgatcgagaaggagacagaggatttatccaggttcgggccgctgagaagcgtaacaccctacttctgtatgtggattcaagcttatgctgttgcaagagttctcaaaccctagggagatggtcggctaactttctcctaaggttcaagcttccaagagtcgttgttttgctcggtgggcaaggtcctccttttatagttcaaggggttaccacatgcaccgtctctacacatatcgtccttggaggggggcccacatcaacccgggctgagtagccaaccatgccttaggccggaagtaaggtggcagcttgtcctcaggtgggtcccagcgctatccttcgtctgacacgagggacatcccccgtcattccctcttaaattcatggagactttggcgaatgcatgcacaggagaggcaccaattgtacattggtctccgagcgttgatgggacggggcatacctgcccccacgctgcctgacacaaggcggggcgtgggtgcgctgccgcccatcccatccacctgcggccggtcttagcccggtcaaggacgattgacgcacgtcaatcgattggacgtcgcacgaccagccacgctgtattaaatgcggcggtggtggttgggacgccgcccatcaatgcgcttggcagcgccccttcctccacccactcagctgcgacgtggcagccgagcgtgggccccggggcgacgcagcccctcgggcccgaggggtgcaacgggataccccgagacccctaggcggttacgggcgcctttcggctacttactacctgcgcgcccgacccccccccctctcgatggggcccaggccgcgcagccacgtggctaggggaaaggaccctttccccttagcatgggtacccccgggcccatatcatcgataatgatcgtttgattagactacagaaaaaacataggaatcggatgagagaaatagactcaaaggattcttaccaagaggttggacctcttgctaattttcctccaaaaccaatatgcaataagccattccataggaaatttataggatttggaaaacttcaatcctttaaatcaaagggctacataggaaaatttcctataggatttcaatcctatgaaattccttcgtaatttctttgattcaaaggggccctaaagctctggctaaatttcctccaaaaatctatataggattgtcaatttcacatgaattttaaaggattggataggattcaatcatttgtgtcaaagggcttcataggaaattttcctataggtttaaaatccaccaaaatttctatgtttttcctctaaatcaaagggccctaacctaaacactgttccctgaatgatttcttctatgattacgaatgatctaccagaaactccatgcccctgacagcaacacaccaccagatagcaacatcaaattggattttaggaattaagcaacaagctactctagtatagcaacaagacctgacaagtttagccagggggccagccagcctctcccgacgaacgatcgaagccagctgctgcattattagtgtgcagtgcagagctctgtagcaactgaatcatggcggactccttcctgcctgcctcccttccaaagctagccattgcgtgctggagcgatggatcgagtactactaagtagtactccgttctagtggcgatcgaactgccgatccatcgagcaacgtatgcaactttggggcacataatgatatacgatcatgtactgatgtaccgagtaaaaccatggacaggccagtacttgacaatatgtactccttcctccaaaaaaatacctgcatcttttgttactatcttcaaccctgctaagtacaggggaatctacaattacccatgtttaaatgcatgtgttaagctgcaccctgtgaaatctgtgatgtataataacctacaaaattaagatgcagtcatgcagacaatcaatcaaagtggatgcattttgttaaaaaaaaaattcataaggctggtagcctcattatctgagaaataaggctgtcaattctgcttcgttgtttgctggtttgagtacggattgagcatgcttcactgaaatcatgaactggttcttcccgaaatgagatcatggaaggcttgccattcactcatccacaaccggagcttcttttccatgataacagtatgggtctcataaactatggctctgtgatgtattccttacaaatgagtcccagaattcgacaaacacaattgtaaatgatcttataatggaatggccatgggtcaaacatttgctcctaaaattggtgaatcattgataatctaggagggccaagacatgataggtgtcttcctttaacatctcccctttttctgttgttgcccattccctgctgttctttctcagaaattttaccctaccatgctaccagcagtttatgatttatgcttgatttttacaaaaacacgctatgaaacaaacacttaattttcacctgacaggtaattaacaggtcccatggtatatgaagccatgaacatttctttaatttcttaaaacaaaattgttattaatcgaacctttctgaagcagtcttaagaaaaatagagattttctttaaccaaaacatggacaggaaatcacgatgagatatgttccatccgtctcaaaaagaattaaacgctacgaatgtccagaactccagattcatttctaagatttgaattttttagaatgaaaggagtataaccttctaattgcacacagtatttggtagtaactggcatgagaaattgacagaacatatgattttttttctctgtttcacgaaaaaaaatatcttttttttgtttggttgagtcgttgtttgcctactccacagcatccatcatccacagctgagagatttgataatttaacactcttttcaatgggtttcgattatttgacatcctggcccattttcattcactcagatggtctcatatatcatcctcacaaatgttaattaaagtaattagacaacgaaaaaatgtcaaattattaaatttttctccacagctacaccctcctcctctcccgaaccccaatcaccatggccataagacgatgagctgagagagagagagagttccaaccatctcctctcctctcttctcttctcttctcttctctcttctctctcctctccccgacaagcacagggctcgtcttttcctttcttcccctcactcttttccccttcactcacacacagtcacactgtgcgagcctgtgtgggactgtgggtgttggccattccagtacaatccgttctctttattcctccctctcctgcttgtctcgttgcgtggccgtggccttgtgcggttttatggatcaagaaacctcacgagaaccccgacgcttcggccgtctggtggcgcggcgctagccatctctttggatcgctcctcgcgatcgcattgcggccgcgttctttgatttttggttttttttttgtccggtcaaaggttggttcttggtggtgtagattcggagtggcgtgtcgtggcggcggttttttgttgttgttgttgttgttggtagatactggttcggattgtttcttggaggaggaggaatttcgcgtcttggtgagttgggatttgatctttgggccggctgaaattgggattttgttttgttttgattgagttgcggtttgttttgtctggattaggagcaatggcgggcggcggcgggcagtcggcgatcgccgctgaggacgacgacctcgagcgcggcgcggagcgcgacgaggaggaggaggaggggagccaatacttcaccgacgcggaggaccaccagtcgtgggcgtcgcactcgcgccacaactccaccgcctacgaggactacatctccacctgcgcctccgtccgcgcgagctcctacgacggcgaggcggaggaggaggaggatgccggcggcggcggcggcggcgtcgagcaccaccgcaggaagtcgtcgtgcgtgtcggagtgctcgctggacgacgtcgacctggaggccgggctggccgaggtcatcaagggcagccccgagaaggcggagaggtgctgccgcatttgccaccttggcctcgagaccgcggcggcggagtccggcgccggcatcacgctcggctgctcctgcaagggcgacctctcctactcccacaagcagtgcgccgagacatggttcaagattagaggcaacaagtaagctccagactcactcatctaatccactctcaattactatttgattagatgcaatgttcgaagtcgaactccatatgttagctcggataaatcgatgaatcaattagtttattattattggataaggcatcacgcatcagcgtaagagcgaagtaacacaagatttatttcagatatatatatatactagggcatatgggtgtatgaacacatggttaaggaatcttgataggtgtctgtttttttttccctttgctttctttgggcggacaaaggtaaaggagcagatggggaggaaaaggcgaagtagtggattaattagtagtgttgtaggaatcgggaaggttgagatcattggagaggataaaggtaggattcgttctttcaatctgcttttctcacagattctccgtggcatctgattgttcctctggagtgttgtgttgaccaagtttgtttgttgatagattgacatggtctgatactatgatgcgccagtctatgtgacatgcctttttttttccttcgatttgatggtgcgagggaggtgtgattgtgtcatcttccattctgaaagtgtttgtttcaacacaattgtagttaggtgatccactgagtctcagtcacaaccataatgtgctccacttagccttgatccacttaataaaattgttgttaagagaatcaaccatagtgtgctccacatagtctcagactctgaagtgataaccgcttccagcgtaggaaaatggcctattatagacaggggatggttatagacaaaattggttttaaattttaataatcatggcttagttgctagtcagtgtaaaaaaggtgttgggcaatacaaactagtctgcaagtctaatttttttagtggttggtgttttctttctcataaaaatcggtagcgcaaaccgacacacaagtacctgttttgttcttgatattattttttactttatttttgcttatatattgttgccacagcttgatcactgtaagatttgctcaaactactaacaagaacatttgctgactaatgcagtttaggctaatgagattagttcaacaatataattacactaaagtttgaaccacagatattgtaattggaaactgtgaaccacggcaactcttactttataaaattatttcgattctatttctagagccaaatttctcaaatgagtctgaaatttcagaccttggtggtaataatgatttacttatgtgacatcagcttcagcaatattcattgcaccgattattgttttcacactatgagatgtaatagtgagccctgaaattcctatgctgctcccatgctgagaagaatagactgaattctgatcactgtgtttgtctgcacttggatctttttggacaattagtaatttttaagttttagctcctaccttttttccgtttgcagtacaaggctataggaaaacactgcggtaattcttgcaaatatatctatatttactgaggcttttatccttactcgcccaataatcaatgttagagtatatggtggttagagcaataatgttgttagattgatttatatcgtagtcttccttttctgtagatccctccttatctccacaccttttgtactcttaacaatcaaaattgcatcaatcatacttgtactgcttaaatcatttttttacactgcttaaatcatacttgataagttgatatccccaacattttacactcatttaatgacataacctgtcaatcaccttatcaaatttcagtaaaatagaattgaatggccctcaataatttcaatcttacttcaagtgcgaaggtgataggttttgagtacatttaaactaaatgatctatccttctgtttgccaggatatgtgaaatctgtagctctaccgcatgcaatgtggtaggcattggtgattcagaatccgttgagcaatggaatgaatcgaacagcacagcacctgcacaagcaccaccagctgaaactcagagattttggcaagggcatcggttcctgaactttcttcttgcttgcatggttttcgcctttgttatctcatggctctttcatttcaacgtcccgggctaagttttgaaacacatggtcctcaataaaagctccaatgccattactacacacctgtgggttggatttagtaaatctgaagaacaggctgaggtgaaggaaagttatgaagtggtacaaaaatgttgggtggggcatgttgatcttaactgtgtcaatggcaattgcctcctttcacaacgaccaagattccattagacaagaagctggaaggacaatttcctcctgtttcccttgtctggatggagatgaaaacaaagaatggagaatgtgtttgttccgtcaatagtgctgtcatggttttcaggaagagattgtgctgtatccattccctatcttctcaggcaatttatcatttattctgctgatttggtgtaagtgttatcttccaggagaaaaatgtgctgagttcggaagcatgtcgccagaaagaataaacaatattgtgaagttcctgggcatatcgccgcacatgaaattgtcgattttgtggagataatcctgtaatggtcctttcgacgtttgtgactccgtgttcggttgtttgttggatggagtacatgatgaaatgtcactctttgttggacgttagtactctttgttggatggagtactacagaatagtactagtagaatttttttatccatgctcattctaaacaatatatcatttcatcagtctttttcgtggtactaatgtggatatgtttgaccacgaagagaactgttgagttgaagaaattactgacttgtggcccaactctctctgtccttaaaaaagccggcctcgtactgtacgtgatacatatattatttctagattcgttatactaaaatatatcacattttaatacaggattggtttcttatattttaatacaaggttggtttcttttgggagagacagagggagtagcgggggaaacccatttggtccatgtcgaagcttgtactgctctttttgtcttaaaatataaggatctggatttgtatcacatccatctaaaatcccttatatctgggacggatggagtacaaagtacacgtggtacaatcttgcgactagagattggaactcctgtgagtgttcgattcagtgcgtgtctggcataaacacgcaataaattgcacgatacttggtggacgtatactggagtacatactaccaccaccaccgtcttttagtttacacacttagaccttgtttagttgcggaaaatttttgggtttgattgtcatatcggatatactaacacacatttgaagtattaaacgtagtctaataacaaaacaaattacagattccgccagaaaaccatgagacaaatttattaagcctaattaatctgttattagcaaatgtttactgtagcaccatattgtcaaatcatgcgtaattaggcctaaaagattcgtctcacaatttacacgcaatctgtataattagttttttttcctacatttaatactctatgcatgtgtccaaatattcgatgtgacagtgtaaaaatttttattttggaaactaaactaggcttacaccgtgctgcagccaggcccagatataaatgcaaattggttgctggaaggccacggtgccaagacacggctacaggttgatgttgaattgttgatgcaggttgaaagtatggacgcgtatgatgagatcgcgtgctgtgccaccctgcggcggtgaagaaatttcacttttttcagtagactgtatcgtccactcgtttaaaacaccgaaaaaacagatggtccctcctgcagttacttccaagttcatccatccatctctgatctcactctacccgtgtcactccacgatcatcaccagtggctctatccaagccggtgatgtgaacaaagcctaatcacacacgcaggggcggatttagcatatagctgatggggtctaggactttagtcaatctttacctatgagatgtggagtatattcttatgtgtatgacctgagtccccacattatctggaaagaaggcctccactctcagtttttgttactattcttgcaatctctgtttgtgcatcgaggcgttactaccaagactcaaaccaatcactcccaatcccctcgatctaattggcaatcaacagaaaatcaagatgaggaacaaaatttgatgcattctacgctcgccgaaaaattcttgcgcttccacagcccgcaatgtgtccaacaagtagccacctagatgccggatgagtcgccactcatgaacgctggcggcctgtggtacttccttccactactctccgtctaacagcaatgtactttcctattcaccgggtgacgtcgcatgttgtggccgatctctgcgccacgccctggtctgctaattcttagtgtacctataaaacccacccttcgcattacgctgtatttagtttttgaaattagagagaagttaggggaaagttggtagtttgaaaaaaaaaagttaaaagtttatatgtgtagaaaagttttagatgtgatgtgatgaaaagttgagtgggggaagtttggtgtgaactaaatagggctttagttattaagttgtgattcgatgtaatcccgtgccccgatcaatttttatcctccatccgcctctgcacacaggctctctgtcgtgcgattgttgcctccacctcgacgcggatagccgagctgcgcacaccatcgctctgcgctcccctacgtcgccgttcgcgcgacgcgctggcacgtggtctcccgctccgctcacccacgctgtcgccgtgcgcgtccgtgccacatcgcgtgagcgacacgctccaggcgaaaagcatgtggggtgggcaaccaaaaccgtcggtgagtgtgccaatacacgaatgaacaaacaattgatcagaaagattaagctggccactatgtacagcgacagctagtgactccgaagaacgtactacggcggccaagatcctgattcctgaatagcgtctaccgcccgattgattagagcaccaaatcatccattcatttcattcgttttatctgcgatcatgctatagtaccaggatggtggatgagcagaaatcgacaaggaaaccatgtgtaatgctgcctctgccgctggaatcttgttcaggatgtgcatgcactatgcagatggaccgggcggttgttctcaatccgcccccagaggattctcctcggggtcgacgcgagaagacaaactcccggtggaaagcagatgccgcggctcatgtaccaccattgacagcagcgtcggagagcgtgctgtgggcgtgattgatgtcttcatcgtgcctcccgttcatctgcgcgcgctgtcgctgaattgatagaaacagacacgtcagaaaaaaaaagtgcaatgtgacagtttgttccagtatgcctagtagatggctcctccaatcaagatcgaggtttttgttgtaatccctctcccaaaatataatactaacctaaaaccagattgaacgtatatatccagattctcatagtactagaatacaatccgatactaaactactccctccgacccaaaaaaaagacaaaccctggtttccgtgtccaacgtttgaccgtccgtcttatttgaaaaaattatgaaaaaaattaaaaagacaagtcacgcataaaatattaatcatattttatcatctaacaacaatgaaaatacgaattataaaaaaatttcatataagacggacaatcaaagttggacacggaaacccaagatttgccttttttgggacgaagggagtaagctgctactaggttacgtcaaatccagattatctaagtatattctaggaagtacttcctccgtcccaaaatgtaagcattttttaggttggcacgggtattaagaaagtaggtgagaatgattgaataaggtgtgtaattggttgaaaagagaaagtaggtgaaaaaaaatggttgtgattggttgagaggagaaggtaggtagaaaaatagcttcattttgggataaagtactgtgctagaaatagctacattttgggacggaggtagtatattattaggatggagggagtaattaaactagcaagggttgtaaacaaatttagtagtactcgctccgtctcaataaacaaatcatgagatgtgacgtattctagtataatgatctgagcaggttatcgcatctcataatatgtttgtttattttgggacggagaaagtaggatccagcatagtataaagtataggcaagttcatctaatagacaggctgactgtactaagctaggcttgttcagggagtatatagggagaagacttctacaatacccgatcagtaggatccccatggtttccgtttaatagcttatggaactcttccttcagtctgctgtctttctcctccttcaacctgccatccttttccctggtactcaatggaagcaaaggtactccatttgtacgatccggcatttctgtaaatatctcaacaaagcttgttacaaagtgtttgccatacaaatccctgtaaaggcgtaaggcaacaaatgtgacaaaaatataacctgggagtttgttgtccacgaagaatacgactaaattaacggtatacctgcatgggaaaagtatgtgaaaagagaggtagtggccacattatgacaataacaagcaaggagctaaacttatcataccaagcaacaacaacatccacagagtagtgtttgcgagaagcaattataagaagactctgaactatggccatgaaccaagcaagaagcttaacaaacctgtaacaaaaggtccaccagttaaattttagtgttcaggaatacactcaggcaaagttaatattcaggggtctcagaacttggtaatgttcaaaccagaaaacattggtaagaacatacctttttgaaccatatttgtggtatgttcgaacaaaaacaagagtaaaaatcatgtgagatgaaaatatcagatcaccgcagccaaaaagtactccacgaggaactgaaaaagaaaaatgaacttgtgtgatcaggaaaaattccttgcgcagctgtcaaaccacaatagaaacttacagttaatcaggagcacttcaaatacattgttgggtggtggaagagtagccaactttgagccctataaaggtaaaagcttcggatgagtgctaaaatgagtaattgacaggtttacaagttttcacatgtccaaaagcagagcaagagtgcatgtaaaattcttggctaaaatgaaaaaggcacctcacgacaatggtagtttgggcccggaagctgggtggaatagaacgtaatgattcttaaaacctgcgaagcctgaagaagaaatattcagttacttttcagtggcatgcataaactatatcaatggaaaaataggaagaatgcactcacaactaaaaaggctagcacccggcgccagattaggacagtgtagaatcttttgctatgataaataaaaggatgaaaagtccactgcacataaatatacttgtgagacccagcttgataagttgcagtataaaaaggaatcacataaatgcatgaaaggaactataatcttcaatatgtcatgaccaggaatatgacccatctctcaacagagaatgatgatagatcacgcctattatttttttatttatgcttaggtgttgatatctgaatgatctagtttttcttggttatacaaattatcagttatcaattaaacaaacagaaataagtagagtacaaggatacatactaaaacaaaggaagcgaagatggaagcaaatatgctctcacttagataacctttgtcttgcccaaactcctaaaaacaacggtaataattggctgttacatatgcaaattaatcgatagcaaaaaggataagtgatttacttactggaagggccataaatccaaggtcctgcagaagtggaccaggtcgatgcaagtaatgcactcctcgagcagccagcccatgaatatactaattataggcaaaatattgtatgaatctccaaagtaatccattaatcaactgacaaacacagaagaataagtaatcctatataactaaatgcagaaaaaaaaaagagaactgaacacagaaaatttccatcacgccaaaaagaaaaggaaacaacaaacaatattgatctgtcagaactatggtcttccaatgaaagttaggaattgcgatctaaaactgcatgaacttattgaccaagattttcaaccgttatgctgtgaatgtgcaagtcacatgacttgagtgcacacacagaaatattctgtttagtgttcagagagacagcacacttatatcccaaatgtcaaaataatataggaatcagagattggatcagtgagtggtgggtcagaactcagaagacactgtctactatcagcaagactgtatcacagacaaaataagttggattgagtagcatttaaaaatagttctcatgaacttttattgtggatttatgagaaagtaatagtagttacaagaatacatctaggaaaattcacaacatgcatagtaactattatttccatgcatgacatgatagttcaggcgatatactgttaaaagaaacataaacctatattaatttttaaaacaaggcaatgaggatagatttaacatgtctcagaaaggaaaacagaagacagatgaatacaagagtatcaattgacacagatggcgacaattcacctctacaatggcatataccatgtaagagcgcggcactagctagacaaacatttgaacaaagtgtttacccgctcaattttcttatactgctcacggccaatgaatttttcatgccatgcatacagcaggactgttccttattatgacattccattgcaatttcaaaaccgaaaaggcaatctgtgcccagggcatcattcattcattccttgaaagagcagcactgaatccctaatctacacagactacaaagaatgcactccaatatacaacacagaacacttgtaaatgttactgactacagatttagtatagctatttaaggtctcgcctagcaaccaaaaaaaccccaaaggctaatcacatggctactaaaaaaccccaaaacggcaacattatcaacgataacaaagtgcaaatcgcgttgcaacaggggggggcaaatttggcaacctctcatcaactcggcattaaaattctgtaacgcactccaccactagcaataaccacatcacgcgcgaaatcagtaattccacgcacacgaccgaaaactagtactactagtaacaaactgacgagctcacctgaaacacaattccggcgaggagcaatccccacttctcgcgcagcagcgagagctccaccgacgtctccgtggtcaccttcctccatacctacacaacaagaggtgaaaaaaataaaaatcgcaaattcacacgacgcgatcgacaaagaaatccacactaaaaaaagcacaagatcgaaaaaaaaaacagagagaaaaccttggaagcctcccgcgctatgtaaatcgtcatggccgcaccccgccgcgcgacccctgctcccaccccgaccgctgcagctcctaccgtgcgacgcgatcaagtccatgctccgatccacacatcacgccacagcccgccgcatccccgcgtcgggatcgccgccccaggagtaaaagacaccgccgagaaaccagagaagcgggcggaaaactcgtttcccaacaatctggctccgcctccggcgccggcagacgaaggccgctagctccctcacctgcgcgggggcgggccacgcggtgtacggacggggggcggcggtggccggcggcggcgtgagcaccgagagagacttggactttggagagagctggagggggggggggagttgtggagagatcgagaaaacgagagaggagagcgatggatggtggaaatatgggagagatgagggggttttatgaaaaaaaggggggtgttgaggatggagcacgaaggtcgtggggggttttaactgaaccttttgggaggaggccgtttgatctggatggacgacgtggagtggagcaaaacacatgacttcgtgctctaaaagttttactaccctcaaatccatccggacatccttatgtgtctcgttaagattcttaatttagggttggtttggtttgtggtctaaataggccttaccaatttttatcaatgccaaattttggtaagttttggcatgtctaatttttttgttaagataaagttgtgtttggattgaatccaaaatagcttaatttcactattgaaatgacatatttttttaggcatgccaaaatttggcttcaaaccaaatacacactaaacactattgaaaataccaaatattggtaagcctaatttaggccttaaaccgaagcccttactgaatttctctgctctgctcttctcttctactgttactctaaaaacgcaatcgttctatacttccattctcttctcatgccgtataccgtatttttgtgcatttataatggtgctactagaacttattcagtccacgtaacaaacaccgtgattgaattatgacgaaacacaagccacaaaccacaaaaacttttcgttagaccggcctttcgaaatgtagtagaagattcagatgcaactctcctggtctagtggagtcggctgttgcacgaggccccacggcgttttgttgatagaggtccagatcaaataccctgtcctagttgcggataccgacccgagcgacgggtggccggatcatgctgctacatgacaagtcagtgctaaccttctcgcaaagagacagattcgtgcttgcgtattttaatactaccgtatagtagtatctgccacatgcagtgatgcagagcaaaaaggccatcgatactgtatctcctagcagctgtagcagactgaataatgatcagtcatgcctcaattaccgattcctccctaaaaaaacctattttatctctttttattatttttctaaacaaaataaacataattgtaatctccatacatataatacttagtaaaaggttttatctttttattactactcaattgaatttttaatcggaaccgaacagacatcttaaacccacttcgaatcaaaggaaattcacatgaattttagaggattttattcctattggaattgaaaggaatcttaggccccctttttattcataggaattcataggaatactcatgggttgtctgcttgaatgtatttcttttttctttttgtctttgttacatgttgtatcgctagtatgagttaatttcttcttccttctagtaaaaaaaatagtacattcatcttagtttgatcatttttaggtcttttcaaaataatcgtcctctctaacaagtgtctcttcgtttattatttgtgcaacgagtaaatgtgttgcatggaattaaccaatattagtttttgttggtgcaacttcatgtaatatttaaaatgtaatgcaattcacaaggcataaaagcgacgtagcaccttgattgatgatgattaattttcgaatgatgaaggtcttgttgtccttagtccctaccttttttttagacgatgattatattgggatggaggaagtatgccctaaacttgcgtatagatgaattactatacattgaaaaatgattaccaataagtcttgaaaagttgaaattattggtgatttggtactggtcgttttttttttttttgctatggaggcacagggcttatttagtctggacggaagtgatgtgttgcttgcagtacatataaatgaaacgtgcatttgttgactttaagcaatggttcacttgagcgcatgatctgctagttgcgcaacacgcagatgcaaggctatgggctatgtggcgtgagagtacatgttcgatggttgcaacggcttatgccgggtgtgatgggcaatttgcacgccacgatgagatgcttgtattcgacggtttaatgaaggattatacagcaaatggagaggtgtgtattgattaattacttcgtggcttggggtataaagagcactaggaatcttggatctctcgcaagaacaagtgacatgttaggttgttctgtgacatgttagcgtccagtgggaatttagctgtgacagttaggatagaggtaggttggtcaaaattctaaatgccagagttacccatgtgatgttgaaataggaaaatattgatgccacggcaaaaggtcagctttgactggtgccatgccaacaaaacctggtggcctggccctcccaatctcctatgttgccaatgccaattgctactacaaggacaaaactgcaataatgaattttcttgagcttgtttgtgcaagaatcccagtatgtttttttttttctatcgaagtcaacaggtttttagctttgacctatcagaggataccgtgtccagtgtatttgcattatgaattttcttgagcttgtttgtgcaagaatcccagtatttgtttcagcattggtaaagggtgagatcacaagacacaggactataagccggagttgatttcaatctataaggggatgtcccatcgttatctacatgtcacttaaatagttataaattttttaaaaaaaataagtatcaaaaatgtattaacatgtgatatatcactccacaaacatgcaagtttaaattcaacttccacatctcgtaacgaaaaaaatcaaatttgactctgaatatatgttaactagctatagtttaatttgttttttcgttgcaagaacgtagaagttgaatttgaacttgcatgtttgtggagtgatatatcacattttaatacatcttctcaattttttttattttattttttcataaccatttgagtgacatgtaaataacgaggggatatcccctcccctcgagtaatcaaaatagtttcccgactataagcatatgcgtttgggtcatggatgaggcagggtgagacgaggcgtgctcacctttgagggtgtttggttcagcgaccggttgaatgagtttatatctgaggttacgtttggttaatcctttctacaagaggatctgaaagagatttattctaaacctattatagtctaagattattcaccctcaatctactccattcccttttactgccaattgaccaaacaagacctaaaagagaatactcctttaatctaggttggtcttgtctcttacaaactcatggatcgattcaaattagttttctcttactgacatatgggtcatctcttaaaaacaagactatctcatacgaaaaggataaatggttacatccaattaaaaacatatatgagtactctaacctgtttcccttcgtctccaaatcgaacacatgctaggagaaaacacagtgcaaaatgcccaaccaacatctacactgcttcaaacagaataagtatcatgttttttttatgtgtttttttagtgtattggttagtaatatgctgataacatgtgtaacaaattgaagcatgagaaaaggtataacaaaatagttcttgatgtcacgatgacaaagtagtgttattggatagaggggaaaaatgggaaaatacaaagaaacaaaaggtcagctcacgaaattgtctgcctaattctgacagtccttatcagcatccaacattgcccggtcagctaagagtaacagatagcaaaagccaacgttccaacaaatggcatgttctctcgcatgataaggtggttaacgcccaatggacaaccgagtttttgctagcacaaatcctatcatgccctgtctgtaactgtaagtggaacaagtatacgctgacgggacgatttcaccggatccagattttgctgctggtgtcttagttttcaatttttctggccggtacgacggtacgctcgccacatttctgttgtttttatactttcgtaagttacaaccttattactgctttagaaaaaggagttggtgccgctggtataccgtcctctccaatctccatggctcacgtttaaccctcacgtttggccttgaaatatgctcacttcatctccaaataaacaaacaacatatcctcggctgcgttggaggtggcggcggttttgcatcggcggctgctggcgtcggtggctgatgacagcagcagcggcaacggcggccggcttgcggcggccatgactgaggaggcggcggcgacatcggcagatgcggcagtggaggcagggaaggagtcgggtgtgaggtgacggcggcgacagtgaggtggtggtgaccatgacggtggtgggaggaggcatggcggcctcggacggcttgccgagggcgtcgcagacggctacatcggaccggcgcagcatcgtttggaggaggggtcggagaccagcttgacgcagagtggcgcaaccgatggcagtggaggccgactcgacgcgagaggcgcgagtagcggagatggaggtcggcttggcgtgagaggcgcggccgatggagggaggccggattggcgcgagaggcgcgtccggtggaggaggctggcttggcgcgagaagcgcggccggcggtggaagaggcgacctcggtgcgtggtggagctactggtgggtgtggcacggtcttcggcgtacgaaggttggccagcggggggggggggcatcggtgcaggggccccacatgtcggcagagtttgagtggtggtggagcattggtgcgtcagccgtggattcgcaggtggggagcggcgggtgaaaacccagcccggcctttgccggaccgacaacgatggttaattccccctcctgaaggtgttgtcgtgctgtctcacccctcaagggtggttgccgggtgaaagcccagtcttggctcctttgagccctgacggacggtggcagcggttttccgtcgcttcttttcttgaagacgccgttttggcacccccttgctgtagggcgatctcgtatgtgttcatttgttggtctagcggcggccggtcacgcttagcagcggccggtctagtgctaaccttctcctgtcgtgtgtgttggcgctgccggtgcgtgggtggtggtatattttttttctttttcctggttacgaccctccagggttgtaatcttgtaatctttttcctgctctatcaatagaatatcgcaccgtctcgtgcgggttgttaaagaaaaatttaagcttgttctttcgtatcactatgtatcacatctcgttctagttttatttattttagaacggatagagtacgtgtgaatgtgttcaaaaatcaaaacccgtatttgtgtaagcatctgtatcttacgaacaagaaaactgacgttagtttagaatcaggttaatgcattataaaatgcacaaaaaagactgtgggttggtttggtttgtggcataaataggccttaccaatttttgtcaatgtcaaattttagcaagttttggtatgtttaattttgataaggtaaagttgtgtttggattgaagccaaaatagcctaaattcactattgaaatgacctattttcttaggcatgccaaaatttggcttcaaaccaaatacacactaaacactattgaaaataccaaatattagtaagcctaatttaggccttaaaccaaaccagtcctgtgtttcggaaacaacgtaaccttagttttttaagacaaattaccaggccagttatgtccgtgagacagtaattggtccgaacaaaattctcttatccataaaacctcatcttccgtaggccttgtgcttgggtagcagttctaaaaagaataagcccctccctccatataggtttaatcttgtttgtatttccacaataccagatattataacaccctaactattagaactagaactggtgtaatttaactccctcagcggtttacgctaacgtggcttgttgactagtccaatcaacagagtcagcatacgagcccccctcctccattctttctttctttccaccctcgccgatcatcgccgttatctccccggtccgctcctcgcgttactctctgggtgaagttctcgagctccagatggcgcccttgatctggcatgtcaaggagaagcagaagtagccaccacgggcaaggagtggtagcaccagaaacatcccgagcagcaaggagcagcagctcgcgcggagcaggtcccaccatcacgatggtgggtggagtagggagctagcagtagcgagcatcgacttctccctcgatctcaccccagcaagagctcaagccgtgaggttgacggctccttcctggcggcgcgtggggcaagcagagctcgaccttggagcagcttagagaaaggaggggccgtcgagggttggcttctgcttctccatggctcgatcaggtgggcttcccaaagcttttggaaggttctcgcccaatcgattggagacgagggagcagcaaatggctgccacggtgctcaccagcctcgccaccacgtcctgtggtgttgtccaacggtggacaccgcacaggccgtcccttcttcctcctaccacagggcaatgctcctcgctgaccacatcctccaccgctgctgcagcagatccctccctctcctccgctggcggtgatgtcagggtgaggctgcccgcccaattcttcctcataccacaggcagcgctccctacggaccgacgcctgactagcgcgtttccaccgccgcaacggatccctctccctcctccggcggtggcgatgccataacaagaccatcggggccaaacctgagttgtgtagttgcgccgagcatgaaggagaaactagattgactagggaaaaggagagagggggaagagcgttgataagtgggttctgtggttttttaatttttttttcttgtcacttacatgtggtccacacttatagtttgtatctagactattgcgtcagtacagatggaccaagtcaatgtgatatgttagcaagcgatcccggactagttggatcggctggtgtttgatcaatgtctggttgtggctggtgttctttttagcaaaaatggaaagaaatgtgtgtatttagtaatcgatgcatgagtgcatgattagcgagttcagagtgccatgccctaatcaggctatcgcaggacttgtgaatagaagggaataatatcatacatgtatatatgtgaaccgcggttcaaccgcctaggccaccagtcaatcgggtcacccaccagttcatttttttttactatgaataatggcggcatcggtgacgacggaacggagacacagcatgaggaagagtcactgatgatggcactagtatctgggaggggggagacacggcgtgtggaagagccgctaatgctggcatcgtggagggggagaaggaagggtgtgacaaagggcttgggaaggcttgggaaggaggcattgtcgcgtcgacatcctcgaggtaaggaggaagggcagggggctgcgagcgacagtgaccccaacatctgtctaaaaaaatgtggcctcctgagtccacactagttttaccagcggaatgggcccaaaacggaggtatatttggcctacggaccatccattcaccatttctacatttaccctcgaaaatgatttgggttggtattttacatctgtattaggcaaaaaacagagcttccaagcagactctgaggaagtcaaattagttcggttttaataggctaaggatgaagatatccggtattgcagatcaagaatacggatgagattgcaactatattggagggagtcaaggtggacttattctgttctagaatcactttacaggcccagcttaccgtacattcactcatcagagcaacacgacagccgtccaagtcgcggccatgcgtagcagagggccagagcccagacgccagccagacaggcagcgtcgtagtgcgttacggagctttgccacgaactctcgtagtcccgtgtactcccggaccggagcagtaggggttcgggagcagtatgccgtgccgtgcccgacggggaatgcatgacctgacagtaacagtacaacccactactagcttcaaatcatctatagccaatgtaatagtcaattcatacaatagttgattactacactattaatacatggtcccacatatcatacacatattacgtcttggagttcgtgctacagctggctatagatatgtagtccgctactattttctctctttttttatctctttaaaatatgtttataactggcttatagcctgttattgtagtgaagacgtgctgtgggcccgcacaccatgagccatgacaccgactactgccgtttggtgttttaccgttctgggttttcgctcgcatggtgcccacgtagagacgatagacgaaaagaatttgaaaatgtacttttatttatcatattttgcatttatatacctgtataagattattttataaaaatatatctaatccgtgcggaatggttgcgcgggagcgagggcgaaccgcagactcgagccggtcaagcggaaccgggatgcgcgactgagccggtctcgcatggctacactgcgggatcaagtcggtaccatggcgccgaagcgcgggagcgatggcgtcgggggagcgtggcggtactgcataacggcggcgcggcaccggcgcggtcccgcggttccagcgcgtggtatcgagccagtctccggctccgtgtgttattccgtgttaatcccccaattttttccaactcatctccttcattttccgcgcgcacgcttttcaaactgctaaacggtgtaatttttgcaaaaagtatctatactaaagttgctcagaaaaatcatattaatctattttttaaaaaaattaactaataattaattaatcacgtgctaatgtactgctccgttttccgtgcggacatgtattcacgagttgggaaagggcgtgcgtatggcagcggtagtccgcgcatccgccatgtgggagagaggccggtcccacgcatccaatatgcaggagcgctccggatccgtgtgttattcccctaatatttccaacccatctccttccttttccgcgcgcacgtttttcaaactactaaacggtgtattttttgcaacaaattactcacatattatggaaacgctctattaagagaatccgtttcaatttttgttgtactcatgatgttacactacgtatagatcaaatgttgcagtgaattaaaacatctcgctatttgcttaaacattttttatatatggtaaaacaatacccgattttttgaaaaccatttgtttcatacattgtagcaaaatgttccatgaggtgatttggttgtatttcatttttttaaacgattgaacattttcgatctacttagtgaaataattccgatctacttggtggaatagagcccgattaatcgggcgtccgattcgtagtcgcctcggaaaaactcttatacgtgcaatgcgccggctcttcaacatcagatccgaaaatgcacccttcccgaaaacttttcggcgaaagggggtaactatatttatagcgccatatttttcaccaacaaatagtcagcatgtatttacattgtaagtccctaaattacatatgtaattttagtgtatttacaatgtaaattctaaaattacatatgtaagtctctaaattacatatgtaattttagtatatttacaatgtaagttctaaaattacatatgtaagtcctaaaattatatatgtagtagtttttttcatgaaaacacatgctgacgagatgagaaatttgaattgattggcttcacgatgcaacacgaaacacgtaaagacgttccatgcacatgtgtagcgcccgttccgtcgtggcgcctagcgggaaaattaaattctaaaaaccatatttgcgaaagtcgtttctttgcttgttgtctatgtgcgtgccaatctctgatctcgaatccccgatccatcgtcgaattcaaatttcaagtccaaatctctcctaaattccatccctctgaaaaagtctagtttgcctccctcaggttcagtgggccgatttccctctcggcccatctctctctctgtctctctccctcagctttcccctcgctctgcccgtgcgcagcacgcgtgtgcgcgtgagccgacgccgagtcgagccgagcaccatctcctctctctcgttctctcgctctccctctccccgtctctctccccggcgaccccccgcccgtgaatttcgaacccgcgcaccgttgcttcgcgcgcgcgtgcccgcgcgttcgccgccgtcgtcagccgcctgctgcccgtgcctgcgccgtccggccctgcgccctgccacgctgcgcctgcgccgcgccctgccccgcgagccagcacgcgtgcccgagccgcgccgctcgcatccgtccaaaacccgaagacggagctcccgctcccatccctctcccttcccaaattggcatggcgcgcccctcctttctcccctccgtttctccctttcccctctcggcccggcccctgcttcctccgttcggttcccgcgccatggacacagaggagcagccgcccaagccgttgcccgcgtttgaccgcgcccgtgaagcctatcccttcccctcgaagctccctcgcaccctagtgtcgcccaagatcggtttccgaaccgacattgccgcctataaacccgagcccctccccaaaccaatctcccccgttttcaccctcgccattgccgctctcttgccctgtttcgtcgtcgccatccgttgttgagcgtgccggaggagccggcgcgttcgtggacgcgtgacgtggactccgggcgctcgtcttcttcctcttcctcatcccgaggccgaaacgatcacgtttcgcgccgtcggccatcgtcactacgccccttcaccccgtcgcggtagtgcactccccgttctccctcctcgttccctctcctccccttagactcgagtagtagcacgactagaccccccgtagctagctggcgtcgccctaagccttgccgccgcccgctatgtgctcgccgccgtcgccgcccgagctcggtagcgcctctcatcgccggcctccctcggtgccttttctcctaatccagcgcaaggaacggactccggtggccgcgtagatccgctggtccggagaaatcgaactcccgtcaccctttccccttttctcgccaccggatgccgccgcagcaatccgctgccgtcgagcatccctcggcgaatccgagccattggctcgtctcccctcgtcccgtgctacctcccggtgtgctcgctttcgcctgtatcaccgtggttctccccgccgttcgcagccgccgtccgtcgtccgttccggccgacgccttcttcaacctcctgccggctagcgtggcagccatgtaggcgccacgtcggcgccacctcggccgcgaccaggtcaagctaaccctggtccgccgctcccctccgccccgccctcgcgcgcggtccaccgtgatccgtaaggctgcgcgtgggcccgccgcatccgcacccaccgcgagccgcgcgcgtgcaccgcgtccctcccccaaaccctagcgcgcgccgcgtgctccctccgcgcgatgaaccgtgtcaccaacaagcgggtcccactcgggaccacgcgaggtgagcccggtccaccggttccctctctcacctcccgcgcaccctactgggccgagtcctctcgggccggccggcccattagctcggccgagccgcgcctcttctctcgggccgcgccctagccgcccgagggaagtctactcgtcctccctctttcttttcttttcaaaaggatttaaataaatcatttttcctttagatcaaaaatccaataatcttagaaattcaatatcttcttaaccgtacatccgattgactccgttcaacttccaaaaatcctcaattctcgagatctatccaatggcacgcatagaggtcaataatagagctttattttcgccgtttgttgagttgtcccgtttcgtgtgtagtttcggagcccgaagacccgcagtgcgaggatttcgaggatcaagctcaagatctcaagcaaggcaagtcacctttgatcatcttgcacctataatttaaatctaattatttcttttccgcaaatattgcatgaatatgtttaacacaagtatttcggccacggcttgcgagatagcctgccggcctcaaccctaattgctgcaattaccctccttgaattattgaacacttaaacctcctttgtcgactgttgtgcttcgatgcacgggccttcgggcacgcgcatcggaacacctcccctcaaatttaaaatatccaacgatgggtaaaacttggggttttacaaaagacttggaaaacccgacacctgggtcggtgcttgcgaactaaatgaatttccaaaatcgcggaccggggaacgtaccgggagtacggtttcccactcttgcacttaaggatcgtttccttggaatttcatccgaacataagacaagtgcgaccacatgggtgtaatgggacacccctggttgagtaattagctaatcgggggaaccatgatgccaaaagacatgtggattcaacggggtggtgccggggagaacccccggatttcctggcacagtatggtgtgggacctaacctggtgttggtctgggacccctctcgttggcatatggtgaacctgtgtcggctttcaaaatgccttgtcatgaaagcctcaaggtctctagacgtggccgttatgcatgggctgggtgatccgggttagtaatgtcgtgtgggtaaagtgtaccccctctgcagaggttattaaactgttcgaacagccgtgcccatggtcatgggcggatgtgaggtgattcctagcgtagttttgtatgactactgctttgtgaaattgttgctgtgaaatgggttcgatgtttggaaaatctgcggctgatggggtcagccaggcccgggtggccatttgaaagctgttggccgggtgccaaccttgaatcaattcaaagattgatacattgcacatactccgaccagacgagacacactgtcacatccgtgtcgtttgagaagtactcacttagttgttttaaaaaggagtttaaataaaatcaattgcaaaaacaacagcctttcctttgaagcctgcattaaacacttaattcccacggcttgctgagtactcctgtactcacccttactctataaaaataatccccccggttgctgaagaagatgaagtggatcccgctgacgaggagttcttccaggagcaagtcggctacgatgagttttagggtttcggtctagttcccaagtcgcgcctgtgatgattggtccaagtcttggcttccgttttcccttttgtaatgcagttatgagctcgggatctgtccgcaacccaacatgactgtactcctactctgtaataaagagacctctgttgttgtgatattctgttttcctgtgataccaacaatgttttctgggactggtatcgattaacaggttaatttggagcgtcacgagctagttccgttcgggactagttcggggcgtgacaacatggtattgcaatcgtacacgaatctcaagggagatcaattgaacaagaaatctactgtgattactcacaaaatgtgtcgatataattatagcaacaccgcggcgaaaagcgacgtcgccttctatcgatcgtaatgtacgcacgacgcttccagcaaattaacaacgggacaagccaatccatgcagcacgccatactcgatcgatcacaacttcgcagggaatcgaggatagccgaggcgtgaagcagacgcgacccgggccgcatccatccatctgcccccgcgcgccgattcctcgtgctcgtgcgcgcgacatgcggggcgcgtgtcctctgccacccgtcccgtcccgtccgtgcgcgcgcgcgatttcttaaagccggcgacatgccgtcggcgggtgcacgacagcgaccgccgaccggggccaatccgtggcttgtactcttgcgccaccgttggccccgccggccggcatggccgcgagaggaggccatttatcagttgcgtcttggcaatatatggtgtgttttcttgctttctgcattaatgagagcaagtttaatagtatagccaactactagctccaattcatctatagtcaatctaatagctcattcatataatagttatatactgcactattaatatctggtctcacctatcatatatacattgcgtcttggagtccgtgctacagctggctataaatctgtagcccgctgctattctctctccttatttatcttcttaaaatatgtttgtagctgacttatagcctactattgtacctgctctgatgatcaatccagcaccgaaatggaagccatctttaaataagcagattgctggatggagcccatccgtgcaccgtgccatggtccatgcgtcgcgttgattagcgctagctgctggtcgagccgacttgtgttgcttgcagcgtccgtcgacggcagcttagcgcgcgctggcacgtagagttgccttattaatgtcgggggtggctcgccatgttctgcgacagcagatcgaaatgagaagttaagaaacccatgttcggaaaatggattgccgcgtgctcgagatcacactggccgacaggtgggcctctcagttgcattcctcagctatgctctggacagcagtgcctgccaattgtgtcaaacggtcaaaccccatcctgaagaaagcttaaaacaaaccctttttgcacagtagaccatacataggcacatagctacagtctgtgagtagattagatcattagagtactttgttactgcactagtgaccactgtcctagcttaagaaatcaccctccctctagtacgcacagctgtctttcttgacaatatctgtactactatgtgttaaaaatacagagagaacatgaacacttgtccttaacatagagtaacccatttcggcaagttcggtaatatatccaaccactctacataaatccgtttggttacatgtgttactctatctcatatctgatgctttcttaggtggttaagctatcaacaagctacctgctcacttgaatcaacagttcctcgacgccaatgagtaggcggttgtgaagagccaattttatcatgtttttcagccacacatgaagtagaatccaccgattcataatcatctataatcgtttttacgcgctttgcaactagacaaaaatcggtattggagagcaatgcaattccccttacattctcgtccaataatctaatttgacgatccaaaagaaaccaaatccatggggaggagatataaaacatagttcacccccataatgcaatgcccctcctgtagatattttttggtcaccaaagacaatagtgtggacccctgcagggtcctcaaagggaaaggcaccagagttaattaactggttgtcttactagatcctagctgttcctctgctgacagtggttgtgtttgtgtatctcggtcccctctgcatccttcctcggtttagtcctgacgaggaggggaaaaaaaataacccagccactacacacctgctggtccaacagctagaaacagctaaccgctgccccagcaagccggtgaactgtcatcacgcccagatccagggacattctcttttcgctttgtcggcgtctactccatcgatctaccacaccctgttcatacgcatttgtctcggttgccgccatccgccaccaacgtgatacctgaaaattttcattcatacgatgaacagagccatctgccatctactaatctagttgctgaacaaagtctaaggccagtcacaatggctagtgtcattgcacggctacccaaaatattataccatcttctctcaaatgaaatcttttatgaaacaatccccacagtggaggggtttcactttgacgtttccaagactaagcaaagcatttaattgatacaagttgctgggatcatttgtacccaaaatccggcgcggcgcgggagaatgcggaggtcgcacggcggaggcggacgcaagagatccggtgaatgaaacgaatcggcctcaacgggggtttcactctgttaccgaggacttggaaacgacgctgacgagtttcaccaggatgaaactctttccttctctctcatccccatttcatgcaaataatcattttttattcagtcttacccctattaaatgtgcatgacacaccagtgaaacccccattgtgactggcctaacagatcctcctcctctcccaagatggagaattagttgccgacaaaattattaaggattagttacgacttcttagaggaggtacaatagcatgctataagccagctgcaaacatatttaaagcagataaatgaggagagagaaaagcagcgggctacagatttatagccagctgtagcacggactccaagacgcaatgtgtgtatgacaggtggggccatgtattaatagtgtagtatgtaactattatatgaataagctattagattgactataaatgaattggagctagtagttggctatactattaaacttgctcttaccggtgtgtgcaaccatatactccacttatcatatatatatatgcgcgtcggagcgaaattttgcagggtggttgtgatctctccggtgtttgttgttatacagacgtatgtatgttcatacataatgttgccaaacggcaaccgaatttcacacatgctttcaagtttcagcagatgttggttatcgagggattggtgggtgaacaacacagagcagaagagagctgtacgttccaacaaaccattgaacaagtcactgtatgtatctgaacaacgccatactatgggggtgtttagatggggctaaacctttttagcctatgtcacatcggatgtttagacgctaacttggagtattaaatatagactaataaaaaaactaatttcataaatgagagctaatccacgagacgaattttttaagcctaattaatccataattatcaaaagtttattgtagcattacattgtcaaaattatagcgtaattagactcaaaagatttgtctcacgaattagtccaaggttatgaaaataggttttgtaattagtgtatgtttaatacttcaaattagtatccaaacattcaataagacagtgacttattctaagtctctcgaaacgaaataggccctatacattttctttttctgcaaaagaaaatgaaaacgtaggccggttgcgagtgcgtgctgaggcaatcaatcatacattcgagttcattcaactgagcacaatcagtggcaaagcttgctgcaaaacgggggtcccagtcgtactaccttcctatgatttgttaaggccctaattatagaatctagtaagagacagcggagaccaaaagagtgcaggctgagcactctgccctccatttgctagcagaggcaaggctctgtgtagatgattactccttttaacaattcgattatacagattactgaaacttcaccttcgatttaacaattcgatggttgccacagctatattcatccatgtgacgacctaggcttagagcagatagataatgaacgcccaccatcagcctgaccaacggagcagcactatacattcgtgatacggagaactactcctttatttatgtgcccctatagccggaacatttgattacgtccgcacaaagcacggttcatgtacatgaaaattgcaggataaattgcaccggacggcagcgacatgtatcctcctctcatgtcaattcgctctggaagctcgccaattggatttgggcccctacgtgagtctccgaaagtttttacttccactcgttcaaggagtgtgtagttcgcatccgatgtccatagtgaaggtgcaacaaggcgtagggatactaataatctgtgattactcaacttgtggtttgagatgtagaatatgtgcaagtgaccagtatgcaagtagtactagcaccatacaggctagtaatacgctcgagagaataggagtacatcttaagctaggcaggcagcaagcatttctaaactgattggtcggagctgattaaaacggattacagggtggtggccccacaacactagtccagtttaggttgccaacccagtatcgccattggttcattggctagtactagtagcaagccgagaccggccggtggtggtggccctcctcaccagcgcctcacctcggctctttttgcccctccccccgccgtctcgtccccaacgtgacggccacatgggtgccggttgccccccacaccgatcgatcgatcgatcaatccaccagctcactcctcacccccatcaggtgcgcgcaaccacctttccaccgatcacgacgctcccccatccccgtctgctcggctcggcgcagcgcacccacacccacgccgtcgtgcgcgccacccgagcccgcaaggcggaggtaaaaactgggatgggataccgtgcggtttaccccagcgggaaaaagggacaagatcatcgtaacacggcccgaggcgaggaagagagggggtctactttcgggggtcgagtcggtggaacccgagggcgctttctcttggaaacacgcctggtgcgccatgcgacgcaacgcaatggtgagagacggacggacggacggaaacatcgagcaaaaagagaggagggctttgggcctttgaccgggtcaagagaggagaggacgcatgcaaaacacagagagcagaatataaaccggccgaactcatgcgcccatgaatacgcatgccagggccagtccaagaggaagacgggggatgatgacatgatccaatccaaaattgcttttatggcgggcattggagcggagcggagcggagcaagcagaggctctcccgccaaaactcttcaaggccattaaaatcggcagaggcagagagctactatgacggaacggacggacggatggtgatggctccagcggctgagccacccattccagctagacccacgctggatcctgcgatcgagctagccgagccaagcctgggactctctttggggatgcgtcgttttctcggcgagcacgcaggggactaccggagatctagtcagatgctgacccacagccaggcagattcctaggcggttagtcgccggacaaactgttcatcctccattgtgcaagtgtactacaccatccactctataatcatgtatttattgtcaactagtaagaaatactcaccatcattcatatattaaggctttgatggtacaaatacaactgttgtttaacaacacccagcccaactttgctgctgctgcggctaagcaccgaactactacacccctaaataagaatcttattgtaccgaaccaaaacagaaggttagggcacctataagctagtacaagaaaaatggcaattaaattcatagtttccttttcttttttttccttaagaaaggaacgcccttattcacggagcccacggcaagcttcttttgcaagtaaaagactgcaaaaaggagggaggagggagagagaccttatagctgggtgtgcgctggtacttcacttcttggcaagcacccaaagcaagcaaagccatggatgatgtagaaatgggtttatttttggctcccccaagatgacccatccataaaccactttgatgataccttgtcacttcttgcttgcaagctgcacaagccgctaacatttctctctcgccctccaaaagaaccacttattattattccttccaaaccactctgccaaaccaccaaaccgaagacatggatttcctctactgcacgtcgtctccgtctccatctccgccgctttccgtccacaccaaaaaaccaatatatcaccaatcaaacaaacaaacctaacgctgatgatactactgcctcctactaccctctttggctaatactaccacctaacagacgaagtactgttactaactttaattaatatgattaaacttgacgcaaagccagaagggggccgccggaatcttggtgcatcatccttcgtctgctccggccgacacaaaaaagttcacgaactgtggcagagcgcaggcgccggcgccggcgacggcacggctggagacgcgcgccgcttctggctggccagcatggcgttgctccggttaatcaaagcgtctgcataaaaaaaaacaactcgacataagcttttgcttgccatttccgtcgagaaaagaggatttcgccgcatgtggtggttaccgtgatcgagaacgaaaccgccggggtagcgaggctgggcgccgaggtcgtcgaggttgagattgagcgcttgcacgacacgggcggggacaagaacagtcgagcagcctgcagggtcgcggaaaacaccaaaggggaagaatattgagccaaaagaacaggggaatacgccggcaaaagcaaacggccaaaaatggcggacactgcacctgtctttctcttgggctccgccggtgcgccggccgggcgagggaggaagacgccggtgccgttgcgctcgcgcttggcgccgggcggggtgaggaacacggcgcgcatgccgccgccgccgccacccccgactccgggtgccggcgcgtgctgctgcttctgcaagggaggccacgccgcagggttcatgtcgacaggcgacgcggcgactccgcacccggcggtcttcgccgctgccgtctgcctcgcgccccacgcggcggccgcggcgagatgccgatccctctgcaacttcagcagctgctgctgcttgaggagatgaaactgaaacaggagaaaaatgtcggggagaaaaaaccgcggaaaacgacggtgcaactgaagaatctctgcatgaaccaagtacctgtgcggcttgaatctggcgctgtgtaagcaactgggcgagcggatggtagtaggcggcgggagcgacctttgttgccggtggagaaacgggaggcggcggcgaggccttgcgcgccggagcggcaaagccaccgtgggcggggaagccgtagggattgttcggcaccgggatgctgttggtgacccgcatgcgcgccacctgacctgccgcctcatagagcatgtcccacgggtccgccggcttctgctccaacggcgacgacggcggcgagctcacctgagacgccccgccgttcgggctctcctggccggacttgggcagcccacacagcgtcgactgcggcgaaccaaccgtcacctccgcctgcacacgaaaaaccaatcaaaaaccacgacacatcatccccctttgaaagaaccaagaaaaatcaaaccaccttgggaggcgcgtcgcgctcgccgtcgtcaccaagaagcccggcgaggcggcgggagaggccggccaagcaatcctcctcgtcgctgctatcgctcctcgcggccacggcggccttctcctcctcggagaagaagtcgtcgtcgaggaactcatccggcagcaagaactcctcgccaccgtcggaccactccgtcgccatttccctccaattccccaccacaacaatcctgacctccttcccccccgagagttatggcgtgccggtttggtgggcgagaacctctgcccgcccgaggacgacgagaagaactagtgacagcttcgaaccgtacggacagcggccacaaccagctatccggccggtcccccccacacacaaaggaggcggagaacgaagggcgcgaagccgagcgcgacgcaagcggcggcgagtagagaggttcttgtcgccgaaaagaagcgggcggagaaggagatggggggcgtgagaatgtcgctggacggcggcaccgcgagtcaaaatgctgctcggcctcgccgcgacgggggctataaaagaggcgagcgagaggagagagaaagggaagccggattatcatctctcagtgttttttttttgcgtaaattaagcggtttaaatcaaatgtttttttctttttttttttggagtggtgagcaagtgggagttgagtgacggccggtgaaccgtagcgcccccaaatgcctctcccctgttcagcgtcagcgagggggatttcgagtactcttgcgcgtattttttgggccgtgcaatgcaagaccgagggagttattatggggtcagtacgtagttgtggtacgaattcatctcggatctactcctatatttttgccggatgtttgtgtgcgtggggcgatcatgtcaagcgcatttcacccactacaccgtttgctaaatggtggttcaaccgattttagagaagatcacaccacccaaatggacccaaaatggagcagaagcaaaagcttaatttcttttacatcggcgatacaacacccactctaccctggccgctgtacgcaccacctctcgtcaatccccagttgtgaaaatctcacaccgaacagtgcccaatcacggcgtattcacggcgtgtttcgtgcgtgtacctagtgagattgttattgctccattgaatgcacgccacgtcggcgggggtaaagggatgggttagcgccatacggtcacgagaattgcatattctcaggacgatttttttttacagcgcattaaagtcgtgagcgctttaaagcggggagttttggtactacggtgagtggaaaagagaaagaggcagtggtatgatgtgtgtgtggtgtcgggcacatgtcacgtagcagcagtagtaggcaaatgctgcgcaccgtaacgcaccactgcatcattgcatttttcacatcgcccgataacccgccataaatcgagtgaaaagcggtgaaactgaaccgggaccgggtggcccgttcggcgacgagccagatgaaacgacgccgacggcgacgaaccgctgcatcggtaactgaccacgggacccacccgaggcgtcccttctggtgatcgggatggtgcttcgtgtggcgggaggggagtttgatttctggggagaccgtttttttgcccctacgcatgcaccgtttcgaaaaaataatttctcattttttgtttgaatttgaagccttgcctttaaaatcaagtactgatcgaaactgcagcaggttttccagtggcgtgtcagaatcccttccgtggaagtggtggcaatgcggataagggcgaggcaagcaaacggcaaactgctgccatgtagtcctcgcttagcccacctgtcgctctctccgtgggcccacatgtcagtgagccgcaccccagtgcgtgggtcccaccgaggagagcggcctctcggattcctgtgaatctccgcgcgcctggctgacgcgcgccacgccggagattcccgatacggcttggcgcccacgtcgctgtcgggcgggccccgcgccacgcacgtcaccctccctctccgtcaattataacggcggcgcggttgtcgcggtcggtggggtccacggcaaccgctgtggccgacgtggtgggacccttttggtcctgcgaactcgccgaaaccatcgtacccagagttttttcgcgtcctttcgttcaagtttttcacgtttccctctcaataaaaagctttttctgtagttctttttcccataaaatttctttacaagaaaaagtgtttgttgcgtaggccgctgttattatcgtgtccaatgaaattcgggaggccacgaaaaaaactacgctagcgtttgcccctcttttttcaagtgtttacgcattttttttctcgggtttttttctggaaaaaaaacgctatccggatcaggagggtgaggcgttgaggcggtggacgtggggacgtgttcacccaccagaaaatgactggtttcatctggtatataaaaaagaaagaaaaaacgaaagaataaaagataaccagaacgattgattgcatggttgaataggaaaagagagccccatgcacacaggggaatacggttgtgacatgatttccaccgtttgcgtggtgctaatgttgcttttagcgatgattactgacgatgacaacggatgatattattacctcaatgtatatttactaagtgggtagtaagatgagacccacaaaactggatagtaggtgttttgattctcacaatgtataggtaagctgggtcccacatttaagaggagtggatgggtgaggtagagagaaagaatgagagataatagagttttaatatttgtttattacttgttacatgatagtagtgctactacccagatgatactattgctcactttattacatgcctcataatagtaaactaggtagtaggatttcttactacctactttttagcacattgtagatgccctactctatacgagcgaaatgaaaacatgaacctgcagtgatgcaagcccggggtgtcctgtgtcggatcccgattgggtgagcccgctatttcgtgacgtgcccggagagcgacgtgatcctttttattcaagagcggccgatgagttgctgattacggtagcggtagtagtacttgcacttaggacacccacaatggttatctataggctctctacaagagatccatgtcagcatatttttctacttgaaagatattaaatgaagagagagagcaaaactatctactaacttagagatagtctatagagaaaaacgaggcaatacatgagagagctatagatactgttgtagacatactattgaggtggtttactattaatctagtctattgctgagatgtacatgttttatagagagcaccttactttaccattgcgggtgctcttatagcatttacaatagcatgctataagttagctgtaaacatattttaagaagataaatgaagagagagaagagcagtgggctacagatttatagccagctatagcacggactccaagacacaatgtgtgtatgacaggtggaaccagttattaataatgtagtatgcactgtaattattatatgaattagctattagatttggctgtagatgaattagagccagtagttagcttatactattagacttgcttacaactacaagttctttgcttttttttccttttgaatcggatgggcgtcatgcacggttgccttcttttttgaaaaacgaaatgttggtgtgtgcattggatgctctctgctgcgagaaagacgcaactttttccaaaagcgatcttgtttcgagtggaggaagagagcagcgaggggcccgagtgttcttcccgaccgattcaagcgagcacagttcataaaagatggacatcagtagtagtactagtactataaccatacattactccctccgtctcaaaaaaaaaaagacaaatctggtttccgtgtccaatatttgaccatccgtcttatttaaaaaaattataaaaaaaattaaaaagataagtcacgcataaagtattaatcatgttttattatctaacaacaataaaaatactaattataaaaaaatttcatataagacggacagttaaacattagcatggaaatctaaggtttgtctttttttaggacggagggagtactctctaaccctgtctctacattgccaagacatgcaagaacaccaaccaggagacaggcgaaaaaacaacgataaagaacgcgcaaacaaagactcgacggtttgacgagcattttgaacctcagtagctcgagtagtagagtgttttttttcctcttcttgttttggcgtttgtctccagaccggcctgcacgctcccacagcacgcggcacggcagcgcagcgcagccgtagctcctcccctttctgggagtcgctccggccaacctttcgccactcgcctgcgccgccgcagcgacacgcccgtcgcaacagcgcaccgcttcggtgaaagaaacgcactctgcctctgctgctgctgctactgcctggctgcctggctcgtgagtagtagtagctgttgcgtctacactgcatcgcatgcgcgtgccgtgcgaacaggtcagaaaatgcagctgcagcggcgcccgctagcgtccatggatcgatataattttcacgtagctacagtgtaatgaagtacagtactcctgctagtagtgtgtttttattagacggataattagtgccggactgccggtggtcgtaccaaatggacgttgttaagaggggttttaccgaagaaaacagagctccaaagctggcgaagtttggtgataggacgatcagaggagacggagaccgtacggttttcaagataaccgagagcatttcttggcttggagcttgtgaccgaattgaccgaggcagcagtcagtgaaagatcgattatttgtatttagagcgaggtcaatagtgcaacacactacttgctccaaatcatctatagtcaatgtaatagttaattcatacaatagttgtttactatactattaatacctgatctcacctatcatacacatattacgtcttgaagtccgtgctgcagctggctagcccactgttcttctctctctttctttatctttttaaaatatatttatagatggcttatagcctgctatcgtacctgctcttatggccagggcctgcgcctgcctgggtggcgtctgcaactcgtgtcactgcggctcgcgtttgctgcggtcgcagggccagctgttcccggtcaaacccagtttggcgcctctgtagctggctttcccgccatttgtggacaggccggagctttcccgcgcaaatagaggcgcctgctcgccgctcccggttgcaggggcacgggctaacatggacatggcgcgtattgtcgtgtttttgtttgacttttggcaagtttgaaaagagtatactaatattatctactatatatactaaaagtctattaaacatcttataaacacccttaagataccgcgtgatgttctaataaattaggaaaaatctaacgaaacttataagaaaaaaaataaaaatatatagccattaatttacacttaaatcagtggatacattattagtaatatcgttcctacactcttataaactcttctaagatggcatatgacgttgtaatatattagagaaaatctaagaaaaattataagaaaaaaaaacacctaaccattgatttacacttaaactgatgatctattattttaattattagattatatctatcaagtaatcattcattgttaaaaaccggctaatccctccgtttgtatgtaagtacagaaagatatgtcaaaaagaaaagaagaagaagaagaagaagaagaagaagaagaagaagaagtagtgtgtgtacgcgatcaatcccatcgaatagttctctctctttctttgaaagctctacgcttttttctcgaattgtgcatatatagcaactattcctgatgatgttgtcaaagaagccacatcaacaatgcttcaaaccatcccgccaattctcttgaaagtattttttttactagtgatataaaagacaatcacaagtgatcatataaacgcgtgcacactcgtcatataagtacacatatgcacacctaccctatgagagaaaagtatgtcccaggaagaggtaaaattatgtacgtatggaacactactattcgccaaaaaacatacatgtgtacaataaaaaatatcacataaaccacattatatcttttaattgtgtcataatcatctagatagtgtttataattagcataaataattttaacaatattgtcagggttacggataaggtatacctcctatcctacgacttatggaatatctcgataaggtatatcttaacatatacggattgtacccataaatatcacgtggaaaccgtttcggatggaacgaaatatctctacgagtcaagtaattccgaagtcctactcgcaagagatagaatttctgttataccgtaccaggtcctatcccctcaaacctttcttgagggtcaagaagatccatggtataaaagggaccccctaggaggggtttcgggaatcgaattccatctccgacacacccaccaaagtttacgaagccggagtacgcggagccaagtcgccgggagatctcgtcgagtccatcgactatgatctcgtcggtatcgtctgtttcgactactctctttgtaatctgttctcatcatcatcaatcccatataaactggactagggctattacctgataaggggcctgaaccagtataatccttatcttttgtctgcttgatgtcatactacgtagaccctcgttccaacgtaccccaatactctactcatccggtctacgagcatcactcgtcgacaaatgtatattttttccatcatatacctacaaatttacaataaaacaaaaaaaaatcaaaacccatattaactcgtatgtttgcgaaggatggtgtgataggttcacatataaccagaaaaaagtgatttttgtttatgtcaaaagctatggtatattttatgatataattttttttcttgtatgattataagataatctattgttcttatagtaaatatggtgagatatgactagttttctttttacaaacaataataaattgctcgcatagatgcgtgggttttgttcctagttttatgtagagttacccaatagctttggaaaaaatatataagcaatactgacgaagtaagtttttggactaatatttttacaagctgaaatgtaaaaataagctcaatattccataacggatttcctataaaattttcgcaagttttttgcctccaaaacttccagatctgtgaccatcagatcaccttaagatttgtgcatgaagagaaaaacattgctagaaagaatttttttcacacgcatcaggcgtaagatcctagtgctacctaatcaaagcattgttgaatgcaagttttaataaattatattgtagtcagtagttataatacaattacaatgtagttacaatgcagctataatataattataaatcaattatactgtagatacatcttaatgttttagaaaaaaaaacttactacggtttttttattctctcattccataatttggttttagctaaagaaaaacatacccttacgttattgttatggtttatggttcaccagtccgaatcaggggcggagatagagtatattagagggtgcccaggaacccggtcaagaaaattttttagctatacctcgtctatttttaccatatatgcacccccttaatacgaatttaggcacccacatcagcttaaatttgatctacaatagagtgaattaagtaagtgacaccaccctctatttcggtccagctccgtcccactccgaatggatagccctgataattaattgagagcaatgagaactttcaacttgtacgttcaagggtgacgagtactaaatagaaacaaagggaatacaacttttttgagaaaaagacatgaacccagtattgatcaaatgggtataacacccaaggtgatgtgtatgatacttttcaccaacaaacaagggctgcgtaatgcagttatttgcagtagatttggccaatatgcaatttgctgttccaaatgtcgtagacttgtaaatacgctgagtgttcgtattgaggtagtattgtactatagcgatagttctgccatacggtagctagctcacgctacttgcgactaaattgaagttgaatgtaagaacaggttgaaatgtgcatcatccttgtttccaacaaagggccgtatatcaccttctaaaatacgagtactgctcttatctactccaactatttgttgacctacaactcctaatttcgtacggaagactctcatgaacattacgaatcagtgcggatctgcgatgccatcaatctccatgtataatcaatactacatccatttcatgttacaagatgttttggctttgttaaagttaaattgctttaagtttgataaagtttatttaaaaaaatagtaatattttcgtagaactactattgggagcgttgcgcgctcccatattccaagcgcacgtgtatcagccaggcccacctcaccccacgttccatcatcccgctcccaccgttatcggagtaaacgattaacttcgataaaaacaacttactggttacgatcccaccccacgtcctatcatcccactcctactgttatcggagtaaacgatttacttcgataataaaaacaacttccctttcgatcccaccccacgtcccgtatcgtgctcccaccatttttgatttactccgataaaaacaacttctctacttctggtatatattctatttttcccgtacccaaccaaccactctcgccccctactttattttttcttttttttcggatctgaatcgatccaccatcccagcccacagatcggcgacgcaccatggaggaggacgacaacaccgtggcggttgatggcggtgaccggcaagcggtggccggcggcgcttgaggcgaaggcattgcttcaggactcgccgccgcagcatctgcttcagatcaatgttgaagagacgtctggcccatggcgaacgaggtggacgtcatggggacggttagttctctcagcaattcctaatgagattcttgatttcttgcaagaattgtatacaatctatgattaattaaattctttatctttcttgattctatgcagtctaacttcgattgggttgagcgctcatcttgacgtgcttctctattatcccttgcatggcggagatcatgtttgtgatggtcaatcgatttggtaacatcggcaagaaactgtgatttgtttcatcacctctgtcgttgcccagtttatgacagtgaggcggtgaaaacagcgatggcgacctctatctttggctccgtcgccggatccggctcctactgaggtcgcagcggccagacttggtgttgcattggctccagcctgcatctccaccactttgtcttcttgctctctctagcaggacagaaacttcatttagccgtcacgaggaactggcgatggcgtgtattgttgtatttgtgtgtaaaatttttattcttgtgcttttaccatgatgtgcatgtaaaatctttattttttgtcccatgatttaggatggagtgattcaatatataaggaaaaaaaaattcacgtattatttggggtaaactaattagaccccagtaattccctccttatttattttttcccttttttcttgcttgatgcactcactataagaaatcatcaaccaaggctggcaataatgcaattactacaagttaatgcaccatcaattttcatttacatcgatagtaatacgaatactacaagatttgatcaaccaatgttgttcataatccaactactacaagcacatgtaccatctattttcatttaggtcgacaataactcgattactacaagattttacttagcatggttgtcgttaatccaattactacaggcacatgcaccatcaattttcatttacattgatagtaatttgattactacaagatttggtctcagtttattgcacaccatatcgtaactacctcgattggaaatagagataaaccaattacaatgattattttcaaccgaccaccgattttacgaatctgtaattgatttaccccgaattcaaatagaactaatctagacagatcgaacatgggcaaccgaacaccagtttttgcggactctaggcgcgatgtgtggtgctcggaataatattccgcgctctagcgctcggaatagcgctaccgatattttcgacccaagataaatttattataaaaatatatttagttattaatttaataaaactaattcggtaatgtaaatattactatatttgtctataaacttagttaaactttaagcagtttgattttgaccaaagtcaaaacatcttataacctgaaacagatggattataacctgaaacagatggagtatttgtttgtcgttgtcaacattagacataaggaattttgtcaatataatcacagggtcatcagaatcttttatatcataagatgaagatagtagtataaatcccagagatgatgattggaggtaggccgaccaaccccaaagctaatttcatcactgttgtgaatgaaaacaggaccaataaatagacttgcaatacaatggaatgaagtgtacataaaaaataaaaggtcaactactgcatatatagagaaaagatagcatgataaataactgcagagtgtagaaaaatggatcctagagaagaagattaactactataaggccctctttggactttggtttagctagtgatgtaagattttttttttagagttgggtattttcacctccacaaatctatgcaaataaataattttgttcctattttagatgatatttaattttttttaaccgctacagttttgcatataaactttaaatttaccgtggatgtggtatctagaattgtgctaaacagtatctaaatatttggtagcatgaggaatttgtaagtgacgtctttgtgaaaaattggaggtctcgtgtacttttccttgaagagaaacttgtagtataatcaatttaacaagttatcaattggtagaaattactcctaattggttagtcgaagcaaagtgggaattcaccagggttttatatgaaaatattcaactgttcaactaaaaaaaatcaatatttcaattaaaattcaaaaacctttcacctgttgaacgtggcatccactctccacaacctctctcaccaaaagagtgccaacctacatacttacatagaaaagctttttccccttttactattagcacgtttttcaaaccgctaaatgtcgtgtttttcttttaaaatacatatatcaaagtttctttgaaaagttgaataaaaagtaggttgtgttcattttagcaattaggttgggctacttcgtcgttttccataagcacactaaccgatatgctaaacgacacatttcgtgcaaaagttttctatatagaaatttctttaaaaagtcaaataaatatgtttttcaagcttgtgataattagtactagattaagcatgcgctaattcttgtcttcttctatgggccatcgaatacttcagccgatgtacacttagaacgcagttgaattgaagggataagatcgctcaaatgggaaaagataagggaaggttctccttattttaccaaaagaatatgagtgacacctacatgatagcaagctcaaacaggaaaaacgaaaaaacataaggaaggggcaaggttctttctattttgcctgaaaatataactctcgaagcctttaacactactcaagaatcgatttttcgaacaacactcctctaggttgcaggcgaactataattgcctccctatacagaaatcgctccctcgaggacaattcaagacccgcatgcaaaaaatcatttttgttaggcgagcctattaacagaccacatgtaaaaagaaacctattttcgcaggcaggcctgctaaaagacccgcctgccaccaacccaccattgcctgctatcatcctaaaatatctaatttcccctctcctctcctcccccggcgcccctctcctatcccctccacacccgaggccgacggcagggagcggcggcaaactgcgactccgatagcggcgggcgaggaggctagcggaggaggcacgcatcgacggtgacaacggcttagcctcataggcttcctctctctctcttcctcctcggattcctttctcccccttcctcctacgacgatgacaagaagaggtggcgacggcgttagatgtgacatatctagcgcgccggcctcaggagcggttggccgcgcctctccccctcatgcgcgaattcagcggcaaggatgatggaggtgcctcgatgcgcagatttggtgttggcagcaacgtggtgggaaaggagcaacgatggagtcactggatctggcgcgccggccatcgaaagaagtcaacccccctcgcctcttcccctcgttcacagatccgacgatgacggaagtggaggcatcccgactggcggattcggtggtggtggaggggtgacaacgatgatgacgacaatgggaggggtggggtgtccacaatgatgacggcgaggaggggtttccacaacgatgaatggtgacctgaaggacggcaggtccagcggcggaagcctttcaacgatggtggactacggcggcaacgatgttaggtgttggttttggggatttttcttttcacatgtgtggggcttaactaaccaaccgcaaaagttgatttttcttttttatacagttgtgctactggcatgcaaaaatagttgatttttacatatatctccggacagacggtagtccaaccgcatgaaaaaaaaaatcagtttttatggcgagaaaagatattttctctagtattctacagaaaatattatccttcgtacacttttgtgtacactgtacctagctagttcgcttcaggccttctgctagtcaaccactcctacgaaaggcactgtggttttctcgcggcatgtcaaactaccaatcaaacgccaacaccggccgtccgaataataatccgtaggcactagccacgagcccaccaacgacgtcaaccacatgaattgtcccttgaagctcgtacaacctcgcgaggccgcgaaattctcgagtgtcaaaggcctcaatttgcaagcatgatcgacgcgcgccgtcggcgtcgtacgccgaactctcgtgctcgcaagcgaccacacggacgtggcaggtatagagaggccaatagaccatgcgtgctacatagtttgcccccaggtgcgtgtacgagcgttgtttgctaataacgtaacgacgattgctagcaattactgcatgcgtatgattgtgttttgcgtattccattgggcagatgatggaggcatggattgttcctcgattactctcaactgaagtgatcgggctacaggaacggcaatccagtgtgcttgattaaatcatcacatatataattgtaggtacatgcatgatgcatgccgatattacaagtcttacgtgctaaaagcacgagcagatgctctggtcagctagattttaattgttgagtagaagcgaagagtttttaggatggaggtgattggagatgaatgggtcactacatttaattgttcatcttcggagacgtgtgcagttactagtacggatgtcttcgcgcttcccgaccatgtgcaatgtacggtgccaacttacgaggaatgggaaccaaaatctgttaaagtgtaattaaacaagctgaacataagcatcaagccatcaacttgacctaaaacatgagcacccatggagaaattagagaaactctgaaactggcgtggtggcattgttgggaaattttatttctcggcatggaaatctagagaattcccgcacagcaatttttcacccgttgtctacaggattaacatgatttaatttgtgattatttccataattacatgactatgcgcattgatcggtagcaccaaacatttccatgttttcaattgcccccgatctccctcagcgccatattaatagcggagaccggtgtcgtggaaagatgacaatctctccacgatcgtcttctccctgagaaaaccaaaaccgactgttccaggagtgtaggtggcgaccggaaggccaccgctaccctgctagtgatcattggcaaccccttcgggatcaaaccggcgtcctcactgctacgactacttcccctacgccgatgctcaccggagcagttcgaggacgtcctctacttccactcaggttgacgacattgcagagggaacaaggagaaccacatcattggcttcaaacaacggtcagtaactctaaaaattccgcattaggatgatcatgtttacgctaagcactcatgttagtagatcacaaaatctacagtcatgtgtagattgcgcgactattatattgcaaatttctctagtaatagttaaatttcatatgtgacatcaatacagtgccactcattcactagtcataggataattctacctttagacatgaacgagtaaccgtgcacgtgcaatgcacgtagtaacaaatgtaaattaaaactattgtgggagaaaaataagaataacaccaagcaagttatacatgcatggtagcaccaaagaatccatcaccagaataaatatatactgtatataaataagtgaaagtgctaagcctccgcattaatttgcattggatttatactcttatgcccgttaactgggtctttgcgaggaacatggacagaggatcagggcatgtacaatggtctttattagcggtctctctttattgtcatgtaagtatatttggtgatgtggaagagagagaaagaagaaaagagaaagatggttgctacgcatgacaacagcatagaatcgactgttagcatttattaggaaattttttattgcattgagtctaataaaggaaagatgactagtaagaaagtattttggtacattaatgattagagaccgtattgtcttaactattgtaacgtgatagcctctaattaacgtagagaccatatcggtctctacctttgtacttgccctcatacccgcctccgctagacccgatggccaatggggactttccccctccattttagttccatgtgaagaaccaactacaaccgtcatcatctcctaatggtagagtttcctgcgggaaaagagagaatgggaccattatattgacatatctactattgcttctttgccggtactcttcggccacacaactctttttatgcatttccatattgttagaataagtatcgaatatactagttctatttgattatagttagatttggagttgtaaattacaaaatcatgtggttatcatttgccataaccttcttagtttttaaaaccatgataaacctcgcagtaaccgcacggttttcacggtaaccacgtggttatcgcgataaccgacttaccacagggtggcggtaccacgcccaaaatgatttggtgaaccatagtcgtataataggtggtagggggtagagttagattcggccactgtaacccggtgttaacaccaaaatttggtaggtctctttggtggatttggttaaggaaagaaatcgattagtagatgaaagtttatctagataaggccaagttcaaggatgaatcatgaataccatgacaagacatttttatattttcttagtatatcttttaaataggcaggattagtcatttttattttcttgttatgaatttttatctcgtattcgatttgaacttgcacaaattcaaaggtataaatatgtacactcgatatctttgtaatcatctccttatatcaatacaataatattttggcgcatcatcacccttgtagtttcgacatgttcttgccctcaagcggggttgtatcggttaagttcaatttttggcgaagtggtaagtcctgtaaacccagcaaagcacaattaagactttctcaagttccgcttgatattctaactagtttttatggttatcgatttattggttatcgatttatcttgatatatggctttgactagttcgatctagtatatccatcatatgtgtatagatctattggttaaatagatttttcttattattttcgatcttatactatctcggtttgatttgatcgattagattgctgctaataagtttatttctactaagtcggtaggtttttatacaacattcgtcggagttgtagccaatgagatatcattattctaaacatcaattgtcagatgtatcggttaatttgtcgatatatattttaatgtacctgcaccaggccttcaaccgatgaatgctaaaaccatcggatctacatttaccacactatatcagtattggtcgattggttcattagttcaattcttccaatttatcttgttagttgtaagatccaattaattaacatgcctgaacctcgtcaaaattaaggatatgcactagagttaaatagatctctcatgccttcgtatgttagaaaaattttatagcaacacctggtaaccctttaaatacagaggggacacaccacacaatgtaactatggtgattgcaatatagcgtagatacacaggaagataatggcaacaagatcattgactcgtagcaattaggttgtatatacgttgattggggaggagcgtccataatcaaagccccgaaaattaggttaggattgaacttcattaacaaagatcgtgtgctcatacgttgtcatctggcatgtatttgagtgatcaatgacataaacaatcgggaaggctagtcgtcgttccactatattaactatcttttataacacacattttataagttttttttttctgaaatggttcccaataaacctttgtgtaccgcaggtccaagaatgatccctacatatgtgttactgtaggaacatgctactggcaaatgtgcacagccgagaaaatcaccaaccgcagccaatccgtatatatttgtgcgccgaatgtatttgcatggtctagcactagtagtagtagggttttttttttcatcagttactgtgctagctactgcggatctaaagcaaagatacgcggagatatggccatgccgggacggacaagatcttgcattcaaggtgggtcggaaccactgcggatggatgaactctacgttaccccgtcgcccgtgcacgcctgttactgtcacgcgcctgcgcctgcgtgcatatgcacgcgcgaccctctagtgacaagtgagtaatgggtcggaagggacggcacgccgtcggccagtcgcgcacagcgccatatctcttgagggtcgtaaaggtgatcagtctccctccacagattttcctccgtgcaaaggcccccttttgttcgaccacttttgtgcgaccccttttgtgcgatcggtttcgctcgtttctacttcgtactcggcttgaacaggagatggaactactcgccgtcagtccgcggagaagctagtactacttctgtttctcttgtcatcgactggcttgcacaattgcaccaccgacccagtgtcgggcagtgaatgagcaattgagcgtgtgtggctacaatttactgccaccggttcgactaaaaattcactccgcacagcatatgtccccgcgtcactccagcctcaggggcgacgcggggcctggccgccgccgtcctccacctcctccccttcgcctcgctgccacccgaccagcccatggcaaacggctgcctacaaggacggtggcgacggggcttcttccaccggtggcatcgtggttagagtacctatgtgtcgaggtgaagatgtttcagatttggatcaagcgaggagaagttgggaggcgctgcgccaaccatgataggaggttgcgaggcaataggagcggctggacgacaggcggcgaaggagaccgtggctagccatagctgccaagatcggatccttccaaatttgcacggtgggtgcctggcggttgcggggatggcgtctagatccggcgtgctcctgaccaaagctgcggtggggtggtcggcgtcaaggcggcgtgacgactggcgatggcatgcggccagggaggatacagtgaccgcctacatttggcgtcccctagtgaggtggctctcgacaaacgggcgatggcggcggtgccgtggtctatgcagaaggggagagaggccatgtgatggcaactttcttcctctgcagcaataggctacagcacagctggcgcggtgctggcgctttggctagagtttcagtggcggcaggagacaataggacaaggtggcggcgatgcggatgggcagcctatggcgacatggtagtctggccaaggcagcgatgacggggtcctgatccaaacgcctgtcctattttgatggcaccttacctccacaagatgactacgttggcatgctagtgtgggggagaggggatgcattcttctctctcaccctctccctcttcaacttaaccatatgcatggattaatttggagtgcattggatgtcgagctcctacttaatggccgtccggcgacgagacaccggtgcggtgattgtgcatcaaaggggtgtggttggtggtggtctctatgtccagcaggagacctcgacacaagagtgcaggaagattatgagtgaaagcctagcatctttgtctctttgggccagcaatggcgacgcatgtctgcgccatttttctccttgggggtgttgttgagtgatttctcttatcccctgatggattcctctaggtgaaaaccatgtcctgcaccctatgatagacggcggtggcacactcgaatgaaggcgtcgtttagatgattctttttcttcaggatgtcatgtttctatttttttagcgagtttctggttaagacacgtggtgtggttatcttttcttttcctgcttatagcattttagagctgtagtcttatttttttttctgttcaatcgatatacacaacgtcgcactcttatgtgctatgaaaaaaaagtcgctccgtttctcgtttccgaacctctcaaagccttgagctcgacgaaaacatcgcacgcttgcgcagcacgaggcggaatggtgcaattgctagcttattcacggtgaaatattgctgccgagccggcccccgaccgaccacgcgacggatggcgacagcgagggggcggcgcaacaccacaaccacaaactggacggcgccgtgcgtgcgtgcgtgtcgcgtcgcgtcggcgggtgaaagttcgatcgaccggacgcgcaccgaactatcgatcgcaacgagagataataggggattcgcttggtattactgctgctactagcccactatgcgttccattatcgatctccttttgcattagaggacgagagcgaacgaagccgaggggtgtttttgcctttccggcgttggtttttccgggggctcgaaacgattgtaaccacaagctcaaggtaaggctgggatcacgctgtgtgactcggaccatgggtgggcactagccgaaatagcctacctgacctgtcgatcgtactcgtgattgcctctggctgcacaccctcgttcgcaaagtcggtccctttcttgggctgttgctactagtacagtagtacggtcacggtagcaacaagtgctctgatgtgaatgtgaatatgtgatgcgaccctttcggaaagccggattagaaaaggaacaaattcgtgccagttacttccggattacgttcggcaaccacgaaggattaatcaaggaggagagacggttaagacggcaatgcttttccgtcacctctattttcccaaagtgcgatccaactccaagtcttgcgcggctgtcacgttcgttctgacggcactatcactcacgaacgaacccaaaaaaaggtgaaaaacgacgagccccgatcggtcgccgtcgcatgaactcagagacgtcgttttccacccgcgtcacaccgcagcgataaataatttggcccgttgcgtctgttgtttgctccgcggttgcatgttaggtgagtgaatccgagacgggaactgctcagctcaaccacgaaacgaaacctgtttcatcattcgataaagcacctcgtcttgccggatcagctggggtggcaggaaaaccgaaacgtgttcgttgatttttcccatcggctttggctttgtccatccgctgctagagaggggaaaccgttgctgcagtgtgctcgacgccactatcatctgaactttgcctgtacaagaaatcaagattgaagaatgcataggggggcatcactgtcaggtataattgctacgcagccatggacgtgtactagtatgtagtgaagctttcgcggcgtgtttacgtgttggggaaaggtgtcgtggctgcgggtgcgaatgttcactgacagcgagacggctgttcccggatcagctgttccagtcgtgcaggtaggcaggcaggcaggcaggtgtggctggtgagagctcgctcgctgcgacctaacgctgatgccaagcgcgagctcaaatagtcgggagattcagatccccgccgacacggtggtggcagcgacggcggccggaaatattcgtagtatatttcttgacactcccaggtcccaactgcgcggtctataaagctcgtggttcaggtatctgaatctttcggactgcttcagtgttctgaagatttgcaggttaaaagcaaaactgcccgggcgatggccgacaagtcaaaaatcgtgaacacgattgcgcggcttcagagtttaagatatttggggctggtttggtttgagaactaaattaggtttatcaatatttggcaatttcaatagtgtttagtgtctatttagtttgaagccaaattttggcatacctaataaaataggccatttcaatagtgaacttaggctattttggtttcaatccaaacacaactttgccttatcaaaattagtcatgccaaaacttgtcaaaatttggtaaggcctatttaggccacaaaccaaaccaaaccttggttccatctgcccgtatctttgtaggggtcatggctggttaaagatcattacttgcaagttaaatcactagcgagaatttggatattcgatacgaggaacgggtgggaaacatctggaataataatggagtttattcagcaaaggcgtatatgatctcaactgcttgcgcattgtgaagtttgtggttcagatatctattaatagagaagggataagggcagtggatgaccgacaagtctgaactttggacacaacttaaagcatgtactactagcttcagcgttcagattctccaagctaaagctatgaccgacaagtctaaatttttggacacaggtgcgttgtgccgattcgcgtgtacttccttcagagttcagactatatggttccacgcgcagtagttcagaatgaattttggagggttttgtcctcctttcttctgttttaggtgtgtttagttcctgaaaaaagatagaaagtttgaagaaagttgggaatttgaaaaaaaaaagttagaagtttatatataggaaagtttttgatgtgatatgatgtaatggaaaattgggaataggggaaactaaacacggccttggtgcatgtttctctaatgcaagttcaatagatataggccaagtttagttccaaaaattttcttcaaacttccaacttttctatcacatcaaaattttcctacacacataaacttttaacttttccgttacatcgttccaatttcaaccaaactttcaattttagcgtgaactaaacacacccatacgcgggcaacatcccttcttacattgcattaagaatcattcagagaaaggcaggcgagcacgcgagatggtttggaatttacagaagaggattcagggagtaggatacacatggccacagatgcaaggatatatgtacatatgatacatctctgtccggctataacggtatgacttttgctcgctacagaagctgctcttgcttacaagagtagttcctgcgcagcattgttgctgctgcctgctgcgtcctttgcagcttcagtgtgatgagccatgagctaacaaacctaactgggtacttcactagctcacagttcctatagctgtaagaatgatcttgaactacatacatgacttaacagatgacaatcataactacagtggcatgtacaacgtatatacacatggaaccagggagttgaggttttcacaaggagcccaccaggagtttacgtgagagcttcattccaatttttccagttaaagaaacctgcaaaacaccatgcaaatcaatgcttaaattattggcttgtgaactatgctcaaacgagtactcagtaagtgggctgggattgcattaacatgttatgtgaactgcatccataaatagcgaaacgtgcaatatgctcaatggtaagactagaagttaatgtaaactcaagagtgacaagtatatgcaagatttaaatatgaacaatagcagattgaaacaggcacctagtattattcctaccaaaataatatcctcatcagttccaaaggacttgcgggcctgatctaagctcttcattgacaccctttcacgctgtctgaaagaatcaacaaacaactgtaactaagttaaatcttgtcaatagggacatgctgtcatgcacataaagttaagcggaaaacttttttcttctagcgaaggaaattaagcagaaaaccgtacagcgataggtttctcagtcaaatatggcgccattacttgataatcatacatagctataaatggaccctgacatgtagcatataaatatgttcaaagcagaaggtgaatgttctcggttactggtcgttacaagaaactaaatgatccttgcttctagtgagtgttatgcccatatcagcatgacgctattaaagaagcacagtttatccatctgaaaactcaagtgtccgctattaaaagatgtcattaacaaaaggtgaatattaggtacctcgaactggcagggtcccttatctcaaattcgcaagcatcagcatcatacccacatattacaacataatgccctgcaatggaagacagtattaaccatcagaatgaatccttttttatgggcacttttgcagacagcaaatggattcatggaaaaccaatccatcaacgagcttggccactcacccatgtaatctgaatcctcactgaactgttgcatatcttgtagatcattgctccatgaggaactgcattccaaaaatcaagttactgacacactattattgcccatttcaaatgatatgcagccacttcaaaaatgaaatcaaggaacaatggttattgtttgtagaaaaattatgcatataaaaatccatggatacatccatgaaccattttgttccgaactgtaatcttctccgagatattctctcaattaccaagtaactttgggaacagaaagggtagtgccaactgtatattactcaactgcttcatcaacattatcagtttgttactacataatgttggcacggttgcaaaatattaaactaataatcaccttatgatcgttaaatcaaaagaatttgagatattaaaatgagacaagtacagcaagtaacattgtccacccattgcatttaccattggacaacttgcttatgaggcgatgtctgaatgccgaagacaaatgtaagactgtcttaaaggagtaaaagtattgacagaaatacagaacaaagtatacttcatctcacttgctatgaccaaaaaaatcccttacttcaattttgttttgtccactagtgcgatagcaatgcagtgcccagataacagtagaaaagctatatcatacgcactgatggatctgcactgagaataaccacaaattgaaaaattaaaaaaaattgaaagtgagaagtacatcaaatagacaatttttatgatgtgcgctgtgatcttacttgaatactaattccagcttcaagggctctgccaaagagctcatccactcgatcaatgtcttcttgcaattgctcctatcgacattgttatttttgaaactgttactacagtgaacttcagaggaatcggtaacattaaattacaattcataccctataaaaggtttcagcagaatattgcggatttgctcctagagtcacagtgaagaaggaaaaacaaactgaaaacctgtttaacagatatgccaagtcaactgtccatatgctgcacaacccagaaatgtcagattgttaatacaccagacgtgctattaaaatttttaataggccaaaattaaagagaattaaatattatgtccagctcatctagggaatgattgtattgcaatataatatatccacgaatatttctcacgtctaagctactttatgtcctcataaataattgtcatattacaattgaaatgcacaattttttattctcttccaaattaattttcacctaagatggaattatttgcaaagagcattttaactacaccggataaaagtgattatgcagtgcaaaatgtgggaacaatcaagtggtcaaagtagtaacaagcattcatgaactgacagagtaatcactgttcgttatccacgcaatctcataaagaaaagaagaataattatccatgaataaacaaatgattcggggtatcaatttttttcattaactaaggagaattgcgccccccgtgtttagttgtaaactcaaatttgaagtaataatctagtccaagagaggaacctcgtggtgcggcagagcttctcgagatcggcaatgccgtcgcagcaatccatcccgagtgtcctgagcaccatgagcacgcaagcgaggccgcagtcccacgtgaaggcctgctggacatgcggaacctagcaagcatccatcaccagcgccacgaacccaaaaaaattcgtcagatttaacagcagcagtaaacacgacgattattacacagccacacgacaccgccgcggaaacacaggatcagcaaccgacaccaccccgagagacaataattgatcgcaaccatagagcgagcgcgcgagcgcgcgcgagagagagagatagggaaggagggaggaactgacatcgacgtagtacgagcggcgggctagagggacacggccgtcaggggccggcggcgagtcgtccgccccctcgccgccgtccccttcccccgcgaccttgaacagcctctcggagaagaaccccaggggccacatggcaccatcaaccgaccccctcgcccgccgcgcgcggcgccaggcgactgacctcgaaccgcaagagccagccgagccaagcagtgctctgctcggtagcgcgggtgggaaggagaaaggagggaaagcggaggaggaggttgggattctcgcgggttcgcgacgagacgacggtgggagggagggagggaaatgattgggttcttcttcttctcgctccggtgcgtggtgggattattaaaaaaacgggggtccgcgtcaccagaagaatcggtggagggatgtggagcgccggagcgcggcgcctttaaaaaaaaaaacgggggccctcgtcgcctcgccttccagaagccgccgtaatttttaggtgtcgttgggctgtatggcctttgccggtgggaggaggagcagcagcgcagccagcgtgtgtttgcgtcggggaaaagagaggatagggattggcagaggatttttgctctatccatcggccaccgggcggggtggggattgatgtcgatctagtataacccgagaggctcgcggaggggccgggattggtcaggggggtcaggacctggtaccgatttggttagggaacaggaggagatttgtcctataattcttgccttttgttgtggtgttctcttttttctttcgatgataaggatgacgcaggacataactaatcgctatctaccgacaccgagagtctgttttcacaagttttaggccacatttgaatcgcaggattaaaaaatagagaaataaaaaaaacatatgatatagaatgtacacttaagatccctttgaaacacaggattgagaaaacagataaatgagaaaaacgtaggaatagaatgccacacgggcccctttgaaacataggattgagaaaacacaggaaaaagaaaaacataggaatagagggcctgttcactttggtgtcattttcaatcatactatttttttgggtaaagttgctaaaaaatgtctacgttattctgttgccaaatttagtcaatacataagaaatcataccaaaattttgataatagtaccatcttaccaaaattttggcattgccaaaacttgataaggtttattttagctatagtatgaacatgcccagaatgtcatacttattagaatcctataggattttgaaatacaggaaagtccccaaactgtcgtttgattagcaaaaaaaacacataaattttgagacacatgaagaggaaaacatgaggtgagagacctcatgcttattttcctccaaaattgctcaagcaaggtccattccataggaatttcaaatgaattggtaggaaacaatcttttgtttcaaagggctctagaggattatttttcataggataaaatcctctagaattcctatgatgtttcctttatttcaaagggggccgaactatgggattttgaaacacaggaaagtttccaaactatcgtttgattagcacacaggaaaaatacatgaatcctgtttggggagcttaatattctgataaacagctggttggtagccagcttctgagaatctggaaaagctgggtttaccagtttctggcttctgagaatctggaaaagctgggtttaccagtaaaatacattccataggaatttcaaatgaactcataagaaacaatcctttgtttcaaaggattataggattatttcccataggataaaatcctctagaattcctatgatttttcctttgattcaaatggggcctagtagctgcatcttcatacataatttccaattcctcgaaacagttcaaatttaggttagcactctaagggccactttgaatcacagggttgaaaaaataaaggaataagaaaacacaggattccgacaggaattgaagtgtaaaatagaggattgcgatacacaggaaaaatacaggaatgatcgtttgattggaccgcaggaaaaaacgtaggaatcggatgagagagatagactcaaaggaaattttttaaaaggttggaggtctttctaagtttcctccaaaatccgcatgcaatgtgtcattccataggaatcataggatttgaaaaacttcaatcctttgaatcaaatggccaaatagaaaattttcctataggattttaatcctatgaaattcctcataaatcctttgattcaaaggggcccaggttgaatatgtagttgtataagcaataaaattttgctatctatttatcaacaaattttctaaaaaaatcgacagatgtaaatatagtataattacttcgtaatttgcatgtaactaaaatataacttaacttgtatgtaaccttaaaaaaatttgtgataacatgtttttttcgtgaagcggaggttacaacaccaaatcctctcacttctgtgtgcgttgtgttgttttcttcctcgcttacatgaatcttaaagcaaatttaatggtttcataattacatgaaagttacgtaccagttacaatgtaattacactactattgtattatatttacatttacaattttttaggagaaaatttgtggataaatttgtagatagtcccgaagcaataagttaggaaagtcatatctcaaaaactaaataccaaccaatagatttttagaatcttaatcccccaaaacctcttcagatgtgcataatctcccccaacctcttcagatgtggatcgtgtgtttgtcgaattggatagggcattaggacgagtatccttttctttaggtattgtacaaggtggcgttactatgcaccggcatttatttaaaccttatctggtttgttggtttttatcaaaatttagtattttttctaaaaagaaaagtattggtatggttgagacatgcttggtctcaagccttactgaatcttggtggtgttagaatggaacacgtattattttggttgctcatgacacgtataaccgtttataagtcagattaaaaaaatagggaaaaaatagccaccatctatgtatatggcgtgtagatttgtgtaataactagaaaaaaatgttcgcgtgttgtaacaggtaaaaatgtttttccagtgatgcaatagctattaggagctgagcagtaaattaaaacattcgaatagctatacgttataatttgaaaagattaatgaaaaatattccttggttttcagttgaaagcctttttttttcttcattttcaacatcagcccagaccgctatctccccgtgctcggcctatctcttcagcccagcccacaagttgagccacatgcccaacttgtatagtagactatcgtcttcaacctccggaagatagtctcgttactgcatgccgaagcgaccctcccaatcaaatttggcagaatctttctcgatctcctaaaattgattgaaggcttttgatccacttgatctcctctttatgtttttcctaaaatccgagcgaatatgcaaaactcggataaaaacagccgaggaagctcaccggctggccatcatcagcgactgagattaaatccagcgaattaaaactgaaatgaaaggtaaatcatgacgaaaatgatgagggaagagtgataattgatttttgctattaattggaggagaaaacacatgggtaaacatatcgatgtggcagcggtactagggtttgggccagtggtagtgggaggcaaaaaaaatgaagattgaacatctagtgctaccttgcgcatttttaattaggtatagatacatctaatgttaccttgacatgtcaaggcgacgggtccaataggataaagtcttgtgttaatttattctcgtgaacaagtagtatcatatatgatgcatcgatggaccatcttatatatataaataccacaacgcgaccttgctcttctatgtgtatcccacttcactgctacgttacatatagtttctaataatagaatcacataagagcgtgtatgataaggtgatataaatgggttataatggttgccaccttaagtgttgagttagaggagagaggggacgagcgaagagaagttgtatccacatctataaccacatgcacatggttgtttttaacaaactttatgagaatgagatgagttaggtattaacatagtaacatgttgggagagccaacgtcaggatcatgtccccattgcctacacaatatgtattccttctattcaactccccctcccggaaagaaaaacccctcctgcacgctaacctcccacataaggcatgcacccttcttgaactgtgatccctcttttgcgccgcaccatctatattgaatcatcctggcacaccatgtcttttactaagctgcaatctgactatctaggttaagtgaaataagaaagaggatatggagtaatatatatctaatgaaggtatcgggttgatatcttcggataccgcaactccttcatgtattatgatttgatgatactttctgacattattttttttaggaacacagtatatgtgctcagaacacacgtatactcatccttacgagcgtagacatgcacaccatatccctttgaatatcttccgaataccggatcgacatatcacgattatcttttaagtatcatgaaggtattataaatgtatcatgtatcatcgtattttaaggtgtcacgtaggtttcagataataataccacttgattttattattattcttactctaacagcgatgcatagacacgcatcctcttttgcattctgccgttgtcgtttggtggtgcatgttggtcaaaacgtccgactcgagacgtacgtagaagctgtgatggataaggccggagttcttatttttgtcgtgatgccacatttcagcgttcggtgtgacccactttaggtgcgtccaccacaccatgtgacaggctaaagtggcccaaacatggcccagtccaaagagctcgatctgggtggaagagttgaaagcgacccggcagatattttgctcttgatattttcacagcagatactttgctttttgggtaggagcagatacatttttcttgtgttcaaagaaaaaaaaaggaaaattagcatgttcttgatgttagcaatggacttgaagtgggcaccaggcagttaggtattctggcccaaacatgttgggccgtactagattctgtacttagtggaataagttcatttagggtcccttaacttgtcaacgaatccgattttcgttcttcaactgaaaaaacacagatataacgaatccctcaactatcaaaaccagtgcaaagtatgtccctcaacggttttgatggtagttttggctgatgtggtgcctacatggccggtttaacttggtcctcgtcctacgtggcggtgatgaggcactgcaagcaaaatataaaaataaaaaataaaaacaaaaatgtgggacccacatgttaatcagacaaaaggaaaaaaacaatgggacccaccatcctctctatccacagacgacgggagtatagatggccaaaaggcccgaccggcatggcctggcccaggcacggcccaccagccatcgggctggcacggcccgatcggcacttcgtgccgggccgtgtcgacccatgggctgcacctcccgcccaggcacggcccactagctgtcgggccgtgctgtgcgggcccgaaggcacgggtgcccccatcgggtcttttttaaaataagtctatttttttgtccctcctctttgggctgttacatatgtatatcaaaataagtctattttccgcctctcctctttgggctgacatatgtatagctaaaataagtctattttccgtccctcctctttgggctgacatatgtatagataaaataagtatattttacatccctattctttcgtccatggcatataatatgtgtatttttactcccctatttttttttgtgtgtatcaggcctgactgccggcccatcgtgccatgccggtccggtcgtgctggcccagcccaacgtgccggtggagggcccaggcataacctggtggttgggccgggccggcacgggcccgacctccgtcgggccgtaccatgcttgggccgggccaaaatatcgtgccatggtccggaccgtcgggccttgggccttttggccatctatacgggagaggagcgatcgacgcgttcttctctctctccctcccggcgatccttcctcgccggcgagcgcacacggagagagaaaaaggttgcggccggcgaggagggcagagacggtcgctgtccaccgcccgctgcgcgcctcttcctccgcccccaacttgcgattctcgaagcagcagaacatgatctgcaaggaacaaaacaagaaagaaaaaggaaataaatcaaaggatgcacacgcacgccaattagttagcaagaatgatcaaccaagcaaccaaaactaatcaaacaattagttggagtagatggcggagccgagccggcaaatgaaaggcaggattaattgaaaaaggaattttgtttgggttagctagtactacacacctggtgaggaactcggtgatggggtgggaggagatgatgttcgagcggtcgccgttggcggtgcgctcgatctccgggcggaggtcctcgtaggtgacgatggggacgcgcgccttgaacacctcccggtcggtgcgtccttccatgccgtggcggcggaggtactcggtgccgttgttccgcgccaggatcgccgccagcacccgctcctggaccgcgtagaaccccctcgtcatctcctcgatgaactccagcttctccgcgtcacgctcccacgccgccacaacatcccccccccctcctgccaccttcgaccccgcctccgccgcagccaccgcagccggagccatgaagcactcagacggcgcacggatccaatccgaacaccaacggagggcggcgaccaacggatccgccgcctttttccctctccgtgcgctctcgccggcgaggaaggatggccgggagggagagagaaggacgcgccggtcgctcctctcccgtcgtccgtggatagggaggatggtgggtcccactattttttccttttgtctaactgacatgtgggccccacattttgtttttattttttatttttatatttttcttccagtgccacatcaccaccacgtaggacgaggaccaagtcaaaccggtcacgtaggcgccacatcagccaaaaccaccatcaaaaccgttaagggacctgcttttgctgatgcgaaaaacacgaggcgtgagagatctgcttaactccagtgctggtccaaaaatcttgcctttaggttcgtgagcgtgccagttgatttgatcctgccatcaacaagaaataaaaacagaaaagtagtagttaaatccacaaacgatagtcgatcggttagctgccgatgacgtttcatttatctttgagccgatgtcatatatgaatcgatcggcaatcataaataagcataaaagaattaaatctattcgatcggctgtagatatcaatggtatataatacttctgtcgatatatacttaaatcaagtgattgggatagatcggtcgccatgccgagacagtataaatcacttagatcaaaatatatattaacaaaaagattataaacatttatagcatagccgatcagataaatctagcatgtatcggctaatactccgatactactctatattaagatattaaagcaagtaaaatatatatcaaacagaagcctaatatactttgttgtagtaagatcttaacataaagggcagatctagcatatcaattaagcacgtaagatttaaagctaaatcaggtaagatcggctgaaaccccaacactaccctaatcggcaaccaaaagcaggctagagattgagattctaagcacgacttaatagatcaaactcaactgatgcagcattaagtatgaaaaaaagaacaatatcttgacaatcaagctgttggatgtttcatagagtggtggataccctatataatctaagtcaacgttggtatttaacctgatcggctgccttctagcgataaatgttagccgactaagggttaaataacaatattgccagagattatataggatatatgataactcgacaaattacataaacaagattagagtatcataaaaatgaaagcactaatcccgagaacgcaagccgccataacaagttttacctctagttgaagatcgaaatcgatgcagctcaacccgaaagaaagaactcgtcgaaacaaaacgaaagtaaagggtggcgatgcgccaagattgtattgaacgtgtgttaaattgattatatggggctcggggtctatttatactcgagattacaaaatatgtcaatgtcgaacacgactcttatctctaacaaactctaagataccataagtctttgcggctgacttttactcaaacctatctctaaggaaattacataaaatatcctaattaatagatacaattgtcttttcaggactcaatctgtgcatggcaatctatatgaagcactttaacctaacccgatgtcgtgtaacgagtcatattgtcggaatcggcttaatcggctaaccttgtccgactcgcactctgccgatcctgatcgcggccgattcggactttagccgattcttgctctgtttccgaaacgatctccatcttggattccgcttcagttttaccttaacctccgatagttgaattaccaaatttggttattaagagctttgcaccggttttagtagttgagggacccgttatatctggttttccagttgaaggacgaaaatcggattcgttgataagttaagggacctcaattgaacttattccgtacttagcagccagatcgatgggagagcagtgtgcagtgcatgggcctggcctttcagagatgttgaaagccctcgacacatgctttacactccatggatcaggtgatcaggtcctgtagttgtctgaaacgctgcaggctgcggctgacacaccctacccgtgcaggcacgtggctgagaaaaaaaaaaggttatcgcaaagcttttgacaatgccgacttgtccagtgcttgttgcgtggtgcgtagcgactggagtagcgatggcactcggtgctacgagtaaacgaaaagatggcactcgtccatctgttacagcactacagtaacgtacgtggtttgagtgtaagcaacctcagcctattgaataagcacactgagaaggtgcgcttatctcgttctgctctaaagcaagcaagcaatgtccatcgagccaacatcacatgaccagaaaggaaaccgagagaaatccgggagacccgccagggcaagagaacgttctcccgcacgcgaacccgaaacagctaaaccttttcccacgcctcacgcggaaacctcgtggatatcgacgtcgtcgtcgtggcgactctaccgcgaccggctgcgactcccgcggtgcaaatcctaagtccaaaccaacgcgcccatccacagaccaaaccccacccaccgatccgccgcgccgcaccgtgccgcggcgtcacgcacagcgtgcgaagattcgcctcgcgctgctgtgcacgctgctcccccacggcgcgcaggcgcagcggcttgggcgcgacacgcctccctgatgagtcgtgagtcgtgacgccaccccgcgtctcgtgccccgcgccccgccctttccctttttataccacgctgatcgtctactccaatgtctccatctcgccacattcgccgcgcgcgtcacacgagcaagggagcaagcgaggagagaggagaggcttagcgagagaggtgaggagaggagaggatttggaacttttgatctttgggatcgcgagacgacggagatggccggtggcggcagggccgatgacgagcgaaggatcggggtggcgatggactactcggcgagcagcaagagggcgctggactgggccatcgccaacctgctccgccggggcgaccacctcgtcgtcctccacgtcctgcatcacggcggggaggaggccaagcacgccctgtggggcaagtccggatcccgtaagatccgcgaaccaaatctcctccccctttctgcttcttgcttttgctcgatcgatctcggctcaaactaatgtagtggattccattcctccagcgctgatccctctctccgagttccgggatccgacggcgatgcagcagtacggcgtgcactgcgacgccgaggtgctcgacatgctcgacacggcggcgcgccagttggaggtacgtgcgctctcgtgtagtactagtagcgtcacggttttggggctggatcggagacgaaaatgaccgctgttttgttgctgttctgatcagcttaccgtagtggcgaagctgtactggggcgacgccagggagaagctctgcgacgccgtcgaggagcagaagatcgacacgctcgtcatgggcagccgcggcctcggctcgatccagaggtataactcctacttctgtttgcaatgttgttgcctcatcaatcaagaatcaaaattgcaggcattgaccatagaacttgcctttgggccagttgctaatattcctgttcagatagacaagctctgtcgagaacgatgcactgcttaaatcgataattaaactacatactgtgtccagttccgtggtacggtagtttttaatctcaacacataattgcattgcactggaaatttgggggccaaatgcgtatctgacttggccttgcaacttgaatcattacagccaatgagattggattatcgagcatttcagttgcacttgttttttctgtgggaccgccaaggcatcaacttgttgccttcacgattaataaattgtaagagcaagtacaatagctggctataaaccagctgtaaatatattttaagaagataaatgaggagagagaagggtagtgggctacagatttgtagccaactatagcacgaactccaagacgcagtgtgtgtatgacaggcgggaccaaatattaatagtgtagtatgtaattattgtataaatgagctattagattggctatagatgaattggagctagtagttggctatactattaaacttgctctaaagtcgcatgttcatccttgagacatgtatatcctgattcttggtcggcgcgttgttttatgttctcatgtgaaactccttttcatattcaaatgtttcccatgtacagtttgagcataagaatgatgtatatatatagagttagttcaacaactagaatgcttgtgctatttcaatatccaaatacagaagtttatatacaggaacgtgattatcttggttttagcctcttaggttagtgtccacgtccaaagactataactatttagtctataacatattgagtggatgatatgcattgttagcttgaaacttactattgtcatcttgattcagaacagaaaattgtgaagtttgaagatgcgatgtctaatgaacgtttgggagtatacgctttgcgcatatggcagtatttgtttagggctggtttggttcgatgcctaaattagtcttaccaatatttggcaatttcaatagtgtttagtgtctatttggtttgaagccaaattttgttatgcctaagaaaataggtcatttcaataatgaacttattagactattttggcttcaatctaaacacaactttgtcttaccaaaattagtcataccaaaaattaccaaattttggtactgatagaatttggtaaggcctatttagaccacaaaccaaaccaactctttagtgattctctagcttctgaattgaatccagcacaccatataatagtctcatcgactttttagctcgttatgatttcatctgcaactttcctgtctgccaacattttacaggattcttctggggagtgtgacaaactacgtgctgtcaaacgcatcatgccctgtaacagtcgtcaaggggaagtgatcgatgattcgacttgagtggatatactgttactgttgctactgtatctgaataaagcgtgtatggaacttcttttgtgtttgtaatgttgcagccttcccaggttcttctagacagttcactttgcaaacagtccatgcttgtgtgctcaaccatgtgaatcactttatatatatagaccgaatttgaggttttactttcatatgcctagttttgttggacctaactctgtgaagtccaaattctgtacaagtaaaagaaaaataaacatacaagggatgtttaaattgtagccaagataaactttaccaaattttggcaatgcctaatttttggcaatttagcaatattgctaaaattttgataggatttcttatgtgtttgttaaagtttgactaaaaaattaaatggatgcacatatttgataactctaaaaaaaaaggaatatttaaaatgacatcaatctgagcaaagcccacataccacaacggctgcaagtttgcaacaaagaaccaactacttaccagaacaaaaacagaaaagatcaacaagtgcacagagagagtgctgaaacaaaattgagaggttttttttatgggaaaatttactgaacttgccgtagtattggagtattggtccgttccatttagcggcacaccgtacaaaaccatccagctatttagcaaaaaaaaaaaggaaggataattcattgcttatggcaaatcaatccgttgggcctggaaaagaagaattggggaaatgaataagtccactatacatccctcatcttttagccgagtttaactcatatccctgaacgtaataacggaaatctctaacccctcaacttacaaacctgggttaaattagatctcatgatagtatcaatagttagttttgtcagcgtgccaccctagtcagcaaaactaaaataaaaagaaagcgtgtgggtcccaccttttttactccttgctagctaggatgtcacgtcagtaaaatcaaccatttatactgttatgacctaatttaaactagtcgtgcatgtgtgtgtgtgttggggggaggtgttcaaaatttctgataatgatagaaagacatgagacaacaaaaccgttcacttaaggttcttaggtggttttcaccccggttttgtctgacgtggtggctaagtcagcgtgggacccatgtgtcagggtgtccacgtcacccctctatctctctttcccctcttctctccttcctctctcattttttcccctgggtggcggcgtcttcgatgcggcggggaggagggccggcgtggccggcggtgggggaggagcgcagcgaagaggagggccgatgtgacgggcagcgccgccgatggctgtcgtcgcgcggtggccgcggcggtcgtccctttcaaccgtcggccttaacgtagcccagcaatccaagccaaatcaaaaatcggtgctcgtcgtgatactcgacctcgcgctcccgttcgtgctcctctccgcgtacctccgcgccagggacgcgtcgttcgtggaggccgtcgtcgcgcaggtgtgggttttcgacttccggtcgtcgctcgtcgacctcctcgccgtctccgtcgcgcgcttctgatactctgcgtaggaggaagagagaggaaagtgggcggatgatgacgtggccaccctagcatgtggggcccacgtgggtcccacgctaattcagccgcctcagaggataaaatcggagtcgaaaccactgagaaacattatttgcactggttttataagttaggggatgcgttgtatccggttttgcggttcaagatcgattttgtaactcgatgataagttgagggtccttcggtgtactttttccaaaaaaaaatatcactagacataccagcccaaaaggcctactagatataacgcctcctacggtcctaccaattaacccaacccatcccgagcatggctccacctcactggcccatcgaccaactttggcccatcgagcatggttccccaatttttttttcgaaaacttcacatcgaatctttggacatatgcattgagcattaaatatatagattataaaaactaattatatagttaggtgggaaatcacgagacaaaccttttgagtctaattagtccatgattagccatatgtgctacagtaattcacatatgctaatgacggattaattatgctcaagagattcatctcgtgctttccaggcgagttatgaaattagttttttttcgtgtccgaaaaccccttccgatattcggttaaacatctgatgtgacacccaaaaaatttcttttcgtgaactaaacaggccctttcacgagcatcggcactacctcctccaccgctcccagctagtcgtagctaggaaaaagtacacggaaatctttcaccgaattacaaaactgttatttgaaccataaaattggatataatgcatccgtcaacttataaaatcagtgaaaaaaaatccctcaggagaataatccccggttttcattggtctatgtggctcttttaactaggtgttcgtcccatgttgacattaatgtggcactaacgtgataattcgataaaaaaaataaaaaacaaaacgcctagtactccctccgtcccagaatatagcaacctaggatgggataaggtcaggacaacgaatctggacatagtctcaccccatcctaagttgctactaaatccgtcctaaaatagaacaacttttagctatatagttgttcaaattcatagctaaaaatgcttatattttggaatggagggagtattagaaatgagggagcctatatgggacctacatgtcatcctcattctcatcttttctcctatctacttttcccgtcggagccagtcacgcccgaccgggtgtcgggcggggccccgttaccaacccgccaccttccacctcccctcccttcagccgtacactcccgcctcccaaatttcctcgaaaatttttcccgcgcggccgcaccaaaaattccccttccactccgccccgcaccgccccctagcacggcggcgccccccgtccaccgccagccgcgcgtgcccgccgcccgcttctcgtgcttctccccgccgtggcagatccggccctgcgctttagcgccattccgtcgaacacctcgagcgcgtcggaggctggaggaggatgtacgggcggcgcgcgtcgcagctgctgaaggaggtcgactcctgcgaggccggacagctcgtgccgttcaacgtaagtttctacccccccccccccctaagcgctcgcgtttcttagctctggggatctgagtggccggtgattaggtttcgtttgtggctatttttagggcggaattatggttggtctagctgcatagttgaaattgagttcataaatgtgcattttcaatcctacggggggaatgttatctgcatggtgtataactatcaggcgacagtttaaatttaaacgatttggcttttcggtctggtttgcaaaattgtatgtaatttgtgagctttcatttgtctatcttgatgatgaaatctagttctgaaatatactgagcttgcaaattgcaatcacatgaaagcacataaagtctggggctggtggtctggtgggggttaatgtaagttaagattaccgttcctgtgatgtgactgtggcagcatagtttaattagttcggttagttattatgcttggtccctaacttctttttcttatggatgtgcagagcgatgtgtttgatcaggttattagagagtgcaatgaacacaatacacagtttcagtcattgataaggtaaattgcttcctatcagaaaattgatcatcttcatctagttctgcaataagagttatgatcaattaatcaatttctaggatgtatttcacaggaaaaacagcacagaactatatcaaactaataaaactcttacttgacttcttcaccattacagtttacttaattttgattgcctgatttgcattgtgtttatgacaggaaaatggtggagcagaacttagacattgaaacaaccagaaatgacgaccactatggggcagccgtccatcatctttcgctgcttcgtaacaaaagatgtctcatggcttacatgtacaagactgaaatctcacagctgaacaaactttttactttctatgttttatgctgattttacatgcacgcactaattttgagtatggaactgaaagcactgagttcaatcaggtataaccgagcagaggttattcagagctttagatggaaaatcggcccagtgcttcctcatgaaatacaagaaaagctccatttttctgagaaagagtacttcaagaaccactcagcagccattaaatcatatatgtcagagatggatatagatttaacagtggtacagcatttttctgttttatttactttcttttggatgaaatacagttagcagattttctgtaccacttctataggacatggtgcctcccaaggatccctacatccaggttcgggtgcttgaggacattggtgaagtatctcttggtgaccattccatatcattgacaaagaactcacttcatttcctaaggcgcactgatactgaacaatttatatcacaggtttgctatcttacttttgtgatattctcagtgtgtttattccatctgctaataatgttctatcaaacttacaatagggtcttatggaagagtttctggagtagagatcacatatggtgtacaataggtattactcactaccttacaatatatgtacacgtttcatgatgacagttgacagatgaccagagctagcatgtcctatatcagaaaaggctttgatggtcaattggttactgatgaatatttttcattttacacatataaatagttaaatatcacatttttttaagaaagaaaattcaactatcaccacaacatgcatatattgaatttaccagttctaatagacacctattctgaaacactgtttgtgtttttgatctgatttctcaaaccatacatctctggcctgcagattgtaactgaggatatgactctactacagcatttattcgtcattgctatccaatggattaaacactactgaaattctgacagagcctatgtgaaaatcaaagaacatatgctgtctcagctgtgaaggtatgatgcaacatatatgaggggattgtgtaccggggtgctcctaacttatccatttcagtgatgtctagctttagatgaatgaatttaagtttgttctacactgtgaccattctttgcatgttgtattatttggtgataaaatcgaaacttcgtacactgtacaaaaatcttcctaaatttactggagtaggaaggtaacaagctctgttttagtgtttactggtgatgaagacctggagaagcctcatgcgttctgataaatgcagtttgattgactgctgtgttcgttttgctaaaactacagttctggatctcggatatggaattagtcagaaaacataaccaagctgattccaagcaagaatggtgaacacggttcctgctttcatgcaaaggcgtagtacaccatacatcacctagttaagtttggtatcttcttttactcactacaagtttcttgagatgctcttcttcttgctaacttaacttgcacactggcattactttcatcagactaactgagctctaaaagttgcagtcttttacgtctataatatctgcatgacaccttgaaggttcacttgtttataatgcagcgctagccgctagctgtctagctcctgttgaacatattacatattcatgttagttgtgtcattctatgattcgaaatcattatattcatgagggcatggttaatgctaactacctcacaggaccataaatcattccaaatctaaccggtacccaattcttcttaaaaatgaaaatgcccaaacgtgtttcactgctatctctttatctaatcttcgcatggatgatgctttgtacaattactttgtcgagtggttttatggcgactaataaattaatgctggtgacttgagaagctaatccctagttgtgtggtccatgaacattatcactacttcatttcaaccttgaaaatccaccaaccaagtaccctgtacccaacgccaaaatcctacatatacgctcaaacaagcaatcaactttactccgtgttcttttctctctgttgttttggtattcttgggcacaactaacttgtggtcttgtgggccatgatacttatgtatctgttgtcccagttgtagacgaacctaaggttggtcaccggctaccaaatgacatgacatgatgtctacatagttttgacactactgcggtagtgctaaactagccaaacaatgacaaagcctaggtgctaaacctatatataatctgcatccgagacttccaagtgaagaatgtcttttcctacccttgttaggtccacggactcctgaatcattagaaaaccagtacgttaaaaaatatcacgctcagaaaaaaaaaagagcttggttatcttacttctagaactaatcagtaatcatcagctcttatttccaaagatcacattaatcatattgcagcttggcaactactactacttgagttcaaaactttatattttggggacaagccattgcttcgacggatagcaaccgatcctgtgaaaaattccccataaaacccaaatcaagaaattttcaactgctatgattttattttttaaatcactattgatgatgaatagtgattgtgggatcatgtcgaattcaactgctatagtaccctgtttgacaacagatcgagaccttgtgagacaaccaattatggtgagtagctacgcgtattaatcctgttctggcccttcggtgtacgaatttgctaaaagatgtccacggtttttctaatcgatctcagttgatttgtcatcctattgcttattgatgtcttccaccaaatggatcttttggcaagtctatctccttgtgttgtatccatctactctgctctatcgacaaatattactaagcttctactcgtgtgtcagtttgcactttacccttttatcttcttttgaaaaatcaaagatatgtaaaaattatagtgcaagtatatgtaatttacaatgttaaaatatttaactggtttttatgaaaaatatggcgtaaaaaatatagttagtttctttaaaactactggcacatacatacaatggcacgtacttatgaaatatttactcccaactaacatcacatgagatccaatgtaagaaatcatagtgaacttcactatactgttctgtagaatattctcgcagaatttcttcacgtataccatttcactacaataaataactccggacttccatttaattttaaccccagaagatctactgacatctcaaatcctcgtattgcacatttgcacgtacgtaccgtcctcgagcaagcaagcagggactaccgcatttgcaccgtggtactcacccagtcacccacttcacccaggcggcagtgccccatgtgcaacgccacggccatgtgaaccgaagtaccaggtgaccgggagatatttaactatttgccggtagattcaaatattatagacacataagaactcatatgtcatatattatgagtggcaagttcttaattgccatatcttaaaagtgacaaaaaaaagttaaatgcctaggtgacaagagccatcttttcactaattagttaccagtctcttcgtttaacttacaatttattatagaccttaatatttatgaacaataaaaaggtaatttataagtaaaacttttgacttttgcatataacttaaaaatcaatgttgaaaaataaaccacaattaagagtttattcactgtattactaaaatcaacttaccaatatttaccaatattaatttttggtacatattttgatgttactgtattttagtggtgttaaatatgtttagtttttaaacctttttaaaattttggtgatgtttttataagagaattttcggaacttccaaacaacatatttagtttgtcatcctataaaaattaataacaacaaaatttactagagttcaaaatggcagtaaagcaaacaaccagaaaaacatcaaaagagacagtaaagtaatattagaaattcaaattttagttatcagattttggaaggagacagtaaagtaaaagataaaaaaaaaatcaaaatcaactctaaagttaatatttaaattttaactacggctggtaattcctcgaaggcgccgttaatgaccgatgcgccagcgccgcggaaacggacggcatttcgccggaccacggcgtgtcagagagcttcatgtcactgccacggagtacttactgttgtttgaagtacattctgttcaaaaatacagggtacaaaggagcagtggtgagcaccgttattactaggagtagtgagcactcatgcgacagcacttgttattgtgcactacagtagtactcttcttgctcgaaaaaaaaaaaaatctctttcgagttgacaggacaggaagtcctattcacttaactatacatttggatctagctgccgagttagtaggcaggcttggaccatctcccgtttactgaaccaaagctactccttgattgtcttgtttaattaagcaaagaggttttgaccctgatgagtgatgaccatccatcccatccgtgagatgtacggagttttcgaagtgacccatagcccattcaagaccggtaaaggtgagttatacgagtgtacgacatgtgaccgtgtggctggacagcgccgtgctgtcacgctacacactgtccttgcttgaacaagaaaaacacttttaaacactcatccagccattgctctcgctggtgtttatgaggcgcctaaaattttgtcattcacggcctcaggggaccggctacgtacgcaattctggaccagcaatagtgtgctaggacaggagcactataactcttgttttggtctcatccaatcatccgtggatggaaaattccagcatcctagatggcctgtgcaggtaatctggcagtacgccaattgggcgatgcggatcttgtgtcgcacagggctactttacagaagtttcacagtcgctgcaaattttgagaagcttcggcgcatcagcaaaaggacacccaccaccaaccggtagtactactagtaggagtagctaggtaaagctggaggaggttgcatccatgatccatagatcatcaaacgaggccacgaggggggatggggtggcccccgttccccatcattccggccagttgctggctggctcgctcgaatgctcgatgcctcgatccatcgattgcttcccaaccaaacaccttccgatcgaccttgcccaaaccccggggggtgatcgttccttcttaatgagcactaatcacgatcagtcactgcaacattagcgaactcatcttttcgtttatgtgtatgcttattaattaaaatttgaattttcaaccttaacgattttagggtttcttttattgtggtttatttatcagtatttgcttttagttcgttaaaaacatatatataaaagttttattcacaaattatttttcgtttgtaaatatgccgctaaacgatgggagcagtagatttgaaagtattcaacttaaaaagcttatgaccgttttttaatagtccttttactaatgtttatgtggctcctttatatgaagatatcttatatttaggtttatgttacatttgaaagtttttaaataaaaaaactcacggcgccgtcttttacagtctacttttttagaagttttacgtgccttctctgtatatatggagatctcttgttattaacactagcagtacggcaatacgtagtatttatcaaaatgctacaggactacttgggaaagagtagaatgccggaaagaactggaccagcacggccgcagtagcaagttttgatgattttataacggggtaggtgcgacgagtgccatatggtccatatcaccagatggctcccctttcaatacgcgctcgatcggctcgcatgcgctcgttgcatgcatacgagcaactcggcgacgtgggcgcgttttttcgtgggtggggggacgacgacgacgtgtggagtagggtggacgaggcggcagctagcgtccgacgcgggatgcatttttcatggcgccgcaaaaggtggtggatagtgtagtgtcgtcgccttcggaagttcggatcctcgccgagcgcggcttccgagtcaaaactcgcctttttcgcttccaccctcgccgtttctctgacagtggatgcgtcctgatccgcagatggtatcccccttcaaagttcaaccgtgcgcccccacaccattctgctttcttcctctcccggatttcaaaactcagctttcgaagtcactaccagcagcgtaaatggagcgttttgcctagagagaacattaggcatggatgcatggtcaatataagctataacgagaaaaagagagaagacgttgctaacgaaaccacgttataagggcatccacaatgtgagacactcctaaagtgtcctcactaactgaggacactcgtagaaaactcagctcgcaatgggaggtatccttggatgggctcctcaaaatttgaagcaatccgatgagggtactacagcccataatgggtgtcttggcccaaagtaaccccagatgaaaaaatccccaaatacccctcccccagtccattcttcctttttccttctcttttcttccgccccctcttctcgcgtcttctcgcttcttcttctcgccctcctggtcgcccattcgccgcccccgcctcccagcctgccgccgccacctccctcctctctcccctgccgctcgccgccgtcacttccctcctcgccctccccagccaccgctgccgcctccctcctcgccctctctagcagccgccttcctcctccctccgccagccgcgtcccgccgtcgtcgccgaagtggttccagcgccggcggtggccggaggaggcggatccggcgccgaggcgggcagatctggtgggcgggcgcggcggcgtcgaggtggcgggcgcagttgtcgccgggtcatcgtcgtcctctccgtcgcggaagccgagcccgtcgccagctggtggccgccggctgccgcggcggtggccggatctggtcgtcgccgttgtggatccttatcgccgtcgcctctctcttctctctctctctctctctctctctctcgttgtcatgccgccggtgaggggcaagaaggggaaacgccaggagagaaggtagaggacgaggcaccgagtcgctgcaacgcgtagcctcgagggagtgtctctggaaaaagcaagctggggagctagaggggcgcgttccccgcgtggggatcgcgcctccctccagagacatgccgcgcggacgaacggcggacggcgtgagcggggggacgacccagggacaccgattgtggatggcctaacattctccacacaatataagtcttagccacgtgctattttttttacccctcggttggttacatttttatgtataaatccttagattgtttctattcatatataagtccaacattttatagttagaatcttatataagaacataggaaaaaaaattgaattaccccctaaactattgtggtagtacaaattaccacccattcaatttaaaaaacagacattcttcaccctctacattttaattggatgaattacccccttgacagacactatagcggttttgttcctatgtggcacacatgtgatagtctaatcaacataaaaaaaaggggtaatgcccacatgtggtgatctagggaagaggcaaaaccggtaagtgggcctcaccatttttatatattttttaatgctaactggattaccacgtgtgtgccacgtaggaacaaaaccgctccgaagtcgggcatggaggtaattcgttcggtatgaaaagttaaggatgaagaatatctgggtttgaattgaggggagtaattagtactgccactatagttcagaaggcgcaattcaaattttttttccaaaaacctacccttacccttttatcatctccgcccttctaccttttctgagtgcctcgcaacctctaccctctctccttctcggcattgtcgtctatccactaccccttctccttggcgccattgctaagatcccctccctcctccttggctcgaactccccaccccctctcccgtgccagcggtctcgccggattagattggtccttcctaatacggttccagttgtgcttcgctggctgacgaacttctaggcggcgtgaatcgaggcgaagacaaccatatggggttggtgcgtcctcgtgctcttcgacggggccttggtggcggatctatcgtggatgtggtcgaggcaatagagtagtcaacaccactgcaaatcaatgatgatgagtctgggtaggcccttcctctccccagccaccccctcgccatctttgttgttgttgtcaggtccgacctcgagcttgccaaagctacatggcgacaacgaccttgaccttgttcgcgggggcaacaatgcgggagttagttggcagctacccgacacgaggcattggcatagggtgagacctctccccaacgtgtttctccacccatttcttgcacagaaaccacgcataccttaatttgttggggttcacacactccttcgggggtacgggtccctcctagctggcatgaatattttccttgggcggggggtggcggggagtgagaccaagctccagcttgaagcgttagccatggcctcagtactacctttaccccgaaataacatttattttttctctatctgacacataccaacaataaaaaaaagactagaatagccaccacttatattcaatgttaatgcagttgtctcttgttttatcttgttctaattaatatatttgtcctctgctttcataattttttatatagtggtagcttaaagatgaaattattttaagataaataagatgaggataaaaatgatcttattttaggattgagggattacgctgcagcaagagcagcatggtgagcacgatcctctgccgtggttcgagacgttcggcgccggacattagaacacgtacgtctagatcgtccaatccgcatccaacggaccgtatcatcacttggcacgtcaatttaagtgccactccgacaaactgtgcaaaaaataacgtagctgcagtgcttccgtactgttacatgtagtcggttactgtagctgcacgcttgtctgcggtatatgagtatgtagtgcagtgcaagagatctctgtatccgccaagaggatactagtacgtaccactacagcagcatatatcactgtaatgaataaactactgtcatacagattacagactactacctcctctgttctgaaataaaattatctttatccctgctatttgttctattataagcttatttgtagttactattgtatcaaaatttgtgaaagcaaaagatgaatgcatttgagtaggggtggaaacgggcgggtatttcctgcccgcccgcccggccacattatttcaggacaaattcggttacccggggcttttcatggatccgaatacgggtcttttttgcggatatgagatcgggttcgggaacgtagtatccgacgtatacggattatccggtaaaaaaatcggatattacccatattatgtttttgtgaggaaatttttggtactatgtattggttctattacgatgtattgtttcctatttatttcctaaggtactaatggactaatataaccgtattatagataaatagaattgttaaatggttattgcccatgtgatatataagattgtttcttcgacttgatatccaaataaaaatttgtaaccaatagtgtacatatctattttggtacgtattcgctatgtatttttgcccgacattatccgagtttatatccgtattcgacactatccatgtccgacccgattctgattataaaatgtgggttaggatatgagaagggtgagatccgatcgaacccgacccgttttcacccttacatttgagtagataaaataaataaataaatacatttagatttgataaagtaaaggtattttatatttttaatattgtattggtatatagggatggtgaaaaaataaaccaaatttattttatgacggaaacaatactactacccccactagagaaattgaccgtttggtcacgttcaacgccactaaattaagccaacgaggaatcaacggcccctctagcgtacagatgctgcaaccgttttgtttgtttctcccccatcgacctatccctacacggttgcacatgccgatacaacggccgcagcaaaatgaccacgagaagtgactcgcctgaccgaccgaaccatccgaaaggtccgagccgtagctgccacgccgccgacctactctgtcacacacacgcttcccgaactccactgaccgttgccgctaaaaaggaaaagggaacaaacactacagtagcagtaagagcaggtacaatagtaggctataagccagctagcaacatattttaataagataatagagaagagaggagagcagcgggctacagatctgtagccagctgcagtacggactctaagatatagtgtgtatgacaggtggaaccagatattaatagtatagtaagcaactattgtatgaattggctattagattgactatagatgaattggagctagtaatggtcaatactattgaacttgctctaaggagtagaagcccaccaaaaaaactcaaaatccaacggtcactcgcctcgcctttcacctcttttaagcctttactcctcgcgctcgccgcgccatgcatataccaccaccacctcccccgtcctcctctcctccaccgcaaccgcaaccacggccagccacgggccaagcgagtcacgactggcacaacgaggcaaaaacaccattgctacccccgaggcgtccctctcagctagccctggcacccgcaccacctagcggcggcgccgtcgtgttcgtgtcggccaagtcgtcaagaagctagctagtcattgccagtgggcgcattgtgctaggggatggcgagaggaggaggaggaggagaggaggcggcggaggaggagagggaggtgagcgaggcgctgacggcggactcgtcggccgacgaggagtgccgccgcgggagcagcagctccagcgcaagctccggggacgcctccagcgagtcctactgcccgcccgacgagtggcagaaggtggccatcaagacctgcgtgtcgtccgacctcgtcgtcgtctcggccgagccggccaaggagaagaagccgccgccgccgccgtcgtcgccgcgcgtcgacgccgccccggcggacaagcaccaccggccctcaggtacgtgcgccgccgccgcaaatccccagttcactcctcccttccaacacacgcggttaaattaattgaattggctgcagagatggagatgatgaaggagaggttcgcgaagctgctgctcggcgaggacatgtccggcggcggcaagggcgtctgcaccgcgctcgccatctccaacgccatcaccaacctctgcggtaagtgggaggtttcgaattgcacattgcgattaatgcggcggtttcatggacacggacatggaggctgagctgagttgcgttgctgcagcgacgatatttgggcagctgtggaggctggagccgctgctgccggagaaaaagacgatgtggcggcgcgagatggactggctgctctgcgtcagcgaccacatcgtcgagctagtccccacatggcagacattccccgacgggagtaagcttgaggtatactagtacttcacttcccctgacgaaatttactctgcacttctgcagtagttaagctaggagtgatacaggaattactaggatcatcagtgcgggccgttcgtgagcactgagtagcagatgcaagatttaatttggcgtcctacggatgaaccatgaagcgagtgcaaaattcgatttgaattttacatgaacatatggaccacaaaaagaaattatatatagtcattaaatacgtggttagccgtttggtacttagtaatcccgtttatattgaaacagttgggcgcgcgacgccgtatttctgaggcccaaaagagttaaggccacatcaatgtgctgtccgtttagttgtgtccgatttgtttgtcctcaaattatccggtccaaacgtgatccattactactctagatcaaatggagatccatcatttcccacttgctgcatctgtttacaccaatctttcttctgtagtgtccaactttattcgacaatgcaatgttcaggtctttttttggcaaggaaatgttcagtttcttttttttatgaactcttacacagacacattatataacttgtggtgagaacaatgataaactgactgttactctacatgtggattactacttcagatcatgacaagcaggccacggtctgatctctacatcaatctgcccgcactccgaaagctagaccacatgctcctcgtaagtctgacgaactctatctcggatcaacgatctgtccatccatccgaaaataaaagatgaactagtgctgtaataatgtgcatctcctgacgaaacgagcacatcttctgccaggaaattctggagagcttcagggacccggaattctggtacgtcgaccaggggatttgcccgccggaccgcgacggcagcgcccccttcatgctaacgttccaccgccgcgacgagaagtggtggctgcccgtgccccgcgtccctcccggcggcgtcggcgagaccacgaggaggcagctcgagcacaagcgcgactgcgccagccagatcctcaaggccgccatggccatcaacagcaacgccctcgccgaaatggacgtccccgactcttacctcgactcgttacccaaggtccaaatcaattctactacctgtagagaataggagacggattctaatcaaccgcaactaaatggttatgaattttttttaaaaaaataacaagatagattaatatgtaatatattactccacaaacatacaatttcgaatttaacttttacaagttataaaaaataacaaatttaattgcaaatatacgtatactaatttaagttttatttgttgtttttgttacaatttttagaagttgaaatttaacttacatgtttgtggagtgatatattacatattgttctatctttttaattatttttaaaaaagttttataattatttagatgacatgcattcacttgggtgattaaaagagttttccgtagagaatactgtaaaaattatcagaaaaaagaaaactacactaatgctcatcatacatgaacgtttgctgtttcttgattctgacattgatgtttgattgtcagaacgggcgtgcgacgctgggcgacatcatatacaggtacatcacgtcggaccagttctcgccggactgcctgctcgactgcctcgacctgtcgtcggagtaccaggcgctggagatcgccaaccgcgtcgaggcctccatctacgtgtggcgccggaggggcacgtcgggcgccgcgagccgcgccggaaacaagtcgtcatggggcatcgtcaaggacatgatcatggacacggagaagagagacgacctcctcgccgaccgcgccgagggcctcctcatgtgcctcaagcagaggttccccggactgacgcagaccagcctggacacgagcaagattcagtacaacaaggttggtgaatccatcatttgcagtttgcaaatctcgctatccgtgttgatggtgatcgggtttggatgaactgatcgtgagatgactctctcttcaggatgtggggaaatcgattctggagagctactcgagggttctggagagcctggcgtcgaacatcatcgcgcggatcgacgacctgctgtacgtcgacgagcggagcaggcaggcggagctgcttccaaccgcgggcgccgggagcggcaagatctcttgcatgccggccatgtcggcgtcgtcggtgccggcgtacccggtggtgtccacctcgggcaccccgccgccgtacgcgacggcgtacgccacgccgagcttctcgccggcgcagctgtcgagcccatccaacatcgggagggcactgctggtcgaccggcggtcgcacgacggccgagcgttcgacggcagcatggagttcatggggatggcggtcagcaacgccgtgttcgacctaccgggcctgtgaatcgatcgatcacgggccccgtgtctagtgctttacttaccctcgcctgtgtgcagtagttgtaatgttgtatggcgtgatttcttctcgggagggcggcctgtttttgccgtttcgccgtttcgccgccctccagttttatgatgtgttttgacagtgcctttgttaacttgctagtgttgtaagagtgcttaagttcgatgttggtcggatggcaaaagagaaccatcgcgtttgtgcaaaccacagagttttcttggctgtttttgagcaggttccgataaccagaacgtaacaacttttataattttaccgttaaccggcaaccgtacagacaaaattgaaatttaaattgagttcaaattcctagtctttctaaaaggatggtttcctcggaacgtacgtccaaactccaaaaggcctcggctgacggcctgcgctgcatcccacactccagggcttggaataagttcactttgggtccctctatttgtcgcccagtccgattttcatcccttgaccgtaaaaccaggtacgacccgtcccccaacttacgaaaaccgggcaaacgaggtccctcgacagttttaatagcggttatggctgacgtggcgcctacgtggctaatttgacccggtcttcatctgacatggcactgacgtgacgcttacgtgacaattcgattcagaaaaataataaaacccgtgggacccacatgtcatcttcacacacaaaataataaaaaatggtgggacccacgtgggccccacatgtcatactcaccccctcatcttcttcctccctctccatctgtctcccctcctctctccggcctccaggcgccatggcccacgaggtcacggggaggttatcggcgttgttgttgggatggaagggcgcgagggtggggagctcgggtcggcgtacaaggccgccatgcgcaacagcgtcaccatcaccgtgaagcggatgcgcgacatgaaccgcgtcaagttcgaggagcacatccagatgctcggcgacctccgccaccccaacgtcctctcccccgtcggctaccattaccgcagggaagaaaagctcatcgtctccgagttcatgccacgtggcagcctcctctacgtcctccacggtaataataatcacagcaaatactagtagttcttaatcaactactaatctcgattatagtttgctaattacgatgtgtttgtttgttggttcaggtgaccagcgcccggacagggtggtgctggattggccggcgaggatgaggatcgccgtcggcgtggtgcgaggcatggcatacctccacgagaagctggggatcccggcgatgaggctggtgagcatggacggcgccgacttcgacgccatccactcctgccgccgtggacgtctcacaccactcgccgtctgaggtctgcaccgcctccacatcgagctgccaaccgacgagctcggcatcgaggacggcgtgctcctcaagtggaaggctgacttcggcgtacaaggccgccatgcgcaacttccatcccaacagcaacgccaatcggggggagtaggtggagctcgtcggggcgggcggctgtcgcgtcgccggccgccaccgccggacctccccgtgtccccgtgggccatggcacctggaggctggagagaggaggggagagagatggagagaggggatatggagagggaggaggaagaagatgaggggtgagtatgacatgtggggcccatgtgggtcccaccatttttttactccctctgttctaagaaaaaatacaaaccctggtttccgtgtccaacgtttgatcgtccgtcttatttgaaaaaattatgaaaaaaattaaaaagacaagtcacgtataaaatattaatcatgttttatcatctaacaacaataaaaatacaaattataaaaaaatttcatataagacggacagttaaagttggacacggaaacccagagtttgcattttttttggacggagggagtattattttgtgtgtgaaagtgacatgtgggtcccacggactttattatttttccggatcgaattgccacgtaagcggcacgtcagtgccatgtcagatgaagaccgggtcaaattagacacgtaggtgccatgtcagccaaaaccaccgagggaccttttttgtccggttttcgtatgttgggggacgggttgtacccggttttgtggtcaagggacgaaaatcggactgggcgataaatagagggaccctaagtgaacttagttccccagtgctttcatgatgcccagtgggcttgggataaccaaattggccgacgggccagtgcttttgtgatgcccgcgaaagaaaaggtccacttttactcccttaaatttaggtccaatctaaggaaaaagtacaccgaagatccctcaatttgtcgttgagatacaaaatcgtcccccaaccacacaaaatcagataccgggcatccctcaactaacaaaaccgttactttagatctttcgatggttttgaccccgttttatccgacgtgacggctgagtcagcatgggacctgcgtgggccccacatgtcagcggggccacgttggcctcctctgtcttttcccctcttctctccctccctcatctctctctcacttctctgctctgcgttctgcaatgcgggagaggaggcggcggcgacgatggcgtcgcacgaggcggatgggtgcgcggaggagggaggggacgagacccacgaggcggcgacgggggagggctacgcgcgggcggcggggcagccgctgctggtgccgctcaagtgcgggtgcccctcccgctcgcccaatgcatactcgcctatgcagtaccagatcaacgccggcgacaccttttggatcgtctccaccaccaagctgcagaacttgaagcagtaccaggccgtcgagcgggtgaaccccacgctggtacccaccaacctcggcattggccagatcgacatgttccccgccgcttgttcccctccgttccccgctgcgtgttcccctccgtttgtcgccgcagcctggtcgcctccctccgaacgctgccgctgcctggtcgcgggagggcgtcggcagcaacaccagacctacccaataaattatttttgattttcaccatcaattcactagcaatggccaagctagcccgagcaaaacaaaaaaaaaaaagtcatgtacagacatacagaccagatccttccttggaactggatgacgtcgtgacgatgaggagagagatcacgacggcggcgacgcgggtgccacgaactagagtgcctgcgtgagcgcctccatggcgccttcgccttgctcggcagtggcggccgcgagcgcgcggtaggtggcgggggcgcggtgaggcgcacgtggcggagcgcgcgtgtgcgggcacggtaggcatcgggggcacggcgaggcgcacgcggcggagagcgcgtgtgcggcacgcgcgcgcgggaggcgaggctaggatggcacggttccaccgcgatcgccctcacgcccagctcctcccccgccgccgccgcccagttctttcccgtcgggcgccggccgcgcccagcctctccgtcccgcgcacgtccgtcgcccgtggaaagaggattggaaagggcagtagagaggggaaggaataagatgctgacatgtgggatccacatgggccccacgctaactcagctgtcacgtaggataaaaccgggtctaaatcaccgaaggacctattgagaccggttttaattaattaagggacgccagatatttggttttgtggttgggggacgattttgtaactcgatgataagttgagggaccttcggtgtacgttttcaccaatctaattcatataactcaacccaaatacaggatatttagaccctcgaactactaaaacagtgtaatttgatttccaaagagtatttgctgacgtggctcgttgacctgttcgaaacggctaatgtgtggggcccacatggttagtgtcgccttctctttctctctccttttctcttcctttctctcatctcctttccccacagttgcacgtggcgaatgcctcgagcgacacgatgcccccaagggaagggtggggggctcaagtgtcagtgcttcggtggccaaaaagacggcgatggcggtgttaggatgtgtaccacgatatgactcgtccaattaaaggtcccagcgcttgacatattggatgatgacgacggtggagagaggaagatggccaagcgagattcaatgccgaacatgcccaagttagtgcgtcaaaacgcgttctcagaggaggggaactcgtttctcttgaacttgttgatggaggtagactaggagtggctgacagcatcaagcatggcagcgagcagaagaatggccacgacggccaatcatggcggcacagagaaagtgcaagatagggaaaaaccttataaatcttgatgccctcgctgttgcctgccaaccccaccccaccccacccctcccctcccgcgcgcgcctcgatggggaaagccttctggagctcgagctgtaggtctatcaagttattgtcgtggtcgttagctaatggtttgatgcatggtttcggtcacattgttgtgtgcagttacggcccactagcgaggaagggacccctattttcttacacaatgaggcatgcacacacgtggatttagaggaaaaatcatgattagttttatttttacttccgttaatcattaactaacctttccttttctcaaggagtttttttcccttttttactagaaatttaaaaatctatacgtgaggtttgaacctttcaactaaaattttgaaaactttcaacttaaatttggaaacattcaacctaaatttttgaaaactttcaactcaaatttgaaatcttacaactcaaattttgaaagctttaactcgaattttggaagcttcaaacacgaaatttaaactttcaagtcaaatttttgaaaacatttgactcagatttgaagattttcaagtaaagatttgaaaatattcaaatcaaatttcaaaacattcagccgaaatttcaatatttgcgaattgcaacccaatttcaaaacttcaactcaaaagtttgaacttccaaatcaaattttagaaaaacaaaaaaaaagcgtcgatgctttgcgtggcgaattttttggcgcgacgtgaaataggtcacgtggcaacattttttgtcgcgaagcgtagggaaaggggaaaacgccgctaccctagctcggtcaacgtgcgaatgacttgattggttggcgcacacgcatgccatataggagcccccagccgttgaaccactcctcacgacaatgatggccttggcgaatgatcgccccaatgcatccatgccatgggcaagatcgatgacccactcaagctcggtgaggagttcctggaagtaggctcacatggtagcagcaaagatttgtccgtcacaggagaccttggggggtgcagtaggctgcgtcaccgttgctccgcctcgaggctgctatgtcagctgcggaagcggctccgtcgaccgctgttcgagcctgtcaccgtgtggcattgtggtgaaatgagaggggagcaaggaagagaaaagatgggagaagaaaaatgtggtgttggcatatggttctcataatgattcagctggtcgaaccaagtgaacaagccatgtaacaaatacaactatgaataatgccttggaagtcaaattagatcgcttttaataattggagggggtaagatacctagtattgtgattgagggatacaaattatattaaacctatatttaaggaaatgaagtggactactatgaataatgccttggaagtcaaattagatcgcttttaataattggaggaggggggaagatacctggtattgtgattgagggatacaaattatattaaacctatatttaaggaaataaagtggacttattctgctcgtaaattactgtggttgagagatacaaattagattaaacctatatttgagggaaacgaagtggacgacttattccacccgtaaattacagcggcacgaaggtcacttgttctcctacaactccactaagtgtgaaacgcatgtacagtcaacagctttaggagtcattgggggcaacaagggtaaatggtgcgcacaattaggcctggtttagttccctaaaaacatcacatcgaatctttggacacatacatggagcattaaatatagatttaaaaaaacaatatagataaaaaaaactaattgtacagttggagggaaatcgcgagacgaatcttttgagcctaattagtctatgattagccgtaagtactacagtaactcatatgtgctaatgacaacttaattaggctcaaaagatttgtcttgcggtttccagacgagttacgcaattagttttttcatccgtgtccgaaaacttcttccgatatccagtcaaacatccgatgtgacaccctaaaattttcttttcgcgaattaaacagacccttagtaatgttgcaagtagcaaccttttcttttattgaaggctacctgttgctgccctaccatctcatcacatttcatcaggtgaaaacagcaaaacaaagggctacctgttgctgccctaccatttcattatacttcatcaggtaaaaacagcaaaacaaagggcaagaggaaaaaaaaaggaaaacaacacacacatgcacagtaacacacacaaccacatctgctcaggtgaaatgacgcatccaaatactgcctccaccggtagaacagatgtatagttccactatgacttgcaaaccggcttggaccactccttttatttctggtacaaaacaatcgaataagatgcacagaaattgctatcgcaatgatgaaagcattgtatggatttttatatagaacagtctgattacaaaaccttaaaaacttaataggataatctgaaaagcttaagttcctactgcaagtcactgggaattggctgcatacatcctcatcctgtttggatgtagaggctctgttttaatccattttctaaaagaaaaagtcactaagctcctatcaaatgttttcgtcatatgccaacaaaaggagaaatgacaccaaatatgcatggattgcttaacaataataagtttataagggaaaacctgacaaactatggttgtgagtcattgtggcctacaaattaaaatgccttggggagtaactaaactgtaaaatgttaaacaggtttcttgggttaagaaacgcgtaaaatgaacatcttcatcagatgttcatatcattctaaacatgaggcgaaattgctctaagcatcacccatgtcagatgtatgtactttttagaaactactaacaagataaacttttacttcaagacatttgaccaattttgcagtagagccatcattgtcaacctccactactatccaatgattgtgcgcagatatgacaagtaaaattattggcaccagaactatgaggacggcactaatgtaaacaaggatattttcctaagt

SEQ ID NO: 7614 - DNA, 31956 bp, Oryza sativa
gatgatatcatctttggttgttcaactcacgctttggttgtagagtttgctgagactatgcgcagggaatttgagatgagcatgatgggtgagttatcgtacacgaaagatcttttgagatggttcaggatggagaattgcaaggcaatttcaacaccaattggttctatagttgtgttggatcctgatgaagatggtgaagctgttgatcagaaggagtatagaagtatgattggaccattattgtatctaactgcttctaggccagccatataatttgctgtgtgtttgtgtgcgtgctttcaagcttctcctcatgcttcacatcgtcaagcggtcaagcgaataataaggtatttaaatcatatacttgagtttggaatttggtattctacttcattttctatatgcttgagtggatattctgatgctgattttgttggttgtaaaattgataggaaaagtactagtggaacatgtcattttcttggtacatcattgattgcatggtcttctacgaaacaatttagtgttgctcaatcaactgctgaatcagaataagttgctgctgctagttgttgttcttagattctttggcttatatcaactttgaaagattatggtcttacttttgagaaagtttctctcttttgtgataatactaggaaagaaatttgaaaatatactttattttttcatattttgcgtttatatacctgactgtaattaatttgcaaaaatatacccaatccgcggaacggttgtgcgggagcgaggataaaccaaccggtcccgctagccggggacgcggtaccgcgccggtcgcgcgggctgggtgagtgcggcaatgctcccgcatgccggatgtgcgggaccggcgctcccacatgccgcccctcatctcggttcccaaattggatccgatgtcctatgcacgaaaaacggagcaggccattagcacataattaattaagtattaggtaattttttttaagaaaatagattaatatgatttttttaaacaactttcgtatagaaactttttacaaaaaatacaccgtttaggagtttgaaaagcgtgcgcgcggatgagttggtaatattaggggaagaacacatctccaacaacacgcggcctgctcggttccgcgcgttggaacctcgggacagcctcggtcccgcgccgctgttatgcggcaccgactcgctatcccgtgggctccatcgctcccgctcaatggcatcgccgtaccgactcggtcccgcagtccagtcgtgcgggaccggctcggtcgcgcatcccggttccgcgtgactggctcgggtttcgctcccgcatccccagtctgcgatttgtcctcgctcctacgcacccgtttcgcggattgggtatagttttgcaaattaatcacagccaggtatataaacgcaaaatatgaaaaaataaactatattttcaaatttcttccataatactagtgctatcaatattgctaagaatcatgtacaatactcacgcataaagcacattgatattcactttcactctttgagggatcatgttgagaaaggatatgttcaattgacgtttttggatacaagttgcaacttgcagatattttcactaaacctttggattctaatcgctttgcttttcttcgtggagaattgggaataattcatccttttggcatgatttgagggggagtttttgtacctcatggttttattaagcaaaatttcataataagaaaaattgagaaaagagtgttttgttttatacatatagtatatttttgtgcatgctagcaatactatgaaggtttatttgtctctagcatagcttgtatgtattttagtctttttatgaggcttagatattggttttaagggagatgatgcatgacacttaaactctatacttgaattaagaaaatatgcaatattaatgttagtatatggtttgatttataaatgcttatatgtatatgctttattgattttttattcctcaaatagcttcgtaatttctcattgtacaagagaataaaatatctatgagagaaaaaaatgaataccgaatccttggaaacagtcttgatgacaaggacgtattcgatgtgggcaaaaattatggctgccgaatcctcggaaacagtctcgacgacaaggatgtacccggaataattgagagaaaaaaatatgagcaaaaaggttcaaataaaagataaaaattctcttggttgttttgtgctaaagctaatttgagaaagaatgctaaatgcaataggtatatatatatagtgtttatttttcaacctatgtgcttgtaaagatgttgcattataaatcgtatgaaatcttaaattttgattgttgaattgatcttatttgtaatatatttgattcatgattgtactttaatgcatgcttgctatattacagatgggttcatcttctttttattacaacacatgacttgatgtgctatatgtatgctaagctcttaaatattaatgaatataatttctatgcttgatgaattcattgttaaaagggggagaagagaagtttttcagaagagcatgtttttctgtttttcggacaagggagaatttctttctcttcaaaagtgagagaagttttcttttagattttgagcacgacgtgtacttttgtacgaagtgtgctttttactatttttgtttttattttttcaaacaacaaaacatttttgatgagtttgccaatgtgttcatgaagggggagattgtaaaatcaaagtattttttattcttattttgtgatgaataattggcatatgagattattggttttggagatgattgattttcaggtgatgaacagtgttgctgtttttgtcaggaccggtcaaaccgggctgtgcttgccggtcagaccggatttatgtgcatggcgcggtctgaccggccgactctgtgtcagttttggtttcaggttgtttgtttggatatccgtgattgttccatgtttatggcttctagatagatactatgcatatgtaatactgttgtttgcaaataatgagtcaagttggagatagcttggtcttggaatatggtttcttggtttgattcatgtgtaggtgacttgatgcctcgggagagtattgccggtgatggatcaggagtcgacttggggataaggcgatgtccgtgatggtcagatatcatgcgggatacttaggctacagttcaatgcacgtggttggtgaagattccatatggcatacgatggaggtattgtctgcgtatgggatgcggagtcgaatttggaaggagtccaaatttggtatgattgttgtttgtaaagtttgtttcttgtacgagaagatttcctaggtggattaggacttctagtatgagtttggttcgtgactttaggctgcctacctcatgtataaatagagagggagtgtgaggcttcccggtatcgcttttgagagcatcgaattgtgaagaagttaggatttcgagtttagtcgagattttcatgaggagtgctgttgttgcactttataaacacagagagaagtaataaagttgtgatctattttgagagtgcggcggtcagaccagcggatcaacggtgatcagaccggcagcggcgacaggaggtggcgacaggttttggtggttagaccgagtgatctataccggtcagaccgacggcttccaggcagtcagaccggcgcatctactttggtcagaccgcgatccgtcgaatttgagggtaacttttaattccgaaaaaattgggtttttgggtatagcaaccattcacccggccctctggttggcttatttcttgtgtttcgattctacacttacatggatttgtaactaaccctggcagggtgctatctttgggctattaagttgcaggtctctcaaccaattaatactagttaatcaaagtataacaatactttgctgaaagtagtagtttagccattctacggagctgcctggtacaaattgcatgatctatacatgaccccaggaaaacaaacatccccacaaacttgttaaagcaccaactgaagaaagttagattgaaagtctagttatcctttatcatcgacatcctaatgatgttgatgtagtgtcgcacagccagaagtaagccaaccaagggagtacccaaaaacaaaacttttagcgcaattaaaagttaccccataaatcgatagggatcggtctgaccggagtagccgatctaaccgctcgaagagcttcggtctgtccggtgtagtcactcgggtctgaccgcacgatgcaccgatgtaaacgtcgttgctgccggtctgaccatcggtgtcctaccggtggactgccgaacccgagcaaacacaaattaaagttctctcatagtagattgaaaatttattatttttgttcatgtttataaagtgcaacaacatcactcttcacaaaaaatctcgattaaactcaaaacctaacttcactctaaactcaactatctctaaaatcgatatcgggaggctacaccctccctttatatttataaccgaggtaggcagccaaaagctatgaaccaaacttgcacaaaagtcctaatcccctaggaaaccttcccgtacaagaagcaatatttactaactccaatgataccaaattcggactccttcgaaattcgactccgcatccaatacgcacacaatatctccatcgtatgccatatggaatcttcacgaaccatgtgcattgatttttagcctaagcatcccgcatgttatcctgatcgtccggacgtcatcttctcccaagttgactctccatccatcaccgacaacgctctcccgaagcatcaagactcacctacatatgaaccaacaaagaaaccatatccgagcacaagttatctccaacttgactcaacattaatacacaatactattacatacgcatagtatccatttggaaatcataaacatgatttaatcacggatatccaaagaaacaatccaaaatcgaaaccgagacaaaatcggatggttagaccgtcgggttggccagtctgaccgcacaacatatgccggtcttaccggcaacacctgcccatttgactagactacactgtcaacaatctctttttcgtcatctgaaagtcacacatctctaaaactgtgaagtgtttcacgttggttgtgtaagggtaaaggtcctaatatataagtgggagagcccctcacctcatttgttagcttttggggtgggaaaagccctttacgattctacaattggtatcagagtctggcttgttcaaccttcgacccgagggcaaagtgtgtgatgcccttatggaccgaccgtgtgtgcttgcggagcctgtatgcttgaggaaccatggggatacgatgaaggggcggggaatagctaaggaacaccaatgtgaagggggagattgtttaatagtcctacattggttaaggaagggtaaatgacctaatatataagtgggggagcccctcacctcgttggctaggttttggggtgggaaatgtcctttactatccttaaaaaaccacttcgtcaataatttctgaatatcaaaaccaataatttcatatgccaattattcatcacaaaataacaatcaaacattttgatgttacagctgacaatgtgggaagctcttggccatggttagaacgcaatgttgcctttcagcagccatctgacaaccattcactagttgacatacagtgtcttaagaatttgccgtcacttcttaacaccagggttacatttggtcttggcacagtactacctatgctttcctaatgcctcgtacgcccagagagaggatacattcagcctcctcccttcgtctgtaaaaaaactgtattttcagctagtcaaaggcagattaaggaggtaaaacactactatgctcttcattaatgtccaaggagaggatgtattgccgttttgatatagcccctcgtcacattccctagtttgttttcttggacggagtgggatgtagacagaggtaatgagcagtactgttggaggagatgaatgatataaagactgagaggtggaaactcctaacattcatgaatgatcaacgattcgttatttaatgtagcaacaggtgtgaatggtaactctgatcctgggaatggggatgatgatgttgatgacttgggtgatgataagaaggatgataagcaaaaggataagaagggggatgatagcgcaggtgataaaaaaaaaacccaagaaaatgcctcctggtcagagctatactggtagtgaaaagatgaaaggggcgcaatctgcacccccacctaccagaccagggaaaggttgtgttggtagtagcactatctctgctatggattgcaaaggggttgctagagtttgtgttgaatatgtgtacgtagtcggttacagtttaggacttggagttgtaataggtattaggactagagtatgagtcagactctatcctaggatctctcataaatagagaggcgtgcctgttgtaaccgcatggtgacttagcatagcgtccggccgtaagtagttgtaacactgatacgatgtatatgctggatcggggaggagcgcccataatcagtgcttccgagatgtaggctacggcggaactccgttatcaaatatcatgcctcggtgtcgtcatcgtgtttggatcgcctatggcatttctttcgcgtttggtttccgatgtgatttcggggccggttttgtaacaggggttgtaaccaaagaccaagggacaaaaaagctgagggagatctaaataaagctatagttgggtggaaaggagagagtgagttctctcaacctgagctgtttgagtctgaatctcaggagtctgattataaagagggtgaactgatgactctcatggatcttgacctcaaacatggggagatggaggtgggagcccaggcaggaaaagaacagaagtgcggtattcccactgactctgacatcgagaatatgagatcagaggaagataaacacgttagtgtgctagaaaggacaatcatcttttgtgctagaaaagaaacgttatgaacaacaaacttgcatattgatttgatagtaaggatgtgtcactagaacggataccctcatctcaattgggcggtaagccccatctcaatcaggcatggcgtccgtcacaggctagaagtcactgatgtgaagacctatctcaatcgggcaaacggtcgtcacggatgatcctatctcaatcgggccctaagtaaagcccgtcaccgatagctttgacccagacgaccagtcaaactatagcccgtcacagatgacctatctcaatcgggccacaactagcgcctgtcacagataacccttatctttgacgggcattaactatagcccgtcacagataagtcatctgtgacgggcattaattatagcccgtcacagatgagtcatctgtgatgagtattaacttatgcataagttaatgcccgtcacatatgagtgtaatccaaaaataaataaattttattttttggctagccctcactcgtgtgcacccacgcccgaaattgctccagaccaagcacacttaatgtcaaagttctttggagattggcttctagaaaagtagtagtaacatgttggtatgagtattctattaatcctattatgccctaggccaggatgtcaaattagggttattaaatgatttcaaatggaaaagtcaccagaaccaaagttgtagaactcatcgaggtgcaaaatttttattttggtcatttctccatctgactctatttaaacaattcgaaatttgaaattcgaagtttgaaaagttcaaatagaattttagaacagtgaacgacatcaactgaaaaaatcatcaacaacaaagttgtataactcatcaaaatctataacttttattttggtcatttttctatataacattttttgaaccgtttgagtttgaatttgaaaatatgacaaattcaaacaacattttcaaatactaaatgatataaactaaaaaagtcatcaacaacaaagttgaataactcatcaatatctaaaacttttattttggacatttcttcatacgacaaagtgatagtaacattgttcacaaaattgacatatctcttatctggttttataaactataacacctatatgtaaaatttgtgaataatattactaacatttcgtcggatgaagaaataacaaaaataaaagttttagatcttaatgagttattcaactttgctgttgatgactttttcaattgaaatcatttagtatttgaaaatattgtttgaagttgtcatatttttactttcaaattcaaattgttcaaaaaaaatgttatattgaaaaatgaccaaactaaaagttgtaaatattgataagttatacaactttgttgttgacattttttctatttgaaatcatttactatccgtaaaattattttgactcataaaatgaattattatactgcactaaattattttgctatagtcaacttacaaatataaacatttcatatgaaaaatggaaaagtagtcatcggtgacgggctttagttaatgtccgatagagattaagtatatagcccgtcaccgatgagtcatctgtgacgggcctaattgttatctcaaacgggcctcaagttggtgcacatcacagatgatggtcattgtgacgggccacaacttgaagcccatttgagataacattcattatctcaaacgggtctaaagttgcggcccgtcacagatgatggtctaaagttgagatatggaatgttatctcaatcgggcctaaagttgtggcccgtcactgataggtgtcatccgtgacgggcttaagttttatgctcatctaacatgtctgtgcgaccatatctcaatcgggcacttttcagcccgattaagatgacttccttgtgacggcccgctatttctaaacatattagagcccgtcacagatagaaggatctgtactagtgtgtttagtttacgtcaaaatttgaagtttgattaaaattggaatgatgtgacggaaaagttggaagtttgtgtgtaggaaagttttgatgtgatggaaaagttgaaagtttgaagaaaaagttggaaactaaagcaagcctaagtagttcaatagaacatacaaaatataagtaaaaggaatgttgtgtctctgttatatactttgtccaaagctttgtcacgatttctagagctttgtgcatccgggggtgagtaatatggccctgaacctatccctccaacaaatgataatcactaatattccataatagaataattaaaacttatcacctaaagctacatttttccaaatatattgtcaccttatgcttcactagaagataaaatcaaaatttacacctacttgctcacaactaaattaactgtaattgaaacacacttccctccccaagttccccctccagattaattgcctcatccattgagcacacttccctaccgaagcactccagattaattgcatgtttgtaatttaaacttcattccattaattttttaaacgaagaaatctacttcacaacccatgcaatcctttacgtttaaccttggtttgtgatctgtaaagaaaatataacatctaatatcaaatgacagtgaagtatcatctaatattatttaacagtgatgaatttttaatcctaaagttaaagattatgattttttaatgttgatgaaatataattaattcatgatttctaaatacaaaagtttgtaagtttgtctctttgggaatatgtatatgtaaaacatcatattcatatgagtggtgtaagcaatcacattcttgaagtcatgtcgtacggtgtatcccatataacgagctagttgctatattagggagcatgattgcttacaccacttatactagtaatatgtccgtgctaaacgctacggtgtaattatatttgcttttaataatttttaaaatttcatgttagcaaaaatttatttttatatggtctgtgctgtgcatgtgagcaaaatcaattaatgccgaacatcaaatatattaacatatttacatccaactcaccgccagtaatccaactcatatttacaatacttccagatgcaccatttaggtacaaatatagatcaaaataaaggaactatacagcacaccggcaaccatgtaacagattcttaataaaatatgcatagataagcccacctcacaattgcttattaacatgtgctctatattaaacaccatcgtaatatctaacaccatatagtttatttacatattggagtgcagaaaacactaaatatgcatccatggtgctgaaaaatattgattatacaaacaaattggaaatatgagctctgagtcttgtatgttcagaagctaggaaggaatcaatttggaagtacttgaatgttaaatgacactgaaaaatgtaccatcaacagaagaaatggcaagtacatgacatgctctttataagtggtcatgacatcaaaatagcaaaattcttaatgacagtacctatctcactaatttatctctcgatacaactggagagaaggtgacacagcttcagctccccaatcaccctatcccttgtatatgagaaacaactaaacgaatcagtatagaaaatcacaagcatctttcataacagtaaatccacatgcagagatgcgtaaattacagtgaaattcccagattaattcccatatcccgttaagctgcattgccagtggcaatgtaatataggatgtgtggcaatgtaatacagcccacctcataggatccgtggccatgtaatataggccatgacgtggattactaacagatcaaagaccttgacggctgggatattacttgtgacacaaaagagagatcatgctattttgtctaaatagcaaatatagggtaaataaatgaataaatttcagaagtgaaataaccctaccaaaggtagctaaacaacagaagaaatttctattaaacagagtctagttagcaataccaacagcaagtaacatgaacattgacggaggaaaatcatgatgtttattgctcagaaagtgatcacctgtacataaatagaattgaaaaccaccacgaacctcatgagatggtacctgccaagtcataaaaggagtggagcaagcagtgaagcatgggaataggacaaaacgtgggctgagaaaatattatctaattgtttgctcatgaaatctcagccccttctgattatgtcaagacatatcttctcattgattatgtcaaaaataataaaggtaaagagaatgttagtaaggtaatatatccactaattaatcaataggaaagttttttttttaaaaaataatcaatagatcagttggcatttttaattacagaagcactacaaaattttgctcagttttcatcttggggagacacctattataagtccctcatattgtcgaactcagccattgcccatgaatcctacactaagtttccccatcaaacaatatatgattaattacatacagaaaatgtaaatttagttgctactgactatatgcagattgatttcatttcgttcttgagtaagttctttcatgaaaaggacctgcaattagcatgaggagatgtattccgtttattagttgactatgaatacttgtacctagctacagccagccaagtcaggcactgaactgcaactgtcccctccagttgccaattctggtttagtcaacatgccatgcaagttaagcgaacagttaccaaaatgaccaaatacatactccctccgttttttaatagatgacaccgttgactttttctcacatgttttaccattcgtcttattcaaatattttatgcaaatgtataagatataaatcacacttaaagtactatgagtgataaaacaactcataacaaaataaattataattacgtaatttttctgaataagacaaatggtcaaacatgtgagaaaaagttaacggcgtcatctattaaaaacggaggtagtatttagtttctttcacatagaaacataattgttatgtaaatcaaaatgtatcttaagagcatatgagatggtatacaacagaaaaatctcttttcattaccaaagggacataaaaatcatttagttcagccagcctgatgcaaaaactcactgtttttcctttttttccacttactgtcatgttaagtcctaagggctgagtgcacgctaccaaatcctatacaggttaaagaatcaaatatccccaacctagctcgacaactcgagcattgaagtttcctggaatgatggaggtataccaaaatgaactatcatttagatagagaaaccaacaggcacatgaatcatgtatgcagattacctcgtaatgtggaagcctgtgtactcctcactcctaccggccatgagcaacggatcaggccaagacccccctcgacactgtcacattagctggtttaataaaaagcatgagattttcttcagtagttgtttgtctacaagcagacgaagacgatatggaaaatgtaaagttttgatggtaaaaaagccataatttaagaatgttcaatgaatccaaattccaaccaaccaaatctaaaactgcatggataagccttcaacttctggaattttagcatctaaaactactaaaatgtattgaaagatttttctaaccctcaagaacagtagagatacgcggacggcggtggaggcagcgacagcgacgttcggacggaggatcggcagcggcggcggcggcgcgtggacgatggaccagcagcgtgggcagcgtggggtcggtgcagacggaggttgtggcatcgtcgcggatggaggtggtggtggcgacgtcttcctagccgcggagggggcagcgtcgaggatggagggggccaagtgaggagagcgcgaggaacgggccggtctgcagcgggacgacggcgcccctcccctcccctcccatgctctgcttgcgagttgcccgactcgcaatatggggatcggagcggaggcggcgatgggggcgatggcgccggtctacagcggcctggaaggggtggcagccttgtgggatttgagcggagatcgcgggcgcgatgattagggctgcgacgcggttaagggagggagcgaggaaggtgagagggcgcgcgggttgcgggatgagggggagatcgatgtgcgtggggctgggggatgcagaggtggggagttggagatgatctgatgcgttggattttacacggatgatctaaacccttgagtgatgaatgaaataatgaaagaatgagtgaaagtatttgttgaactatagggtagattactccccccttgtttctacattgcaaaaattactggcacactgtttatatggctagttgctatctatttcgccatacagacattgaagtccctgagtcgtatgctctgttttaaaggaaaaaaattccctcagtgcttttagaattgagaccctcggccctataatgcacacgagggcagcctaacaccattcatcccatgttctgaatccagagactcttagatactccttactcctccatgctggatggcactggaaacactatagagcaggtagcatttttatctatcacaaaccttttcctcgtcttttccaagacaaaatcattcctcatcaacatcacttggcgctcctctttgtcttttattcatggttgcaagagaggtgagtgaatctcatctaactttataagatggcagtggtcttaaggtttggagtggaaagcattaggaaaaggtaggaaatagggtctgcaatccttccatatcgaagtgatgagcaggtggtaatgtagccctgagttgcagttgcatagaagggcctttgcggcaagccttgtacgggccagtgagtagagattgtgatcagcagcaccacagaatatgaaggttgcatgacatgatgcatctcctccattagctagcaataatattacttccaataatgttataaagtgtggaataaaataagatatacactcatgaattcatgattatccgaagtgtacatcaaacgatgtagctgctgttgtcttggcttgaacttaaatgatgaagaaggccggcctgaagccaattagccaaagcagctgttattgagtgctcaaatacatcctcctattcaactacatcaaccgttgaaagaaaagagactaacatatgtattttttctgcctagtattgttttaatgactctagtcaagtacaaacaacatctctattggcagtttacaaataagtacattttgcattatctgtgcaagtttatatattaacttcatcttaagaaatatgaagttaacaatgcgcctccgtggcgttcagccccagcatgagaaacgggcacattgtatgccacgtccaccacaagcggagtccaatgacgaacgcgtagcaaatgttggtcactagttcttcccactgaaaagcctgaaaaagctgggcacagcggctgggaagaggggagagagagtgtgaacgctgtcgatctgcagccaccgtcgtcgaggccgcccactccatggagggggcgcgggatggatgtcgttgagctgttcctgcagtcgagccgccgccgccgcctttgagttgatgctcctgcagtcgagcctccaccaccgccgccacccaaggccagatctggcgaccttaaggccggatttggccaggaggggcacgaagtggccgtcgtcgagccgccgccggtgttgtcgagctgtagatgggaagggagagtggcaaagttggggagggagatagcggtgaaaatggagctttgggcgctggtagccagcgtagagggggcggcacggaggaaggcccacccgacgtcgtcatcgctgtccttcgctcgggcctccccgtcacctagcgccgtcgcctccactcgacccacctctggcgccgctgccgctcgagccgggcggctgccgccctttggggtgccctgttgcccggcgtcgtcgcctccactcgacccacctccgccgccgccgccgctcgagccgggtggcctccgccgtttgcgccgctccgtcgcccgatgccgtcccctccgctcgacctgcctctagcgtcgccgccgctctagccgggcggcagccgctgtttaggccctcctcccccgtctcctggcgccatcgccaccgctccttggctacctgtgggagacgcagagagcagagagagaggggaaagaagcagataggaaagaaaggagattgaaaatactggtgggacccattataaaatagtatgcactgtgggacgcactataaaggactacgagctggatggcccatttagaagaaacaaagcactgcacggcagatcggacggcaatgaacacaaaagaggccacgttttgacgggaaaaacaataggtttattactccgtccatttcgaagacactgttgactttttaacgactgtttgtcttattaaaaaacttttgtgaaatatgtaaaattatatgcctacataaaaatatatttaatcatgagttaaatgatagaaaaagaattaataaatacttaaattttttaaataagacaaatggtcaagtatataataaaaagtcaacggcgttaaatatttcgaaacagagagagtacgatgcaacgaggtggcggggacgcatgcatggccggacgttggaaaaaggctatatgtacagatgggcggacggcggtaacgggagagcgtacgagatggcaccagcacaagaaaaaggctacatggagccagaagggagcacgccggcggaggttcagcggcgacgtcggcgtgaaggaggcgccgtcgatcacatccgacttttggaaagaaatatgtaatgtgcatagctatagataaaatagctttatacccttttaaatcaacggttcatcttatttatactggtagtagtatactacagctcttacaagaataaatataagttgtgaaaaacattataggaactatactttttatcttatttgtttaagttcaccccttcttgttatctaattaggttgtcaaacatgaccatgaagatatggcgatcaactgtctctggtgagcaatgagcaatgtagcagaagctcttcacgacatcgaggaatgttctattggacaatctgtcagcagcattataattctgaagaacaagcagggctagtttttgcatctccatgtccacttgtcggtctagctcctcagctttctgcagatctggaccctcctattttgatcattaacgaagaaaaaacttttgttagaccaccagtattaaatagcacatagaaattaattgaaaacattgtacactgggtaataaatgtgtgataacgtgtgatgctatttgttactccctccatctacttttgatagtcatattttccaaatctaaaaattttatttttgataggcatatttcaattcaacaacctatcatcttaatgactttctcggatttaatacatgactctccattctttcacacaagattggctacatgggcatcgagaaatgtaaatattaatgaatcgcttgtttacgaagaatgattagtagcatgtttaaatggatggtaagtagaattacttatccttagtctgtgtgccaagatgaaatttgactataaaaagtagatggagggagtattacttgtgcaattactctggccgcgagtctgcagcagattgaagatgtgatctgctcaagctgagaatactcgagattcagcgtatgatcgtctggatcatatctggtggagacaatctctaccgtccgaactatcagaagtgctgtattctcttcaggaagtgcattatggcatcccatgtgattcatgggtattcacctgaatacccatataatttaaaaaaaaataactatatatataggtatgttatgcatatatacatgagaaattagaaggaagtacagcatgtatatcccaaatgaaaagaagcccatttattcgcagcagaccatacattcctctccatcttggccaaacgaataggcccactggcccaaaaacgaacaaaaccctagtccctatcccccggtcagccagtccccaccccttctctcgtcccagccccaatccgccgcgcctctagtcatccccaccgacgggcgacggggcatcgagagctcgacgctcggcggcgccggccgccggctcggcgcgtcgccagaatcgccactgcggaggcggcgtggcttgcgacgacgccgccgcctcctcggggacgggcgacgctgagcagctgaggttcgcacggacggcggcggcgctgcggcgcacggtggcagccggttccggcgacgcacccccgcgtcggcgcgtccccttggtccctagacagctggatagtggactggcactggtaaaataaatcctcttgtcaaattccccaagcgattggccattgcttaattgctattgcttagaagttaaattagtcagaaatttgaactggaggtcttgaaatttgaaaaatgaagaagaagaagacaatagatttgaagtctttgtgggaaaggtcaaccaagtctcagaaagtagcttccacctctgatccaaaaccattaaccattgagagtgaagttcagatcccagaaaataccccttctagtcctattcagctactacttgaagcacccaatgcccatgatagtgatatgtccccaagtatacagttggagatagacatcttgactattgtgctactgtttgtacctttaaggctttaaacatgtcattaccactcctgtatgattttcctagtccaattttttgagttctgtatgatttttttttcaactttgaatacccttcgctcaaatcctggatccgccactggagacgctcatctgctcggtttggttcgaagatgtttgctgccgctaggaagaaggccgttaacgcgctcttgtgagtcacaccatatacctcaagatcgttctcggcataccacctgcatgcacatatatattgcaattaattattacgcactctgaatgtactctctctatcccataatataagacgcggtcaaataagacgcggtcaaataaagttgtagttgcacaatctctaaaactaatttttagcttataactagaaaggtagcccacgcacatgcacgggcacgttgctgatgccttgtttaatgttgcttaaatttttatgaataatattaacatgtgggtgattttttttggtaatatttttttattatattctaaatctgtttttgtccatgatttgtttaggattgctttgaatgttggtcatgattttcttctaactaccatatcaacatataaattctacactaaaattatttgaattcataaaatcttgagtttatgagaaaatatcgtatcgtggaaatggagttgattcacatggacctatcatttgtactatacgtgtttttaatatttagtataacttatttttggagtttctaaactttaagtaatagcttttcttgtgtactatagatatctttattgaatttaggatattttaatggaacaaacgttcaattaagatatatggtaagaggaaaattgtatccaattatgacaaatttatagttacttctactgcctcctttttttcatatgcttactatgttcttggaaaaatgaatttaaaattgaaataagagagcaattatataaataaaattagtatatgtagagtatttataaataaaattgttgatgacatttgttgaaattgggcattggtcaatagcatttttggattttgtcatcctatttggtcgtaaatatttgtcaactgataatatatataatgatatactttctactgtcatttgttatataattttcatgtatgtttggattacatgaaaagaatcaaaatgcgacctaaaatataattttattttataagttgaaatatattcaaaacagatagtaaaatataatttaatggtaaataatatgatggtctaaacttcattttcaattgtagagagaatttagttatgcatgtttgtaaaagtgatatatgataaaataatatatgtcgccatttgtttgtcatatatgatgaaaggggtcaatatacgacccaaaaaacatttatttatttattataatttaaaatatgtcagcaccagtttaatcctgtctcaactattacattatatgtatgtaaaaattgtatgcgtaattttgaatttatagttgtttagaatttattatgataaataacaaatattatctcagctactataaaaaagattaaaggaaagggaagaaaacgtgaggagggtcggttgcgtgcatgcagtatgaagatattttataagggttaatgggatccatgccactacaaatatgccattttagaaaaatatcattattattcacgatattggctacgtgccattagaatttgagaaaattagaaccatgccactccatcacgttatccgtcaaaaatctccgttagccccaactgcaagtgggacctaactgtctgtttcatcttcacctccctcccatcttttctctttcctcttcctctctctccaccattgtcgtcgaccaccactgacgctgccgccgtcatcgaccacctccgtgaaggcctccggagccactgccgtcgccgatatcatcggccctatccacggtgggaggcttggtagctgtcgccgccgctaccatctgtagtaggaggctcgggagcagccgtcctcaacgccatccacgtgggagggctcaggagcccccgccgttgttactatcctcgaccctatccacgacgggaggactcggaacatgcagccgccgccgccgccgctatcctttacgccatccgcgtgggagggctcgggagccaccaccaccgtctctgtcctcgatcgcatccacaatgggaggtcttgggtgccgtcgccgccaccatccttgacgccatctgcaatatcgtgaatagtagtggcatttttctaaaatgacatatttgtagtggcacaaaatataagtgattttggttgaatgggatatcatattactacgaatctaaatctatgtccatgcatccaacaaaaatgtcttatattttgggacgggggaatatgtattttctaattaagttcttattattttaatcttattaatttgttttatgtgttttatattgtctagtgtaaactacgtgttgttaatcacatggtttaaaaatctatgtgttaaaaatctatgtgtttttccattcaaaatgtgtattgagtggccaataggtggtccaaagcaatgtatttcttttacttgttaaatacagttaatttgggatttgaattataagttttgttataaatgatctaatagtatacatggataaaaaaaattagctatatagaaaaattttatagttattcaagaaaaattttacaacaaaaatatgtttcaatgtaataaggcatgaaaatagaaaagaggagatgcaccggccggttatgggtgtacgtatgtacagtttgcagcacacgtacatgtacaggccccatgggccttttcttttattattaaagtaaatgcaacgaaggaaaatagtgggtcctttgttaaataaaaaaaattggtgggtccaccttatttaaaagtgtcacgtgtcgaatcaagagcgtttgtaggaagacatatggcggcttaggagtgtttataggaagtttgatgcacttttaggatataatagatagatagatagatagatttctcatgtacacaaaattataaccatatgaaattaaattcaaatcttaatctaataatataatttttaacaaataaaattcattttatattatactaagtgtcagtcaaatgctttattggatggagtagtatatttgacccggtaattattacgcactttggatgtagtacatatgacccggtacttctttcgtccctaatagttgtccttttgtttagcatagattaatatttaagaagagaactctatataacacccatcattattgagtatggtttgggagtagaaggtggtttgggttaaaaagaagagaaatttgaatataatgtaattaatgagacaatagtttaaaaaattgcaaagtagatttaaactattttaggacaattttaatcctataaacacaactattttaggagggggtagtacgtagtaattctttgtttatttccattccaaattaaagtagatcagtcggatggagaggcaggaggcagctcacttgttgatgccatgccactcaagttggcagcgcctctggaaacacttgaaatcagcttttgccatgttgtgatagagatcattgttcacgagtggcagcctgcagaaaggtttaagaccgtgtacgtccagtatatatgaggatgatgacatgataaagagagagtatttcacaattgttggttaattaccgtgcttttacctgtaaagcgacttaccgatccacacatctctgccggcgccatattgctccagatacattcttgtttcaacacgtggcagacttgctttccaggggaagtctagggcgtaaccaatctacgtgtcgacattgatcaatacaatcaatcgacagacattaaattactaattttacacatagtttttggtctctataaatacgtacgtttgtcgtagtgttaattagttgtatacaacctcaatcaaacagtacctctaaagatagattcccatcgctttatgctatagtaagaaggaggcattcctcggttgcaaatgttatgtcttctgttctactgaatgtctcttttgaaagagctttagtaggttagaatttgtttaattggcataatttgagtgctttaattgttcatattcatttgacagaggataatgacgtattttgatggaatttcttcaaaatggtcaattttcagtccattatatgtatttagccttaattaataatagctacattgaaaggaataagtttttatggaaacttaaaatgtctcttaaaattaagatttttatgtggtacttgcttaaaggggtcgtgttaacaaaggacaatttagcaaggaggaattggtatggtagtttgaaatgttgtttctgcatgaaaaacgagtctattcaacatatatttgtgaaatgtcactatgcaagatttctttggagaactctacaattttcttctggtttaaatactccgcttagtatatctcatatgtttgagaattggctgatgggggttgataaaaaaaactagcaaacttatttttgttgtagcatccgctatttgttgggctatatggttgtgtagaaatgatatggtttttgacaagtcaccatctatatcttatatgcagattcttttcagagcaacataccggctccggtcttgggctcaactactaaagtgtgatgaagatataaagttagtgaagactgcatgtcgcaatcttgagtcgacgattatgcagtttttcaccaactttagatcgagattcacaaatagaatttaataattttgttaacttctcatgttgtgtgcgtttttagtagttagtgtgttcctgttttttttaagactgtttttttattctgttgaattgttgtaataattggctgtagctctctgagcaacggctggaattctattccattataaaaaaatcaaaccgtcacattccgagacaactttagtggtaaattaagaggagaaataatacgatgttcctaacagaaatctaatctagttttcacggatggatagataaaacttttcgaatcgtggacagaggataggtattctaatgaaatgttagttcaagtttttttaaaaaaaaacttttaccgtacttctgtgtataaattgtgatggtagtttcagccttcatataccatttttcgtacttttactgtatttgatatatgtgtggttatgggcaattttagatttcactgactctgccactggagcaatatatatgtatagtgtaactttaccattcaacatttggtacctcgaaatacctgatactactctctctccacctcatccatgcacacatgcatgtattttagcaagcttcaaaataatttttcttttaaattatttattcaatccatgatccgatcacaccattatattcgttttaattaaatctttacaataagatatcgcatgattatattttgttaaaagaaaaacacatgtttcaatccgttaatacttgttgtttcatacgtgacagtgacatgtttcaacgtgtatcttcaccatgtttcataaaatatttaaatgtttcagttgctgatttttttatttcaccatatataacttaatgttttacttgttggtgaactgcaatatttgatcgttcaattttttttaggcatcggacgtccgataggtagcttcctccatacactactacagaaatggatatacaagtcagcactataagtgtcgaaaatagcataactagcacctatagtattttttccacctccacaggctgaaaacacacacaaaaaaaactaacaccttcaagcgactataggtgccggttctttagaaaaaccaacacctatacaatagatgctgctttttttaaaaccggaacctctagtgtattataggtgttggttctttaaaaacctggcacccttaaaatcaggtcgagctgaactggtagcctcctgtccttagcttctccttctcctcatctctctattattacgctccaccacaccctttcctctctctcggctctcactctctctctcgtctctctctcttggcgccagcgggaggggaggagcaggcaacgtcgtgcagcagcgggggggggggggaggtgatggcagtggtgggaatggcttcggcagtggtgagaacggcttcggcagtggtgggaacggaggcaacggcagccggtgacgtcctctcctccgccagaccggcagtaggggagatggtgacagcagcgttcggtgatgggaaggagctagcaacaacgacgtgcggcagcgggatggaggtggccgcagcggcggacgacggcagcaggcagcttcgccctaccctgtgccagatctggcaggaggataggcggcgggagtgatgtgcaacagcgggaggtaggaggtggcaacggcgagcggtgccctcccctccgctagatcaggcgggagggaagctggcgggagcgacttgctatggtgggcggctcccctccaccaaatccggcgagagaggaagcagtggcgccctccgcgatgtcggtcagcccattcttaatgttttactgttccttttgttcttgagttgttgaatgttcttgtgttcttgtattttcttggattggtcgggggtgagggtacgaaggggagctgctcgatgcattggctcgtctacttttttttttatattcgtggaacctcaaagatgcgctatggtatgatcgctcatacacatgaagcgtgggtgtacgttgccgccgtcgccgccatcgtcgccactggagtgtgtcgtccatgactacgagacctcactagtgacggatgtaatgagatgatcctcaaagatgggagcactcatctgtgactgggtcattattactagcattgatggagaacattatcggtgaagcttggtagttacaaaacgttatgaatgagggaaaatttaaatttttgaatttttcaagcaacctcgtatagagatatacttcacatgaaagttgtaaatctcaacgagctgagctctgcagcgcatcaccttgttctgttcagtcaccggtgccaatcacagcaattcttcgccatatggccatatcccagtgtgtccttccatatcttgcatctgcatatatcttaattacctagaccatagctccgatttcactatccaacatccatactccacataccaagtctgttggttcaaaactaggagacattggtctaactaggagaaagctttactacacccaaaaactagctcaagagataaagaaactcttctacttttaagttggttcaatccctaatcaacaaatatgagactattcccgacataggaaagcttgcatgctgacaagaccgagcacgatggccaaccacttcgcctgtttcctgttgtgtaacaaggctttgaaatggatcatgtacttggaccttccaacatcacaaatttaacccaaccaccacacccagctgccaggctccatccatccaaaatctgcaaataacgctgcctccctcttacttaattattcatcatgtgaacgttcttatctgtgtttatgttatggatgtgtggctagctgtagataacgggactatatgatatacactcgagcagggacgaattgaacatcggtgcagggcggctcgagccacacctaccccattatattggatccccatggagaggagagaggggatgggtaagtaaagtatatgggctcgacgaggaagcagatgatgagctttcctcctaacttattctagatccacccctgcactcgattattcgggaattcagtcccaaagtgccaatgacgatcaaagtcagatatcaaaagaattaaagaaccaacagcatcagttgagaaataacagaaacatcagttgcctgttgcttacttggagagacactatagccatgcaaccggagtagacgaaaagccattgacccggtatcaatatccttcacagagctgtgccagttgtatgtcacgccttccttagtccaatgcctgttccattagatttataacattaatttgacaagtcaaaatacgtattttggtacacaatgtggtcaaatgatcacctgaaggtgtattctaagcagtactcatcaatttcagttttgaagtagtaagatatgcctagccgctccaaccggtcgactgcccatacgcgctcaaatatttcgataggatagagaaatggtactcaaaacattgaacagagaaacaaacaatactctattaacgactgtttgggtggatcataataccgtcatttggtcgattcacagaaaggttaatgctacaataatttttttcatatctggggcagtatgaattgaatgcatatctggacaaatccgattgaataatgttacggctatcaaaaatgatatccatttttttcaattctggaactgtacagaaacgaactttgcatcaaataggttctattcaactagaaattaaatgaagtctcgaatgagaatttatttataattgaaagatcattatttacctcccccatggaatttgctaacaattccatcaaggaactcgagacatttcttgtcgcccgtttgcatcaaaacataggccgttgcagcgggtgaggataggaaggatccatctgaaagttggagcttgaggagcctcttccagtccaagcctcgcagtccctctatgctaagaagcaaacttgttggtagggagtgaagtatttctcttgggatcctacgcaaatgtaacaaaattattaatgtgtgtgtgtaaattaaatacatatgaataaattggagcctttccctattagaaacaggtatgcagattacttcttaagctttagctccctttgggcatatatcttgtgcaaagcagggtcatcataagggatgtcaagagccaagtccttggctatctctaaaagtgaggggaaggtgatctcaaaaccaactggcatccatgcctcttcctcttgggccagcctccatatattttcccgaataaacgacaaacctaaaatcaaatggaacagtcttaaactctctgaaaattaagatcacaatacagttacaccgaaaacctcaaaaagcctctcatcgtaaacagattgatctgccaacactatggtacctttctcacgcttgtcaccatgaaccttccactccatcagcgcaatcacacaagctagggtgttgaggagcctatcatgaactagaaagcacaagtcatcaccccatgaaccatctggcagctgattgtgagagatccaatcaatggtcgaggggaattgtgggctgtcgctgccgttatgattcttcacaagtgcgacccacgcggtgtcataggcagaagcacttatctccccatcgcccattgtccttagcattactctgatggtattgaccatttcttccatgtcccgcggttcgtcctggataaatatgcaaatcatttctttttcttaattttctatatttttatgactatataattagaacaaacaattaatgatcaaatatatgtataggtaactatgttaatgttctaaacttcatgaaaaaaatccaagggtctatatttatttttaataatagaaaacaatataatccagcctactccatcggccaaaaaaaactcaaccaacccctcctaggataatgaatctagactagttagctctaggttaagtttttttgggacggagggagtacatcaaccaaccttcattttttataatcaagaatattaagttgagaactgaaaaaagaatcaagaaataccattaacatttgtgtacgcctgcactaatcctattacaaaacagaaaggaagtataacatagagctgtaaaggaaaaaaagatgggaaaagtagtctgtgcaacattaatatattacttttccaccgctcctcctgtcaactgtttcttgtgtttctttggctttgcaatatactattccctttgattgctctttatctacgtatatatatagagacaaaaatgttagaataccaatagtagtttagaaaattaagtaaacgaaaccactagctatattgatcggattcactatcccttggtatatcttctactgagacaaaacaagggatgagtgttgttaaagacaatgtcgtcctcgttaaaacgatttagttaattaaactccatttatatagtggtagagcatgtagtgcgaattgcatgactgcatacaccctttatgaacaaaaacaaacattaaagagccgtctcatctaatcaattttccaatgaactaaattgacttcctactacacccagaatgcctagagctaccttgaatgaatcaatgaatgaaaacatcacaaatcacagaaaccgaatcataagttttggcacgatacacaattgcgtcactcctcaagttagaattaatctactacccaattaccacttttccatacacacaaatcatttacaagcatcaaccactagtacagaaacctctatagttatcgattgggaactggctataggtgctggtttcccaaccgacacttattgatcggcgcctatacctcaatcttattagtgccggttaacaatggcacctatacttccgctggctgccaccttgcccatacgctgcactgaaggagggggaggtcccccaggagaggggaggccagcgagatccggcgactgcgccggccgccaccacacgttgtactagaggaggagaagggaaggggggaggtccccctggagagaggaggccagcttgtcaaaattactgataaaactaaatatattcagtcatcagctgcccgtgtcgccgtcggctgccgctacacgcgtcctacgtggcgctctccgccccaccagcccacctgcctgcgtggtttccccgccggccgccaccacaactcgtggtcgcaagccatggccgagccaagtcctgccgcctagtaccagccctagccgaacgagctattaggattgggctaaaacagatggcccaactgctgttggagtgagcttgtgttatgtcccatgtcgtccccatctccccaatcagcgtccttactgttcttccccgaccactcaacgttgccatgactgattttgctttgctatgagtatgggatattctttttttaaaaaaaaatcagaggataggctagagcctgatggagcctacctactagattcatccctgcttagtaggttccatgacgacccaacatcatcatttatccgctttgctacgtggcatgtccagaacggttcagacttctgcactgccaccatggattcagactccatggatccatctggagtcggtaggactgctgattcggcaacttggaacagcatgactgttgcacgatcaagatgaagtggcgcctgtgccttatagttagcgagtggcacttgtgaatcggcgggaatcttaccggggagcgggagtggggagtgcgtcaagggaggacgagttggattctcatgttagagcatagccccaatcacaatcagtccaaaacatagcaagcaccacaagaaaatacctaaaaaagtcccaaaatccagaacacctagacgaaccctagacctaaaaaacagatcaagaaatctttcgccttaaatcaagggttaatagatcaggcaagatatatctattgcataaatacaattggcaaatatcaaattatttaagtgggatctacgggatggcacattaaaaccaccggattgcaggaggaaggcggcctgtgattttcctgtgcggttcttttattttgttttctttccgtgcggcaaaaattccgaatttgctcgcgttgactgggctgaaaaccaccctaccgtggacggggatggatcgcgtggattgggccggctgcaagttagcagaggacggacgaaagtctgataatgcgtgcgcgatcacgatgagacggacgaaaaagatgtgtgacgaacaattttgctatatatttatcgataaattttctctcaaaaaattaatagatgtaaccacagtacaattatattataattatactgtaacttatatgtaattacactataatttacatgtaactttcacataattttgaaccgtttgatttgttttaatatttgtgtaagtgaagaaggaaaaaaatcactgcacgcatatatgtgagagaatttgttcccacgacctccatttcatgaaaataatatgttatggaaagatttttggaacttacgtgcaagttacatataagttacaatgtaattacatcatgattatactataattatatctgtcaaatttttaggataaaatttatcgataaatgtaaaagtgatcccattttttaattagttaagattgcggggcatcacaactgataagcatggtatgttgtcggatgcagaggggttaaattggcgacccatgtataaacatttttgatacaaactttgctatagattgaatttcagtcgttcactttgcaatcaagataaataagattggacaatggtagcggtgaagaaaataccttatacgaatctctatctctactattataaaaattaaaaatgtttctgccggtactttggtatgtcatccgtgtatggatcggtttttaaattcattcgcttttagaaatacagaaggagtcgtataagaaaactcgcatactaaccttagacgaatggactcctaactgcagctggtgatttttaaaaaatatatgtatccaagtgaattcccacagtaaatttcatcttaactaaaccatataaaaataataagattaaaatgattttcatccgttgcaacgaacgggcttctttttagtaattctaaaatcgaattcttacaaaaaaaaacataagtaaaaatccttttagaaaacgtagtgccaagccttaaaagtttgcaaggatgttttggttaccacgtggacgcggagcgtgcatacgcgtatgatgatctggtcgccggcgatcccacgccggggaccaccgccggcggtcgagcaacgccaagtgcggcggtgcatttgcacaaattagtatctgcatgggcaatatccgagaaagtccgtatggtcgtaagtttagtgagcaggatccgtcaactggagggcccgtacttaaaaaggcaatcgtccaagctactaggcaaattgatcaacccaccagtgaacgtaagagactacgagccacacgtatggcccactagcgaacgtacgacacacgtatgtcggcccactggtgaacgtacgacgcacttatgggtcttttcatcgcgacgtacataactttgactgaggactagagcgtccaacggataagttccaagagctatatatattgtcgtttgttgattactttgatatactccctctgttttagcttataaaacatttcgactttagttaaaatcaaagtgctttaagtttaactaaatttgtagaaaaaaatagtaacattttcaacctaaagacaaatttattatgaaaatatatttaattatgattcgatgaaactaatttagtattataaatattaactatatttgtctataaacatagttaaacttagaaacaatttgtctataacctgaaacacggaaggagttgattttttaagataatggaatagaacatccctacatttgctcaaaagagctacaatcacaacctaacacatgtagttcaaataaatataaaaagacaccaaacataaataagaaacaaaccaaaacaaccaatcaagataaggagtgcacatttattgaattctatttgtgacactccatttgaaattggcaaacagttatataactgttatctcaaggttacgacagtcaacttttagaaactctcgatattcatcacactatgatatagatatgctacctcggtcccaaaataagtatagccgtgggtatccatgtccaacgtttgaccgtccgtcgatggtgatgatgtcagcgacgatggcggcaggcgaggtccggcggcgacggaagggctagtgcagcgagggcaagtgtgga

SEQ ID NO: 7615 - DNA, 36108 bp, Oryza sativa
aaaaatagataactaaagactacgacccgttggaatatgcctcagaaaaaaatttccgtcccttgtcctgctgtacatatacctcctttgatcctctcgccttattatttttaactaacaacctaatatttaaaaaacatagctaaatgacttataatttctaaaattatattttatttttaatttgttttaactattgttttatttacagttaattaaataattcaatatccattatagttgtattttactatatagaaattaaaatactcctatgcagggcaactgaatgaaattgaaaaattataacagaatgaaaacatgtattattttatattaaacaatctacgcaataaaaaccaattaaagacctttagagcacacttaagtcaccatatgtcacattttaaaattataaaatatttcatttaaatcgatggacccattattttcaaccattagatttaatttacgaaaaatcttacgctgccacgtgtcatgtcctgaaaatcataaataatcttaaaaattttgagaaaaaattaaacctatcatcattggttttaagttacattatttggagaagttataaaaataaatcgcatctacctcctcgcccccttcacatgcgcgcagaccactgccaatcccatccctatttttgggtaggagtaaactaaaagagaaataatcaatatgttaaaacaaccatagtttttaagctacatgtctgatttctaatataattattgctctatttataattaaactaggaatttaagatccgtatccttatattttcctatatacaaaatatggcattcgaccacattgttgacgacgaacccagaagtaagatttaggatctgcactggagttaagcagatctcctaggccagtgtgtgtttttcacatcaacacacattcagcccatgtgctttgcataccatccaaatatgattcaaataccttaaacaagttggctgcacatattacatcactatacatcattctgcaaacatgtatagctaaattaaatcaatagttatccaaacaaaaattacaaagtgaactatgaaacaatttttttattaagggagaacaccctgcccttttacgtgtgatttgaattgctgtaaaagaattacgaaataatccaatacaggttgcatcatcatatgttgtttgtcaaacatgcatagctaaattagatatacattgtctcagcaaatacaactaactaaaatatgaagtccaaaccaccaatgcatagaaaatccaatggctttagttagagaaaatccgattacttcatgatttttttaaaaaatatgtgctaaaataatccaagcaagctaaatgatcttccgtgtatttgctttaaactatgttaccatctaattgactttagatggtgcttaatgcacttttagtatatcattgatatatgttcaagcgtgttgttttggccttctaagcattctgggtaactccgtttattttctttgctcatagaccattcaaaaggtgaatcatccctatatataaacattaatcatctgcaaatatattttgttgtatatatatacttaaatgattaactttggagtccatttagattttatgatataacaagacatggaaatatgagtaactaagctccaccaaaaatgtgatcacaactgcgatgaatcacaaggcaacctctgtaggtgcaatgaccacatctcaacacggtgactaggagctgcataaaaccgtatggcgagggaaaaggaacaatgaatttagctaggtcttacattttcatcaatagggcccatagcattcaacaaacaaagaaaaaaaacaccttgcttttaattaaataaacatgttttctaaacaaactaggtctaactcctttttagatgatgatgaagattatatataattgcttatacatattaattaaatactatatagtatatagcatagagaaattatcaaagtgatgcaacgaagaatatttgctgaggaaatgcacttccaaaacatggcggaggctctctgataaatatgatccgttttcaaatacagtgcacgatacatgcccgcgcattcgcgcgggctaccttcctagttatgataatattgatttatatcaaaatcttccataactttaacgctttcttatctctacgaatatatctcctatatatgtacgtaccgccccccagacttatacaacgtgtctaacaattcgcattgtatctctcaccctaattaggccccaaaagattcaaacattctctgcacctacgttcatccctagtcatgcaattcaagctagtttccacgatcagttcccttcatcggaacaagcattcgccaaaagagatagcactaggtgcacacacaaggtgcaacgttttccaaaagacaagatttctgcgcttgttagggctgggagacatcatgaagccgccagagttgtagcatgtagggaaggttaaatccatttgggtatgatgaagtgttattcgaaaggctagacgattggcagcacatcttgctgctaatttgccattttttagataaaaaagccaagccttctaaaaggaatgtttgatgtacctagagaagtcactaccaaacagaagaatttgactgtaataacagctgcagattgatccttaaaattctgtaaaagtgctcaacgaagtggtgatcggccatgttttctaaacggggcagctggatttaatcttgcctgtcatacttgcagacaaatgataaccagggagaaagaagcaagtaattctgactttaaaggtgttaagaaagattatattgaacaaagataaactatagagtaaactcaatactctatagttttagcagagatgcacaagctatagagtaaactcaatactctataccaacgttaaaaactgtgcctatatgctttgttgtagcagagatgcacaaatttgagacattccagaataatactgcacaatacactgaattttgttgtccgttggttggaaagaagatactgaaaacagaaacagcagaagacttacaagaggcaagagctttcatttgatcactgtccaacagggtgataacactctttttttaacactcagggcctgtttagatcccaccctgaaattttacatcctttcacatcgaacatttgaacacatgtataaagtattaaatataggctaaaaaataaataattatacagattgcgactaatttctattagtgtccgaataccccatgtgacacgccaaaactttacacccatgaatgtatacaccccctcataaactcagagacattgtgccctgccattgtcctttttgattccattacattctttgtttctcagcctttgggcctgtttgggaagctttagattttgaaaagcagctgtttggtagccagaaactaagaatctggaaaagctctgaaacccagcttctccagcttatggcttcttagtgaactgtttggggcagtttctatagtttatctttgttcaatataatctttcttaacacctttaaagtcagaattacttgcttcttagtgaacagctgggacagctcccccaaaccgggcctttgtctcggtgactccacatccatatataccatatgcatagtcacgaacacatactcgtatgcttctagccttgcatcgccttcttccatatttgtatatataaattgttaggttaccattgttctcacttaattcactcgacgtttcttcttatattgaagcaaccttgcattttggcttggaagttatcaggaaaaggaaaacgaattagttcttaactcacagtactgatgtgccatctacgtccattgctacggaagcttgctgcatgcaaaagatgccctgaaaggtctgtctaacagaacttgtactatcagccataaacagctttgccttgatgattgtggctgtcatgtgcctgctatatatcttccatgaacagattggattaattggtgcaattaagtcttacatttgttgattgtatgcacaatttaaaccagtgacgctccttcgatccgtgatctgcaaattttcacttgtaaattaactggtaattttgaagaaaatcctgaataacctcagattctaagattcgaacgtgtggcttttaccagaattggccaagctaattctgtttcgaaagcaggatcgggaattttatgttttgttcttgtataatttctttgagatccgaagcaattgtttaatggatgttcgtcgaaagcattcacatctgcatataagtttgacattgatgaaactacacgagcaagataacccatgcattgcagttaagcactacagaaatggtaccttcagacttaattcagtacatctgtatagataaataatattctcaggccctgtttagttcacaaaaataaaaatttttggatatcacatcggatgttttaccggatgtcgaaagggttttccggacacgaatgaaaaaactaatttcataactcgcgtgaaaaccacaagaagaatcttttgagcctaattaagccgtcattagcacatatgggttactgtagcactcatagctaatcatgaactaattaggcttaaaagattagcacttatagtttttgtttttatctatatttaatgcttcatacatgtgtcaaagattcgagaggtttttacctgtgtgccattaaaatagatgacccctgcctctatgccactaaaaagttcgagccaccctctatgccattgtcgaactttatcgcgcccttcacaccattccgtctatttttggctctaacggtgtcaaacaacgcagccaaatgacattgttgcccttaggcttgagagagaagagagaatagagaagagagaagagagaagagagagaaggaaagagagatagagagagagccgagacggcggccgcagatgccacggcccccatggcggtgagctggagggcttccggcgcctgtccggcctcgccttcgacgagctctcccggcgggaccactctcctccgcctccggcccgccacctatcgacctccccacgctcctccgcctctgctttgccgccgcgcccctccttcttcctccgggcttgtcccgcacgccgcagctcctcggctggccgccgcgccgccgagcgctaccccgcccctcggctttcccgccacgcccctccttcctcttcctcctcctcctcctcctccgccgccaccgccgctgccgccgccaccgggcttgtcccgcacgccgcggcgccgccgagcgctgcctcggctggccgccgcgctagtcgcctgcctcatcgccggcctagccgcaccggctggcctctctttacaaggaagcagacactggaagggcaagagcgacattttttgtgcccaggcccacatgtcagaggtgccaaacagttgaatccactcagaatagcgacggaatggcgtggagggcgcgataaagttcgacgatggcatagagggaggctcgaacttttagtgccattgaggcaggggtcatcttttttaatggcacacaggtaaaacctcaagattcgatgtgacgttttgaggaaagaaaatttgggaactaaaccaggcctaagagtgttcttggaaaaagcatttctgtgccaggtagatatattaaaagttgtactaaaattgtattaatttcccctaggcttccagctatttaagcaacaaagcaacgaaaatgacaatgaagtacaacattgtggacaaaccgttgtgcataagctctatttctctgaaaacaatcacgccccttttctatcattttgcccaactacaaatcatcctatattttaaaacaatatcttaaaagcttaaatatagcaaacagccattcggccattccctcgtcttcatttcattccttcaattcctagtcatgcgatgctactaattttcacaatcagttcccatggccgaaacaaccattcccaaaagtttagctctggttgcactcaattaatcagtgtgaaacattttacaaaagccaagcatatatattttcttcacttgttaggagtgggtgtcatcagggagcagcgctagagcatatagaaaaggatgaatacaaaagggtaagaagggctatagtcagcaataacaggcgaccgtataagcctaccaagaggcaataagaacagactagattttgaacgaagaggacgatgctgattgcaaaatactccattaatttcaatctaattacatctgtatcttcctgctgtgtgagagcagagatgcacaaacttgaaataattttccaggataataccacataacgcaaaaactaagtattgttggtttcctgaaataatattattgaaagttgcaatagcagaacaattgcaaggcaagatcatgaggcgctgttttaatcctcaacctctgctaccgttgtgctcagttctctcgatggtcaccactttaatccattactacctttacggtggtttcaattaatttcttatagagcataccacaagtattatcaccagtaaaagtgatctaattcattgatttataagatctagtagataacgtgatagtataaattaatagacatattccatttaattagaaaaataaaatgccaatattattctagtacgaagagattaatcgtaaaaattagttgtttcatttctcccttcttgcaacttaagtcaatttttttactagcctctaattaacaaacatgcttaccacagaatgaatcatgctatgtttgaagaccatctcacacacactccccagtgtacgtagtttcggcattttcaagcatccaagaagaaaataaatagtggtcaaccacctcaacagtagtatacaaaattgagcacattaaaagatcattagaagtgatgatatgaaaattgatttaatttcctttggatgaaaatgaccccaaactaaacctctcagtatataaagcatcgatcgtcccacgagtcgatcaatatttgtacatccagtgaagactaccaaaatagaagtacgacttccaaaacgaagataaataaagcatgttttccagtatgatgacctttcagcattaaattgattattgtgttattattgttggtatgctggtctgcatgcatgactcatcaaaatagaagggtctatccaggattaaattacgattgggaggagttgggaaatacttggtgtcttggtgatgggggtgccgaaagtggtgttccataggtaaaatcaaagttgtttttgattattattgtatgatgaacaattgggcattggagattattggttttgttatttggaatttattcacgaagtggttttggagatgattggatttacaggtgaatcgcaggtttattatttcatgtggaccggtcagaccgggccggtgcggccggtcagaccggcgcagcccgcggtctgaccggccgacgctgtgtcggtttcggtttcaggttgtttatttggatatccgtgattatttcatgattatggcttctagatggatactgttgttcgctaacaataagtaaagttggagatagcttggtctcagaatatggtttctttgtttgtttcatgtgtatgtgagtcgatgcctcgggagagtatttgcggtgatggaccgggagtcgacttggggataagacgacgtccgtggtggtcagagatcatgcgggatacttaggctagagttgatacacgtggttgatggagattccatatggcatacgatggagttattgtgtgcgtatgggatgcggaatcgaatttggaaggagtccaaatttggtacgattggttatgtaaagtttctttctggtactagagggtttccaaaggtgtttaggactcctagtatgagtttggttcgtggctttaggctgcctacctcgagtataaatagagggggagcgtgaggcttcccggtatcgcttttgagagcaattgagttgagttttgagttagggtttcgagtttagtcgaaatttttgtaaggagtgctgtttgtgtactttctaaacatagagagaagtaataaagttgtcatccactttaagagttcttcgatttgtgtttcaccgggtttcggcggtccaaccggcgatataccggcggttagaccggtggcaaggcggcggtcagaccggcgggagtgaggcggtcagaccggcggcatccactcggtcagaccggcagatcaatctcggtcagaccgatctccgttgatttcgagggtaacttttatttctgctaaaagttttaggtttttgggtatatcaacttgtcacaccctaaaaatcctagatatataaattgttgtttaattggaattattagaatttattttaaaagcctagaagagaagatctagttttaattaataaattccaatataaaatggggccagataaaatttcatgaaatactttgcttaattctataattccgagatttttctgggatttatttgagctaagaaagtatttttaataaatggaattgcatttcatgaataatttaaattgacaaaggtttttaaaagtcttcttttggctttgggccgaaagtcggcccaaaacctctctctctccctcggcccagtcggcccagtccggcagcagccgcccgcgcacgcgtccgcccgctgacaagtggggcccacctgtcaggcctgtcgtctacctccggccggccgccgcccgaaccccagcgccgcgccgccgtcgtctctttccaaattcggccgcccctttccttttccggtgaaatcaatagaggggaaatgatcttcgggatctcctctaccttttgtcttttggaatcgtcggctaaaatcgtttggaaatccgtgaattcgatctcgaatcggattcgtctctctccccgaaccctagaccttccttcgccatcgccggtcgccgtgagccttcgccgccgcctccttgcccctataaaaggacccccatgcccgccgctacctgccgccaccctcgccttcgtctctcgtcgccggtagaaccctagcaccgtgtagcctcgcgccgccgtcgtcgccgccgctccagccgtgcgccgccgtcgctccagtcgtcgccgtcgctcgggaaggccgccgtcgtggtcgccgtcgcgttgccgtcctcgtccgcccctccatcgttgctgtagaccgccggagcaccgccgtcatcgtcaagccgaaggttgccaccgcttcttcctcgacgccgtcgccgtccgttgatcttctgccgccgttttggtcaccggtgagttcgccgcgtcgttctctacgtgctggtgccctccgttcgcgtcgtcgtgccgtcgttcgccggcgagcttgtgcgcccgagccgccgccggtggtgacgtcaccgctgacgtcatcgttgccgtccgtcgtggtccagccgtggaccggtcgatctcggccgttcgttttggttaggatcgatctcggccgttcgtttccgtgagccgccgccgtgcacccggtccaccgcaaaccctagccgctgacgcaataaacccctttttccttttcaaaaataattcattattgcgtcataattcaattaaaatccacataagtgttttaatccgatttaatctttaaaaattcataactaattcatcttagctcggatttagttggttcaagtctctaaatttttctaaaattgagatctacatgttaaaaatatccacatgtactgttcatgcttgtttatgtgctgttttggtgtttttgctcttttttgtttaggttccgacgtttccggagagttcgttttcgcaggagaagaatttgaagagttccaagggcagcaaggcaagtcacacagatcccaaataaccctttgaacatgttgatcccgtttaaagctattgtttctattcaactattgcatttattctcgaatgtcattgggtggaattaacctattgtttattatagtccttttgttcttgattactttattccttgataccttggattattataacttgactagttgagctttatatattggttcagctagatattagatataattacttagccatgcttagaaacattagcacacaattgggataactaatgtttcactattacttaatgatggatatttaatggtagctcatgatggttaatcatgattggttaattaattaaattgccaactaaaacttgataatggtgggttgtgagcacatggttttgatggtcgtgctcatgacaattaaggaccggttcacgagtttcggttgtgaaacattaaccgtgccaaccacaagccagcgtgggcaacggctttaccttttgtatagcatggttcattgcggagcaccagactgagaagtggcggagataagcccacgggggtcgctggggagtccatgccttgtttataagggggtgattatgatctaggaatggtgcactgtggtggattgtgttgtgtgaggggtactgtcacagctcctttccgaggtaccgtggtggtattaaggcacatggtgacatgttgtggggctgtgtcttgtgggtacagtggtacacctctggccagagtaaaactattcgaatagccgtgcccgcggttatgggcgggtctaacaatgtctttcgtgattagtctcacacttctcaccataataaaagatgctataactggtaataatttgtttagctcctggtttggaatggtatattcctggtttggagatagaactgtgcagccaggattggttgtacagaatggttgggcctatgcaacagggtatgttgtatagcgttggattaatattgtttaaattactacttaactattttattaaattctgaaatgtttattaaatgctgtttatgcaaatgaaaccctactatgccatcctttgttatcctgagcacttgcatatttgctgcgtggcttgctgagtatgtcatatactcaccttgcaatcattcatcagaggaagagttctacagtgatgctgatggtgtggaggattaggtgtagccctggtcaagctgcctgtggagtggagtcgtctgcgccgtttatcttatttttccgctgcttagatctttattgattgagaggaactatctacctctgtaatgacattttattcgattatttattagagtaataattgtactctattatcaatttgttattgtgtgcctcggctgattcctggacgagggttcacacacatgtaagcgtttggaattttggatagaaattccgggcgtgacacaactgttgtcgaaatgacaactgcatacgtcgaaagacgtggttactcaacagtggttggaaggaaacgaagtgtattgaatcttgaatttcttcctttttctcctcctcccattacatggccctaggggactatttatagtctcattacgggttcttactactagggtttaggttatacaggggaatttacatgattacccttacgaaagggacatttacaggggtacataatgttataggggctcatgggcccctgatgggccgtccggcgatcgccggccctatagcccctaggcttgatgggccggaaaggcttcttcggccctcgcgggtgcgaacttgctatggcgaagtcgtcttccttcggcagatagtcttcaccttgcacccttcgcctgagacgcctctgacctggcaaggcactagtacgactcttcgcctcacgccgttcttgctccatagcctttgccacgggtttcggcagatgtggtcgcagggcctcatgccatccgccaacaagctcctcacgggcaagggtgagattggagcttcggccgagaccgtgcaaaccatgtggtatggtatgcggcaccacctttcgactgatgctcctgccgaaacctacattattcccgcgcttcgcctcctgcgattggtggttatatattttcttttcccgggccgaacggaacagtattgggctttcccttcgtgggctttttactgtgccgctcggtcggtgggaatttaccgtttcgcctacccttgcgacacgtggcgctttattactggtgggtaggcgaacagtcgcccgggtgagctatatattcccaccgctctttccttttcaccgccacacttgccattttaccgcgtgcactctcttcctccgtttctttcttccacagcatctctccacccctcaagcgtttcgcccattctctttcttcgccaccgcaaacgcaccattctccatggcccctcgcaagccaaaccctgcttcggcgaaagggccggatcccggccgagtcgatgacgacagcaccgcctttttaggggtctctcttgtggatgacgtcgagctggcgaagctggacagctctggggcgttggttgaggggtaggctttcaccccagggaaagccatggtgccgaaacctatcgacaatcggacggtggtattcgccgtcttttttgaggcagggctacggtttccctgcaacgtgttgttgccggagatccttcgcctcttccaggtggaacttccacagctaagcccgtcggcgcttgttcggatcgctatcttcgactgggcgtgccggacttccgggtttgagcctaacgccgagctcttcggcgccatatttttcgccaccgtgaactcgaagacggtgattaccccggcttcaacgaagaagacagtgttcgggagcgtgaactttaacattcgtcccgagcggtccgatctctggccggtgaatgctgccatgtcgaagtgggaccgccattggatggctaggtggttctatcacaccatcccttcgaggctggcactgactcggcgaaagccctccattgccggcgtagggcgatcgcgcctaaccggaaacccaagatcgtcgtggacggctctatggaggtgcggttcgttctgctgcggaaggtttgctctcgccttagctgccgtgacttggtggaggaattctgtatgcttcgcatctttctcctctcccagtcatggcaagtcagagttgatcaaggcgaagaggttgacggtttgccgaacctggttcttcctgaggggacgaacagtaagactgttctcttgctatacactgctgtgctttgttatcttgccttctctgactgttaacatagctacacactttacttttgcagcgttgaccctcgaccaggctaaaaacgaggcccgcaggatgatcggcgatgtgtcggtcctcgagtatagccagttgctaacacgacaagcggctgggcgggcgaaccgggtttacaacggcgaattgcctcctcgggcaaacccccacaaagctgaccacggtgcagggccttcacgaaagcgaatgcgcggacaagtgaagcttgcccctaggaagcgaagggttcctgcttcatcggactccgacgccgatgacgaggacgatgtcgaagaacgcgacggcgaggaggaaggagaggaggaagaggaggaggccgtggccgataaggccgcgaacgaggcgatcgaagatcgcgtcgacacccccggctacaatgagaccggggtggagtcgaacactccccccttcgacggaaggatttggaaggggtgaaggccctagttgcgttctcctcgggcaaggcggcgaagggaggtccggtgcagaaggtctaaaaagaaaggacttgtcgacatcgcccgcgttttcagcgatgacaaatcttctgacgggactccaacttcgcccgctggccgcagtttggtcctttcgactcaaggggaaagaggccagggccgaggttgatcgcctcaaggccgaactggagaaggagaaggcccattcggcggtgctcatcgattactacaaccttactgagccaaagatggaggctctttgccagaaggctagcagggccgaagcgagcgccgcggaggagtcgcagcgtttttcgcgggagatggcgaagaccaccgaatccacgagaatggcttgcgaaacgctccgcctcgcccttaccgacatgggcgcgaaggtgcggggggtccctgccgtggatgcctcagccttcgacttctccgagtggacccagcaggctggcggatcggtttcggactgcgccaccgcgtacgacgattgctgtgcgagtgtatcggcggccttcacattaggccttttgcaacagttcggctgcgagcacatcgccgagttccttacctatgcgaagggggactgggagattagtgcgcagaacatttcgcccgctcttcgcgcatggcgaaaacagttctggcagaaagatggccggtccgctgccaaagcgcaccttctggagcaactggcgaaggcggaggcggcagatcggggcgaaggagagggcgcggcaggcgaagaggttggaggcgatgcccaggttcacccagaggtgtgaggccctccgccctttccttagatatttgtagttttccaccctcttttgcgtttgcctggagaggcgaatgatgtacattcggcaggctaccgccaaaccttaaaaaaggctttttttgtacatttggaatgtatgacacaatcttaactactttttgatgatcaaagtctttggcatattattatttcgctcatctcacattatgccatacctcccccttcttctgcctattcttactatgttagctgtgttttgcttttactgcactatccatcagggggttcgccgaaagtcgtgcatccggcccccttccgggagctggcgaagtcaaaacgagaaatttgtggcaatgaagggtctgccgaaggtgcgatgtccatttcggcctatttatcgcgaaatggagataaacggtcgcagctataaggttttcaaggttgccgactggctgcgggcgcaccccgggcgaaccttagaagattacattcttgttcattcaagacgtctggaggatatggctcgcttttggcgaatccatcagaagactaaacgtcaggaaacgatctttcagcgtcgttacagtttagtctgtttttcgccccctactcctcttaaggttgtgtatgatattagtagtgatgacgaacctagttcgcctgatcatgccttagggagggatagtgattatggggacaaagatgtaatttacttgtaaggtgaattgtatcgtgttgtgaattgtatcattttcgatctgtagcgttctatgtcgagagaaacacttttgcttttatgctgatcgaacgtaacgtcgttcggctatttattttccgagacaagctgttgcggtttcaacgttcagcgagcgatgcttcggccgattcgtttcgcccccctggcctttttcgctgatcaggcgtttgccttggggtttttccacaaattatcaatcacacgagaaataaaaagaaggcggaggacacagagattttatactggttcgggcctccatggtggataatagccctacatccagttttttttttctttttcctctctttcttctttttttttcttgccgaaaggctttcatagtgctgaagggcttacatagtgccgaagggcttacatgacagtatgtacatttttacaagttggcaatttgggtgccacccattctaggcatagaagcgcttgagagagacggtgttccaggaatggtcgaactcctcgccttcgagtgtcgctaggcgaaaagatcccgtcctggacttgtgtttgatgaggtacggtccttcccactttgattcaagcttaccaatcactagtgggttcgccttcttccttagaacaagatgaccaggcatcagctccgcgagttgaacttttttgttgtaagttgccgaagtgcttgtggcgtatttgtgcatgtgctcgagcgcttcgactcttactccttccaagagttcgagcgatactccgcgtccctcttcgcccccagagaacatcacccttggtgagttagcccctagctctgctggggtcattgcctcatcaccataaagaagcataaacgggctaaacttggttggtcttgtgggggtcgtccgaagggcccagagaaccaatagcaattcctctggccatttgactttcgctgccccctcgagacttttctttagtgcttctaggatcttgccatttgtatgttcggccgccccatttgactgcgggtgtgcgaccgacgcgaactgatttccaggttaagcccttcgcacatttctttgaacttatcagagtcaaactacttgccgttgtcagtaatgaactcttttggcaccccgaaacggcaaacaatgtttttccatacaaacttctgtactgctgccgaagtgattgccccaaggggttcggcttcaatccatcaagagaaatattccacagctacaattgcgaatttatacccgtttcgcgaaaccgggaacggcccaatgatgtcctgtccccatctggcaaagggccatattggcgcaatgggctgcaaatcatactggggcgtggcttggcttcggccatgacgctggcaactttcgcacttcttgatttgctcaacacagactttcaacatagtgggccaataaactccttgtctaaatactttggaggccactgttcttgcagcctggtgcacgccacatagcccctggtgtatctccttttccatttcttcgccttcggcaaaagagatgcaacgaagtaagggttaaagtaccccggagcagtaaagctaacccgagaccatcttatacttcgtggctctgagttgcaaacgcttcgcttctacttcgtctaccggaagccagccagtttgaaggtgtttcacaaatggggctcgccagtcatatgggtcttcgcccagtttctcctggtcgattgccatgacttccgagctgtccatgggcacacttggagcatgtaggacttcgaaaaagatgccaggcgaatatgggccaccacaagcaacggatttcgccaaggcgtctacttcctcgttctggtctctaggcaagtgttcgaccgttatgccggtgaagcatttttcatggatcgaatagcctccagatacctctttattccctcttcttttgcctcgaagaatttttcaacatggcctgctaccaacttggagtcagttcgaattagcaggcgccggactccctttcttaggcccaggagaacggcttcgtattctgctgcattgttggttgtgtcgaactgcagtcttgctgcgtaccgcattggcacaccatttggtgaaaataggactgccgcaatgcctgctcccctgtgcgaccacgagccgtcagagcacatcacccagaattgttcggcgggctcggggtcgggggcaagtaccggtgtccattcagctacgaagtcggctagcgcttgagacttgatagcagagcgtgcaacaaaatgtaagtcgaacggggatagctctgcagcccacttgctgagccggccagtgacttccttgcctcggagtatttcgcacaaggggtactgtgatggcattatgactttgtgggcctagaagtagtgcttaagcttgcgcgaagccatcactagggcgtaagcgagcttttccatttcaatgtaccttgtcttcactccttgcagtgcttcggagacgaagtagaccgatttttgtctgaactctgtttcttggacgagggcagcactgactgccaccggcaaagctgctaagtataatagcagttcgcttcctgggggtgggcttatcagagctggcgggctttgcaagtattgctttagctcgtcgaatgctgcttggcactctggtgtccaattaaactttcctgcgccccggagggtcttgaagaagggcaaacctctttcggctgcctttgagaggaatcgactgagtgccgcaattcggcctgcaagcttttgtacttcatgtacgcttgacggaggcttcatttgctggatggcatcgattttctcgggattcgcctcgatgcctctttcggaaacaaggaaacccaacaacttgcctgcgcggacgctgaaaacgcacttctccagattcagccttatgcctgctgtgcgcaagctgtcgaatgtctcctgcaggtcgatcgcatggtcgaaagccttgcggctttttacgactatgtcgtcgacgtaagcttccacattccgccccaactgcttgccaaggaccttgtacaccaacctggcgaaagttgctcctgcgttccttaagccaaaaggcatcctaaggtgacaaaatgtgccgaatggagtgatgaaggatgttttggggatgtcgagcgggttcatgtggatctggtggtaaccggaatatgcatccaggaaactgatgagctcgcatccagctattgaatccacgagctggtcgattcgcagcaaggggaagtcgtctttcggacacgctttgttcaggtctgtgaaatcgacacacatgcgccatttgccgtttgacttccgcaccagcactggattcgccaaccactccggatggttaatctcttggataacccccgccctgagcaatttttgtacttcggctttcgccgcttcttagcgatcggcagacatcttgcgcaacttttgttttcttggcttaatgtccggcttgactgctaggtgatgcatgatgagatccgccgggacaccccccacctcgtcagggctccaagcgaagatatcgatgttctttttgagcacctctaggatactctcaacttcttcttcgcccatgtcgccccctagtgatatgagctttgtggggttagcatcatcaatctgcacttttgttatcttgccatgaggggtaggctttggcgtgtgcttcggccgttcatgcggttcggtctcaatactgtgcactgctctgttgattatggctagatcgccttttgaaacagccgaaggatgaagccccttgactactatcacccctatcgggccggacatcttgagcttgagataattgtggtgggaaatagcttcgaacttgttcagggttgcacggccgaagatggcgttgtagttgtacgggatgtcgacgacgtcgaacagtatttgctcttcgcgtttgttctcccccgagccaaaggctatcagcaaaagtgcttggccgagaacttgaactgcttctccgtcgaaaccgtggagcgatgctggtgctggggtaagggcttgggtaggcaaccccatcttggcatatgcttcggcgaagataacatcggccgaactccctccgtcgaccaggattcgttggacttcggaaccagctatctcagctgagattaccaggggatcttgatgcgggaacataactccttctgcgtcttccggcccaaaagaaattaactagttcagatattgcggcgccacttcgcccgccgaagtgatgctgtggaccatacggttctgcatcttcttctgccgtttggacaactggcttggcgggtcggcccttgtaatcacttggattatccttcgttgtgcatcttggcgttgttcggctggaggtgtttactcctgaactgcttcgcggggtgcttccacagttgttccctgctgcggccttgggtcttgcgcgttgccacgttgcctaatgtttcggcattgctccgtggtgtgcgaagagctttcgtgaaaggcgcaatagaggtcttttcggaccttcttgcgggctggctgctgatggttgcttgcttgctgggcgtcgaactccttgcgaagggcttgcacttctttgacagccatcacagtcttgcccgcacggtctgttctgaactttctccaagtcatgggggcttggccttgccttggctgctgtccttggatcgccggctgagactggcgaacagagaggggaggtggttcggcaacttgaacttgtgcttgagcttgagcagcggcgacagaggctttgtcgtactcagcttgtatagcttgtcatcgcttggaatcctcctcgccccttgcgaacccgtcaatgatgcgaagtaggtgctcgagcgtctgtggctccttgttggcgatttttcttgtgagttcgccctcgagcagaccggccgaagcggcgtttataaccgacacctcagttatgtcttgaacttggcaccgggcttgcgagaagcgaggcatgtactcccttatcaactcccccggcctttggcgaatgccgagaaggtgttgctgcgtcttcggctcctcataggtgcctcgaaagttaaggacaaaaacatcgcgcaattgctcccatgagtaaatgctattggctggtaaattgaaataccaagaacgggcgatgccgtctagagcgagatgtattacctttgccttggtattttcgtcaccatgagccgcttcgatcactgactcgtagatggagaggaactccttcgggtcagtttcgcctgaatagcgcgggacgggtgggaacttgaactggggtgggattggacgagtcttgattcccccactcagcggttgccccttttctcctcccgccctgtttaccgcactttgcggcgggtacggtgtggcgaagggcaaaatcgcagcttgtgcgtgaggttgggccctggcattcgactgcccggctccaactggaggtacttgctgagccgccatggacaggtcaaaaattggctgcgaccacgtcgtggcagcttggattggtgcttggtttgttccgaagcctggagttggagcttgctgccgaacggttggtgcctgagcagcgttgacgaagtcggactgcggtccttgattccatggcgaaactcccaggcccggctgaatcggtggcaaccaattaggcgcaccttgacttgtattcccctccgggtgggccgatggggttgtacttgaaatgcagtggggttggttgagttgctgaaggaaagcttggagttgcgcctgcagagccgaagccccttccgccattgtttgtggtgcttggccaggtggttgatggtgtacttgggcagcgactggttgagcttgcagttgcacgtgaggggccggatgcactgctgcggccgattgctgcccggcgaagtacactggcacctgtgcagcttgtggcggaatgggctgggtcgtcacttgcggatggacttgaggtgggacaaaacctaccgaatactgaaggattggagccgacgtggccttggtccgccttgccgcctcgtatgcttgttgttgttcttgcatttggcgaagcatgtcttggagccgtgtcatcttctgtcgcatggcttccatgtcagcttcggcttgagtttcggggtcagggctgacttgggcctgcacaacggcgagcgcagttggggctgctgccggctgcgatggagcggcttggggcaccaccagtcggcttgttgaaaggatctccgccctggtctggagtgcccttgccgccacagccgcctttgccacgtcggccgcgttcggcacttgcacagaggttgcaggggccaaaggcggttgtgatggcgctggtcctcctccatcttcggccacgggcgccgaaggctctgctccgtcctcggcggccatgtccggtccggcgtcgctttccttccgcctggcaaccttctccttcacgaccctcttcggtggcattcgctctcagtggtttcactcggaggtccccacggtcggcgccagctgttgtcgaaatgacaactgcatacgtcgaaagatgtggttactcaacagtggttggaaggaaacgaagtgtgttgaatcttgaatttctttctttttctcccccccattacatggccctaggggactatttatagccccattacgagttcttactactagggtttaggttatacaggggaatttacataattacccttacgaaagggacatttacaggggtacataatgttataggggctcataggcctctgatgggccgtctggcgatcgccggccctatagcccctaggcttgatgggccggaaaggcttcttcggccctcgcgggggcgaactagccatggcgaagtcgtcttccttcggcagatagtcttcgccttgcatccttcgcctgagacgcctctggcctggcaaggcactcgtacgactcttcgcctcacgccgttcttgctccatagacttcgccacgggtttcggcagatttggtcgaagggcctcatgccattttattaggaaacttatgggcttgggcccttgatggcccagcacatatacatttattgggcccacatctaaattttccatatatgaaatacggctatataaggagaaggggagctacttattgtacacttggtcctatgggaatgaatgagaagagagcctcaccccatatcttgtttctccaacttatgtagatattatgcaaccctttttggactacgcgtgtagcacaggggttgcataatatgtatagaactagaaatattatgacctttcctagcagcagcagttgaatttattggcctagaaagtgccacgctcatattacctatggaacagttatgcactttatagaaacatctattgtataccccttgaactctctaaaagtatgatgatttgggccacactaccttttatcaacggattgtccatattcgtcttagatttataagaataaacattagaacttgtatgatcatagcacatatatgcatcattttcctaagagaaaatcccttgtatacccctcaaattttacctaatcccttctatacccctgaattttgcttacttccttgtatacccctaaaatttgattttgatctcttccatacccctcccgtcagttgaccgttagttgaccgtctattttccataaaaatgaccattttactcttggatgaacaaagaaattcatgagttacattattaaaaatataaaagcttctcgcatgagactattatagttatgagtttgttgttcgatgcattatttatcccaaaaaatattgttagataatgaaataaaaaatacatatttatttttttaaaaaaagtcataaaaatgaggagcattcatataaaaatagaactaccaatgttcacaacattcttttaatgaatgctcctgataaaaaaaaatccattgtcctattaaaatttcaaataaaaattttaatttattacatttattttattttcaaaatttatgtcaaaattttctgcactaattatttagtctctttagttttataaaatgcacatactgtacactcaaacaaaatttttaattgtttttcaagcttatatttgaacctaaagcatcaagggcaaaaaggacatttgcaaccaaatgtaacagtgaaatgatggaaaatgtaacggtaggggcatggaagggatcaaattgaaatttcaggggtatagaagggatcagataaatttcaggggtatgaaagagattgagtgagctttcaggggtacacaggaaatttactcttttcctaaatctcgaagatgatataaagtttgggagatgcagtgatggtgattatacggttagtcgtgaaatcaaagagggagctcatgggaatggggatacaaatgtatattcataacttgactccttagcgggttgaatccgattccatcatggatctgattgccaaggacacctcttcggtccccgcctcccccctccccccccaacctaggtcggtcgttcatgaggtgggctatgggagggcaacatgtgtctccatctcgctcgatctcccgatccctgtctacacaaatgtggaatgatacattagtatcatgtatccctggccatgttgtataaaatggttctcccaagtaaaggttaaaacggcaacagttttgaatgttcaggttacacaatgcctattctttatagaaataaatatttgtttccgaaccattacttttacatcgtacaaactacatttgtgatccacgaatctatctatctattatatgtacgaagtccattaaactttctataaatgctcctaagccaccacatggcatcctataaacgcttataagctgccacatggcattctaataaatcggtagacccactatttttaactactatattagatttcttttagaaaacaataaagccccataatcaatctctctcctttttccgttgggccatatggtacatacaatcctccagttctcctgccggtggccccgagagaaaaaaagccaagaaaaataatatgcacgtatgtatatatgtacacgtattcacggcaaaaaaaaggaaaataagatatttacgtacgtacatatgcacctatcatcaaaaacaagaacaaaagcaagcacagtatcgatgggaaaaaaaaaagaacatctacgtacatatgcacctaccatcaagaaaaacaagcatcaataaaacatagcacatctatgttatctataataacagaagaaaaatactacatcacatattaaagatattttcaaaagatcatttttaatacatttttatgcctttttgtcaccaaatagtgttaataaaaactgaacaccacattgatttacaaacatttcgatcaacttcatcctcctgtgaacccaataaacatatctcagagaaaacaaaggtccttcatctccacttcacctccccttcccctcacatacgtatatcactgtctgcttctccctctgtctcgaattggcaatattcattcctctccccattcctaatatttagtaatccaactaaaagagaaataattagtaattgtaattttcaaatgatgataatttttaagccacatgctacacatcttatgtctaatattaaaatttctctatttataattaaaaaaacaaattaacatatatatacctacatttttatatataagattagtcgatccatgttttctatatggcagtcaaatagcaaaaaaaaatatgataataaataacaacaaatattacatcattatatagatcattttataaatatgcatagataaactaaatcagtagaatccaaaaaatatataaattcaagtatgaaaaatatttttatcgatagagaacacttgcctttttgcatgttgtctgaattgctataaaatgctataaaataattcaacaacacatgttgcgccatcatatatcatatgtagatattcttctacaacttttaggtatgaacacaatttcatttatttttttgtccatgaaccattaaaaacaattgtcatatataagacacacacaaattataataaatttattcagactttggaaaccaaacattttcttgcgcaaacgagtgcatgggagagaaagagaagtacagagagagttagcagaccagtcttaacgagctaagaacaatgtatcaatattaagtgggacatggcacaacgagcgtatttttaaggcatggaacatatttactaggaattattcctacgagaggatcctatagcaaccaaataattttcatgctagaaatgaaaaaaaatgaaatattttttttggtcttgggaaaacagggattttctatggtctttgatacgatacaacataattatagcaactggataggtattataggctttatataataatctaaatgcacttgataaatgccaggtacaagctagctaaataaaaatttaaattacaaagtagtcgatctcaagtaaaaaaattcctaatattaaattattttttatggaaaaatatttaaatcatgtaaacaatcatagtgtaccacattttaaaaataatgatgcatgcacaattatataattttagttgttcgattgtgttcacgctaggttgcatgaagcctctcacaccacgcaaatagtgttcataaatagattgtgtgtcacaccacataatcatattggactctacaaacccatgtatatagtgtagtcttatgtcctatccaatccactaattattgaccaatgagaatatatatcggccttaccaacttatataaaatgtcattgaaagttccatgaaagttgaaaaaaaagtgtaatgctctgttactatttatcatatcacaaattttatacttaaaataagacttgtataaaataaaatataaaatacaaaaatatcaacagggagtaaatttaaccaattggagaaattttgcttcttacttcacacctaaattgaaacgactattgcaataaccatttcataataattgccttagataattagaacaattctaacaggttaaaaaaaatatctaagcaatgccaagaacaaaatttatgaagaaataatacttttgaagcatatggcatacaaatattatccagttaatataatgaatcttatgatgcaagcccgcgtatttgcgtgggctttctagttgctaggaacatgtatgattgtaccatcatcccagcttcgaatttcttggcttgctcatcacggatgtaactaaggtcacaagaggccactatatgatgaagacgaagagctccgaaatagttttacaggatgggagatatgggcttggaatacaacggtggcatgcattatttgtctagaactttgattttagtttcttggatgaattacacgtcacccgctctttctgtgcaaaatatgttttgcagatagagattttattggcgttatgtcctacagtgagatagtatgatccatgttctcttcaatgattttttatctactgccttattctttattttgttcagatataaagctagctccagctcataaaaccatgtccggcatgaagggaacactacactacactataagggctcttttgatttgtaggaaaagtgtaggaaatttgaaagattttaatcgtatggaaaaatttccgatgaaatcctttgaaacaaaggattgaatcctatactatcctttaaaattcctatgaaatgagtaatcctatagagattttagaggaaagttagcaagaggtccaacctcttgaaaaattcctttgagtctctctctcatccgattcctacatttttcctgtggtccaatcaaatagtcattcatgtgttttccaatcctctgttttacacctgcattcctgttagaatactgcgtttttcctattcctccgtttttacattcatgctattcaaaggggccctaaaagaagggtttatgatctgtaaagtggatatatagtccaatattacgcctataccttgttgttgctagccattaattcttcagatatgcctttcatcgccatgaacactacgctctgtttttgaatgaaaggttccctcatgattgcagagttgagagttgagaccttgagcacaatagtgcatagcagtccagcccaacacccccatttgctcaatgcatgttttcctggaaggtcgtctgcgatggcatataaagtagtatcatttttgtttcacacaaacattttcttcatatatacctcccaagcccaaatagtaatatgtaaccagaatcaggttcactgctccctggttggcagagtggcgattgaatctcgtccaactttctatgctggcaacgtacgttcaactgctttgaagtggaaggcattaggaaaatggtggaaacaaggtctgcaatcctaggttggagatatgtgcaggtcacataatagctccgagttgcgatggcatggaaaatccattgaaacaagtcgagtaaatcaaagtatgccgctgctatcttattctgcaatttaaaagacgaaaaggccttgaatcgatcgaaaccaacagattttgtgtactatgatactatctcgcatatataaccattggtagagccaaggcccggccagcatgggcaggtgtccatgctccgacgcatgcagccttgcattagagctaaatacggtgcttagccattagcatagctgcacatacaccattagattagcactaattattgtacttagccattagccagcagcccaagtttgcttttgtccatgataaaatgctatatgtatctgtgtttacttataatttgttatctatcgttaggtttgcctaggctaaaaaaatttttagatccgctactgtatataactacagaatggcgctaaaagtaaagagggacttaaatgtatttcctatcgttcccaatctattattgctttgatccatctagtttagcttagaacaaaagacatctgtaatggcagactaatgtttcatctaatggaagatgttcatctttatattgagagatttcgaaaggagtctttttggacagggaggtatcaggttgcaccatagagttctaggcaatctctgtagaacttcctcttgcaatatctggggaatggtgatcatgatatttttccagaaagtccttcatgaccatcgcccgtacgttatggctttaatttggtgcttgttgttagttttcagtagagcagaggagctctgcgctgcaaaattttggcaccgatactgttgtgatcatatgctcagagaacttgagaacttagtggtgtcctggtctaatgcagtacaaactctagtactctctccttctctaaatgtttgacgccgttgacttttttaaatatgtttgaccgttcgtcttattcaaaaacttttgtgaaatatgtcatactatatgtatacataaaagtatatttaacaataaatcaaatgataagaaaagaatcaaatgaacggtcaaacatctatctattatatactaaaagttaattaaacttcctataaacgctcctaaaccgccacatggcatgctacaaacgctcataggctgccacttggcattatcaaatctcaccgtcgattttcacttaaattggtggacccgttattttataccattggattatatctattattaaaaaatttcaactttctctgtatatgatttaagagctactactgttgtcatgtacgtacaggtttatacgatgtcttctcccgtacgtacttatgtgcacaaaaacaaaacaatagtttacgtactattcgctggaaagaaaagaaaaaaaccatgcgcatgtacataaaaaagatgacaaaaaaatacatcataaaaatcgatgatctttaaataaaatatgattttctaaaatatattacatcacaaatataaatatatatagttaaactaagatctataataataatataaaatatccaaccaatgttccttgaaccatcttccaaattatttttaaattatatatctaatttctgattccgttgttttcctttaattaaattataagttatattgtggtcttaaatatatcacgacacatggggctgatatataatagttagtttttgataatctattatatactaaaaggctattaagcatccttaaaacattctcaaaccgttatatggcattctacaaacactctcatctcaccatgtatcactctagaaaaattatagaaaaaacaaaacatctagctatcgattttcactaatatacggtgcacccgtattttctaccctcggatttccttaaagaaaaaaaaaagaaagacccacaccccaccgcttccatccattacgttacattaggtatatgtacgtagttacgtactccctctgtttcacaatgtaattcattctatcatttctcacattcatattgatgttaatgaatttagacatatatatttatctagattcattaacatcaatatgaatgtgaaaaatgctagaatgacttacattgtgaaacggaggaagtatcatatatccctgccctcaccctaatatataagggcaacatgccctcctattttcaagcattttcttaattaatattggaaaacatactttgtaataaattattttaaacaactatatcatctaaatagctattttttattcgtgcatgggacgagattatttacaataaaatttagaattcaatacctacattaaatatattttaaaagtaaaataaatgtatttctttgggtcatataatgctagagactacctattggtcactcgatatatattaagaaaaatcacatagatcagtgcacgatacatgcccgcgcattcgcgcgggctaccttcctagtttttaaaaaagtcaacggcgttaaatattttaggatggaggaagtatatatgtttgtcacagagaacttgacctgctatgcaggtggctagctatgggaagagccccagcatgaacagcattgttgtacttccgagacctatgtggtatgcacgatgcgttggaacttgacggccttatctcgattatacttatggttagcaaccaaaatttaaattttcaatcttcgagttgattttagagttttcctcatcatacagcctttgcttttagaacatatatatatatatatatatattttatttataaattattttttgtttacaaatatattgtttggattttcgtcgaagaagccgaacgatgaggctgttagtgcgataggcaaggttttttcttaacgaatatccatgcgtcaggcatgtcatggtgacatcaaagcagtttaatttatttttttttgtctaggaattaaagtacgacttaacatggccatctgaattctgaaaatatggtcctgttttgataccaccctataattttttatccagtcacattaaacgtttgagcacctacatgaagcattagatgtaggcaaaaaaaaataacacttgtacagattgcgactaatttgcgagattaatcttttaagcctaattgctccatgatttgacaatgttgtgctacagtaaatatttactaatgatggattaattagacttaataaattcgtctcactgattactgacagattctgtaattagttttttagtttgtgtccgaacacctcatgcgataccctatataataccagatgtgacagacccaaactttacacccctggatcgaaacaccccatatgtcgaggaaatgctaagattgcttcttagaagtgcagtttgtaatttatatctatttaaagtggttctggtgttacatatgaagatctgtcgtacgtctgtatctactcaatataacagctagtcccagctgcaagtatttgtaaagccataacctttcgatgtttacaaaggaaaacactatttttaccaggtgtaaagagtgcagatgcctacatgtacacagcttcgtgaaatccgacacctatgcatgcaattcgatgatccaacctacataatgttcagtccaatgagcttttggagctccggtttttggcttggaaggcgtcaggaaagggaagatcatagtaaagatgaacatcctcactgcatgcctatcagcatctcctattggaaggctggagacggtagtctacattgcaaatagaaggccaggttatgacgcttccaccaactggaacgtaacaatagtcaagaacaccatcattttatagactgatctgttaccagcttgtagtgaaacaagggccaaactcaaaaaacctaatatttgtttgaccgggctcaaaacctagttaatatttagtggttatagatgtgcaagcactattattaatttgtaatagttttgaaaataaatattgtaccttgtatatatattagtatgcacaggttggtatcacaaaagatttagatttgaggataattagttgtatattccattttaattgcctttagacttataatatgttcagttggtatccattgtaatgcatggatttctgatgctaggtatatattgaaaacattattcgaaaaatatgtagcttgtcattcaagcttttatttacactagggtggtagcccacgcatatgcgcgggcatgtgcgtgaaattttattgtgaatgtccatgtgtgggtggttttctataaaaaatattcttttgattcatcataaactaaaaatgaatttatttaacatgctttgtgtaaaatcaaaggtgtttttgattattattctgtaatgaacaattggcattggagattatcggttttgttatttggaatttattctcgaagtggttttgaagataattggatttcacaggtgatatacaggatactgctagatttgtgtccggtcagaccgggctctggtagccggtcagactgttggtatatgcgcggtcagaccggcgcagtccgcggtctgaccggccgacgctatgtcggtttcgatttcgggttgtttctttggatatccgtgattatttcatgattatgacttctagatggatactatacgtatgtaatactgttgtttgctactaatgagtcaagttggagatagcttcgtctcggaatatggtttcagagatcatacaggatacttaggctagagttgatgtacgtggttgatggagattccatattgcatacgatggaggtattgtgtacgtatgggatgcggagtcgaatttggaaggagtccaaatttggtacgattggttatataaagtttctttcttgtactagagggtttcctaaggtgtttaggactcttagtatgagtttggttcgtggctttaggcttcctacctcgggtataaatagagggggagcgtgaggcttcccggtatcgcttttgagagcaattgagttgagttttgagttagggtttcgagtttaatcgaaatttttgtaaggagtgttgttggtgcactttgtaaacacagagagaatcaataaagtcgtcatccactttaagagttcttcgatttgtgtttaccgggtttcggcggtctaaccggcgatataccggcggtcagaccggcggcacgcggcggtcagaccggcggcatacgggcggtccgaccggcggcggcggcaggcgacttcggcggttcgaccgatcgatctacatcggtcagaccgacattcatctagcggtcagaccggcaatacaacttcggtcagaccgcgatccgtcgaatttgagggtaacttttattccagctaaaagttttcggtttttgggtatactaaccattcaccccccctctggttggcttagttcttgtatttcgatcctacaagtggtatcagagccttgttttcttctttggatttttatcgatctagagtttttgccatggctactcctgctaggtttttaactaagcctcatgttttcgatggaacagatttttctcattggtgtagtgggatgcaatattatattatggctgaagattatgatatttggagaaaagtttcttatccttatgtgattcatgaagctattaatactgctgctaaaaaaactgcgtttgaacaaaattgcaaagctcgcaacattcttttgagtggtatttctcgttcggattatgatcgtgttgcgcattttcgaactgctcatgagatttggaatgctttgagtaactttcatcaaggaacaaataacatttaagaacttcgtcatgatattttcaaaaaggagtatattgaatttgagatgaaacctagagaagctttggatgactatcttcctaggtttaataaaattttgtgtgatcttagatctgttgattcttcttatgatactaattatccacaatctgagatttctcaacactttttaaatggccttgatatgtcaatttgggggatgaaagttacatctattcaggagtctgttaacatgtctactttgactttggattcactttacacaaaattgaaaacacatgagatgaacgttctttctcgtaaagttgattctaagtcgagtgctttgatttctttttcttcttctttggatgttgatgctctttcatcgaagccttcctttcttgctgtttttaatgccacatccgatgatcaactcaaacagattgaggaggaggatttggctttggttgttaacagaattgcttgagctatgaataatgccaggaacaggaaaagaggtggtccaaatcgttgctttgaatatggttgaattgatcatcttcattcgcattatcctaagcttggaagaggcaaaagagaagacaaagatggtgagaagaccaacaacaacaagccgaagggttcatgccaagggaggaagatgaaggagaatctcaggaaggcttttgaacaagccgaagggttcatcccaaatgatgtagatggtgagagtggagatgatgataagggaaagaacatctctggtgtttgcttcatggcgcgtggtgaatcggatatagagtatgaagatcatgaggtaagtgcttttgaggaagttactaatatcttaagtgcaaaaaataagaagtgtgagaagatgtatagaaaacaggaatttatcattgaatctcttaattctgaaattgctagattaaaatctcttattcctaatgatgatgattggaaaaattgtgaggttttaatgaatgagatttcaaaaattagagatgttaatgctgcacataatttgaaaaatagatcttctcttgcttgtagttttgctttgcacacacgcactttggatgagttgtttttaactaaaaagttgttgcaaaaatatcaaattgcttttcatgctagtttgatgtttaacatgatttctgctaaaaagttaaaacaacctcatgatgttttggattgctcaacatgtaatttgaataagatgaaactgaaagatgctttaggtcgtgttgagtacatggaagatgttgtgaaaaacaatgaagtgctttcttgccctaaatgtcataaaagcaaaggtgtcatggtagattgtgaaaattgtgctaatttggaaaaagaggtctcttatttgaaaaattctttgctaagattttctgatggtaaaaagaatctcaacatgattttagatcaatctaaggttagcacacataaccatggtttaggttttaatcctaatactcataattctatacatccacctgttgtgttaggtgctggtgctagagatggtgagattttggttaaacctgatactaactaaactgtgtttaaatctgctagtatcatgtctaccttgagtgcatcttcttcaaaatccaatattgtgcatgcaaaacctcctgttgttgcttgtgttgctaaatcttctagttctaccaatgtgtctaatcatcgtgaaatatatacttgttctttttgtggcaaagatggacatcttgtcggtttttgttttagattagctcataaacagaaaaaggagagagagattgcttttgcaaaatcaaagtggcaaaaattgggttttccctcgaggaaaccgatcagaccgcagtgggtcccgcggtcggaccggcgaccggtcagaccggctactgagcatcagtcagaccggcggtgcagcggcggtcagaccggaccccggtcagaccggccactgtacctcggtcagaccggcctcggaggaatttttctgaaaattctaatattgattttgcacgtggatatatgcctattggatcttctggtcatgtgtctcagtactggattcctaaatttttattatcatctaaccccagtactgaggcttcgacttctgcttgtgtgtaggctttggtggcaaggaaggagaacgtgtagatcgtggattccggttgttcgcggcacatgaccagtgataaaaattggttctcctctctcaagaaggcatccaagactgaatcgattatctttggtgatgcttctacaagtgccgttctcgctacaggtttggttaaggtaaatgaaaattttgaattgaagaatgtagctttggttgaggacttaaagtacaatttgctttcggtttcacaaattgttgatgaaaattttgaggttcactttaagaaaactggaagtaaagtttttgattcttgtggtgattctgtgttgaatatttctcgctatggaagagtgtttaaagctgattttgaaaatcctatttcacctgtgataacatgtttggttgctaagtttgataaagatgtgatgttttggtatcgtagacttggacatgttggttttgatcatctcacttggttaagtcatttggatcttgttcgtggtttgcctaagcttaagaaagatcttgatttggtttgta

SEQ ID NO: 7616 - DNA, 35397 bp, Oryza sativa
cgcggagtgtggaggagcgccggcgcgcagagtgaggagacctccggcgccgcggccgctccgccctaaccctcccaccgccgccggacctcacctgccgccatcgttgctgacatgttggatagagagagaagagatgagagagagaagaggaggggatagagagaagagagataggaaagctaacatgtgggccgaaggctatttttgacatttcacacgatttctctctccaattcaaccataaattattatattaatggttgcgatgtccaccagcaaatatcaaacttttgggagtgttttcccccaaaagtcaattcatgccatatcctgtagcaaatttgtcaaatatttaacggagtcgctaacagggctgatttaaagatcacagcagtgtcaaatttgacttagattgatttggagataacctccatcttgtgggagaatcacaaggtttacgtaacaaacttacgaatgatttacaactcaaagcgacaaaattgggagagctaaggtaaagtagaaaacatggctaaaaagtaaaaagtaaaggtaaaagaacttgattggagtgcaaactattcaattgggtatcaagaacaaaattgaccagttgaccaaggaagtaaacatgcaaactagctgatttggactcggtccgatgttcggaccggccccatatggaaggctcaaattctttccaaatatgaccaaactttgccatattttgttcttgatacccaattttattgttaacactaactttagcgcactaatctgaatagttttatttaaaatatagatgggggcagagaacaaagatgttcactcaataagaacaatcaaacacaacacatattgcatttatagttcaatcacataactgcgattgttattgtttacagtatgcgtgtgttgtaaagagacggtctaatctgttagacgttcacaccttgttattactaattttaatggtccatgactactttaagggtgtaatggggtcttggaggtatggtgttggaacaaattccaatagccccaacgagcatagcaggggctcccccatctatcagagagagccctagctttgtctccctgaggagaagatccgagaaggagagtccttgtataatggatggaatgggcgagatcctcctctcccttgcaagatggcaatgaggacccacgacccgatacccgatgggtttttaccctattaagagctaatcatgtcctaaatcttatacccatgggtctactaacgggtaaaaactcttacctattgggtccattctttacccacccgtacccactgttggtaattcttacgatcacaggaaaaatctgcaagcgcacggatataccgatgtagcacttcccccacggagtattccaagggtatcgaatcaaagggaacgtgtgtggtcagatcttcctccggttcatccaaggacaccaagcaaaggatatgacaggatggagaggatttactggtgagaaacagtgtctaggaaaagcttaagtttaatcctaacgcaatacttcaggcactggcaacccgctgtttccagatgtcgctctactacgtacccggacagcgagggcttaagtgatctcgatggctgtcaacatctctacacatatctcaaacgtactgtggaatacacaacaattattggataacaattacctaaacaccacgtctaagcaattaatatctactttagtttttataactcaccaaagcaatcactatattttagttgattatagtgaacaataatcctgtatgctatttacgaactaaccaagagataatcctcacaagataaatctaaattactcacgaagaatattatattgaaattagagtaataaacagaataaaagaaatgagagaagattaacgacaactccggaattcttccgacttcttctactctactctcttcctattatagtatataatatagtacagtaaaacatcttataattcagctcaagcttggaaatatgtgtgagtgaaggaatgaagctccttatatagaggtaggtatgacggttatccctatgtgaattgtctgaattgccccgcaaccgccatcaggagtgcattctggaccgtccctgccaaaccccaggatcaacggcgattagaggggttcggccgaacctgggctgggcccctctggcctggcttttggcccatctcctcccctggtctttttctatccatttctcagagttttgggctgattctctggtattttgatgaagtccacaacccatccctgtatggatacatattttctctcactttagtatgattttcctcccaactttggggttcattacctgcatacaaatatacaccaacatttgtggaatatgtgagattaaagttctatcactgtgttggatattttattatctgaactttatgcagatgttggcggtatagaatcggcatttaataaccgctaacacccaccgacccgtgggtgaaaaaaacccataagttgagcctaaaactatgagtaacacaagtctcaacgactactaaatcatagcataaaactcttttcacatcttaagcattgttctagtctagttatatgaaattattatttgatttattgattatgtagcgtggttctagaaatttttttactcgcctttgaatgctaatgttaacaacattgttgctagagaaaatattgatggtttacagttctaatatggctaattaaattacaaaattataaattctataagtcaattatatgggtaagagtactcgttggatacctattacccgcacaggtgtgggtatggggatgattttgcacccgcgatggatgtgggtatttaaatgggaatatttagccatcgcgggtgtgggtatggggtaagggaacccgatgggtatgcacccattgccatcttgcctttggagggctccttttattcatatgtagtaggaaattacagtattacccttaatcggttacattgaaagggtattgccttaggggtgtttttgtccattactatactagtttatacaacaccctagctatgagggtcttttccaacgatgcaccctaggcatggggttattccccaacatgtggggtgacacgggtcgtagtagggtcggtcaacccatcttgtcaaatgggtaggtccacccctgctcgaggaaacataattagagaccactcaaaaggattttccgttaggctcttcatcttatactgtcgtcatatactgtaatggttctgaactagctagcaatgcacgacatattccaacaatttttagcatgcaactttccaagtcttccgctttcagactctcaaactttagcaatacactaacagatttatcaaattctgaaagctttagaaacaggtttttttcttttactgtgatgattgttcattctacattgaattaagcatccgaggaaaataaacttatgaagataaatagagcaatgcgtaaatagacttgcgactagtctttgatatcagtcatcgctgctcaccccaagctattcaacttggactttcagttagattgtgtagttgatctcatcaacttccacatcaaagctttgttcatgatgaacatcgagattatcgatcgtcaacgtgcacattggtcctgagtagttcaagattgagttggattgaaccggttcaaagatctctagtcccttcttgagatccttcgatggtttagaggtcatgtctctttgtacccgatagccacttctctcctaatgcctcccatgccaacattgcagatatgtatgtattatgtaaacaaagtaagttcatgtttgggttaccattttgtatgtaagagatattaatagatgtgtggttcttcagatcaacatactaaaaagatgactgatatgcaactagctagaaataggtatatggctatatgccttgacagtaataaatgtgggatttcaatatttgtctagcatgtttatgttacagagattctagatgtttaagaatgagaggaaaaaataaaaaaaaggaagagaaggatggaggaggaaagagataggggactaggaagaaaaattgttgggggagctaggaagatatagtttcagcattttcttccagaacaaagaatacttgggttgtattatgtagcttgatagttaattacatctagttgggttggaaggaaggaccatgtttactgtgtaggtaactacacaagtgaacaggaaaaatgatatatacgagtataggctgatatggattaagtgtattcgtgaaaagggatgtagcctagtggttgcagtgaccttgagtagcagacaaggttctgagtccaaatgttgcagtatagtaattgtagtgcagtcaaattttttgtttaaaaaggcagcagtcaaaatttttgtttaaaaacctgcatatatccagttggatatagaggctaattatagtgcagtcaaaattatcgagcagggcactttctgttccaccctaaggctgtgttcgggagtaagggttgggctccctagcacgcaaaacggagcagcatttaacgcgtgactaattaagtattagtttttttacaaaaatagatcaatatgattttttaaacaactttcgtatagaaactttttttaaaaaaaacacatcgtttagtagtttgaaaagggctatgtggagaacgagggagaggggttggaaacttcctataccgaacgcagcctttcgttacctcctgttcccaacttctctccctcgttttccacgtgcacacttttcaaactgctaaacggtgcgttttttgtaaaaaaaaattctatacgaaagttgcttaaaaaattatattaatctatttttaaaaaaattagcaaatacttaattaatcacccgctataaaaaaattctatacgaaagttgcttaaaaaatcatattaatccatttttgaaaaaattctagcaaatacttaaaatcactcgctaatcgctgctccgttttccgtgctaggtagtgagagttcccacccctcactcccgaaagcagcctaattgtgtaaagtaatcgttcttaacaaaccagaactgtgcaacacactgcaacatttttatctgatttatcgaagtatcttccacttaatttgcagactaaaaaaataatgcaataaaaattatattatctgatttatcattattggaaacttttacaaatagatgatgtgtttatctggtacttgtgagtgcatgagacaatgagttatagtatcttcaaaggaccgtaaaaatgtggcacaatcactgccaagtgccaacaatctttctagatgccggacaagtgcagaatatatgcagcgtcattccaaccctcaaattttgatactgttatactactcccactactggaaaaagaatttttcccgatgtgcggtctttttttcatagacagacataacccttggagtcaaatgaccgcctacaaaaatataaattggggtgaagttcgttgaccacttaagcggcgcttgcgaaaataattttcgcaggcagacaatatattttcacaggcgcaccttatgtgatccgcctgcaaaaatcgtacctacccaaaaaaaataaaaaaaactttaatacttatctactcctccaacccctccccaccactcatttccccacacttatcttctcaactctctctctccctccctccactggattctcagctccccatcccctcccctcccttcccctctctccctccaccggcggcggcggcggtggcagcgcgtgcggacgaggcggcggcgacgacggagcgcgcggacgcggtggcggcagagcgcgcggacgcggcggcgacccggtgtggcggcggcggctccctggcctcccctcccagatccggctagagggtgaccgggggagggcggcggcgacgtgggcggctcctctcccctcccagatccggccggagggaggccgggggagggcggtggcggctcccagagcggcggcagcgatatgggcggctcccctcccctcccctcccagatccgaccggaggccgggggagggcggtggcggcgactcccggtgcggcggcgaggcaattttttttattttttcattggattttcgcgggcgggccattgccccgcctgcgaaaatggatgattttcaccgtcgttggtctgcaggcggttctcccctctacttgcaaaaattgcttttggcagcccgcgaaaatgctttttcagtagtgtccttcaacagacttgatgcgatcttctatacaatgattctactgcgcttcagtacatatcttcagcaaatgtacgcaatgcttgcttcgcacttgggccgatgcattatttatactagtttcatgcccgcgtgttgctgcaggattttgtggtaatgataaacaactttataaatatgtgcttataaacataattgaagaattgaacattctaaaattataaagcgtaaagttggcatgtgagtagtagatggacaagggacacagcagtggcttaatatgggggatgcatgcatgaccggagcacttaagtgggtcatccattgatgtgtttaattacccatgacagtttgcttacttaaagcctgcatggctgttcactatgctagatcctcacacctttgatgacatacctaggacgggcatatataagtgctggtcagtgatgagggtcacctttaacgagttctacgggatgccgtcatcggtgagccatccggctatggcccgttacaggtatctagtcactagtgacgggccatatagatccagcccgtcaaagatgttatgaaaccatctttaacgggtccgagaccacccaacccaatccttatctatcacccaccgacagtctgagaccactcatctctcgtttttttctttcttccttatccatccctctctctctcttttctttctttcttcctcctccgcacgcaccgagcttgcatgctccaagcaccgggtctggcggcggcctctgactccacgcgctaatagcggccacggccggccgcttcctcctccgcctcccgaccgccggccggcactgcctaccccgaccgcctcccgaccgccggccggcactgcatacccggccgcctttcgaccgccggccaccggatctggcttacgaggcgcggatccggccaccgcgggctctccccccaccgccagccacttcctcctctgtctcccgaccgccggccggcgctgcctcccccgcttccgaccgccagccgccggatctggcctatagggcgcagatctggccaccgcggcttctccctccacccccggccgcttcctcctacgcctcccgatcgcaggccggcgccgcctcccccccgccttgcggccgccggccgccggatctggcctacagggcgcgaatttggccaccgcggcctctgccccaaccgccggccacttcctcctccgcgtcctgaccgccggccgcagccacctcccccgcctaacgaccgatggcctcgacacgtttgggggacacagatccggcgcctctcccccgaccgccagtcgcctcctcctccgccaccccacctccacctgctagatccgacggcagcctcctccaccgcaccaccaaccgttggatccggcggcctctaccaccgaccgccggtgtcgtccaccgtctccttcacccgctagctccgccaccatttccaactcttgtaggttgagcaaattttcgttgccaaatttcagattgggttatactcatggttgcttgtgtggatttgtagtttattactaaatgttgtctggatttgtgatatatattacttgtgtggatgtgcttcatgtgtcaacatatctatcaataaaatgcaaagttattgtgtcatgagatcttgagatgttcttcatgtcatgagatatggcctgagggctgagagctgagagctagaggctgagggcttttgaattgtttttttggttgattttccacacctatgacggctggtaagttgaacctatcagaggtgtttgtcacctttgacgggctgaaaagatccactcgtcacaggtgagacagtctcacctgtgacgggttattttattcggtacatcagaggttccaatcatcattgacaagctttcacccgtttgagatgaggtgtagtcatcagtgaccactaatctgtgaccaaaaccaaatccgtcaaagctgagggttagagcccgtcacagatgacgggatctggcctagtggttgaaggaacaaatgcatgccagttaaacaaagaaagatgcacttgatctgacggctattggttattgatgacatggcttaacctagaggcttctttatagtgttaatgcttgtagtgggtaccaactatataggaagaatggatacacgggcgtgagaagttgtcatttggtttgtgcttctattttccttgttcttacccatacccgttatggcatggtcaaacatctccgatgacagggcattatggatccctggttcactgtgcctccccttcctagctagctgatgttctgatatgtacccttgttgtatgacgcgtccgtattgggacacggtctacaccaaagtgaagttgtatgcatctgccatgtaagttgtgagctgtctgtgcatggaccactaggagagatatgatttttaataccggttctcaacccctattaattctggttgtagcaattgagagaagaaaaccgagacaaacaagaaaatggagactaaagttgttgatttttagtaccggttgaaagaaccttttcaaccgatactaagatatatactaagtcaaaaaaatatgtaggatgtgggattccaactcacgatctcttatcattgcccttaagagcattaccatcgcacatactacacacatctgagttctctagtagtggacccttaagtaaggggtcattgtaacagtcctaattcatttaaagcccctgcagtagtggtgtggttttggcccaagtgaccgaggagtagatcgattagtcacatacttttgctagtttcatcagtcgtgtgggcatgaattctagcaaacattatcatcctgatcttttggcttatgcttatacttataagccaaaattttaatttttaaccttaaatttagagttgattttagggcttttttatcgtagtttatttgttagcctttgctttaaataactaataacatgtagataaaagtttcatttataaatcactttccgttgcaaatttgccgttttgcttattctgtcgataagcaaaacgatggagtcctaccaatatgtatatggtaacacacattccaaacaaatttctatgcatattgaggtttccgaggaaatgtttctaatttatcaaatgctaccagcctgcgagctttagatatcagactacgaaaatacgatgttttctatggttctttgggtgtgaaagtgatattatgtttgatgaaatgtagaaatgatgtaattaatggcattgctaataatcatgctaactaaaataatcgatatgcatagttcttgcacaacacaatatcatcaacacaagtacattgtacgaccctgtgccacagtattctcaaagccttctctatccgtcggtgccgatgcatgaccattttggccccatcgccttgtatttcctaggtccgcccagtcctagatcctattttttgtggcatgcatctagagcacatgtttattgatcttagttttgaaaaccgtagtactcattcttcatcattgtaccactcttgctcgactcttgggacaatgatttatatagctgaaaagtttagtccggctttatatttttgtgcaaatgaaaatcgatatcaatgtcatcacatgttaccttttaaagtgctcaattttgtatattacttgtagagttacttatatggacctttcattcaacagtgttttcgattaatataaagcatgacttattggtggctgactgctacttagttatctctataaattactagtgctttgagatttgtaaaactatacttggagaatatgagagcatcattaaagtcaataaagggccagccaagatatgtgtaaacatcgggtaaggattctctaacataatatcattatcattacagtcactagtatatatgtgaatctcaccctttgtggtgtgtgtagtttttacctttcctacacttttcgtatcaattcctccctctttccactttcaacattttgggagttttatcatataattgaattaaattgtcttagcattttgcatttgctctcttttgggacctaaaatccccgggctatcctactaaacatatattcccaccatacggaaaaccaactcaatcttcaatcaaaatgacccatcagatttgttaaggtggtcacgttagaactcactttttagtttcagtattttcttcagaataacatcctttattaatcttggtttaggaaaccgcactactgctttggcattcttcaccagtgaaaaaactattgctcaattattgggagttgggacaatgctttatatagctgaaaagtttagttttgtgccatttttctccaaacaaaaattaatattaatatcatcacctttctatgctttaaagagctcaattttgtatattgtttaaagacttgcttctatggtcctttaatttaaccatgctttggattaaattaaaacatgatttaggagtgactgagtgctacccttttctttagataatggaaataggttacatctctagcctctgcccgtaggcacacaacaaaaaagtctagaagtgaacagaaaagagctcaaaaaaggcgagatgggacaaacccccaatttcagccgattatatgatctacaaaaataatgttttttaaaatcacgtagattcaaacaaaattctgtaggtactacaccatccaaacaggaataaaagttccttggctaccaattccaagcgtgtagcaccattgcgcatagtatcctgttgttcctgtaaaagcatcatacaccaagaggtggagccaattggaatacatgaagataacctgcatgatgttagcctttttttatgtttaaaaactatatcattacggcaacaccaaattgactaacatagagcactagctccaaataaaatcatttttttgtgggtctaggcactccccttagccagttgccaaaaatatcttttgcattgtggggagggggggtattgaaggcaaagaagacacatcgccaagcaaaacatgcaacattacagtcaaagaaaatatgttggatggtctcttgtgtattacaaaaacaacattgcttgtttcccctccattttctctttatgaggttatctttcgtcaagattacttttttgtgaagaaaccacataaaaacattgatttttagtggtacctttaccgcccataagatcgtcttgcggatccttacattaaaattgatgatcgcattaaacatggatttgaccgaaaaatagccatttttatgtagcgaccaaacaaagcaaaccttttcatttgacagggttatgttagctagtcgagaaatcaaatcattccactcaactaactttggtcctacaattgatcgtcggaatgaaacattcaacggtattgtgctcgtaacctctgccaaagtagaatgtctctttcgaaccacaatgtatagagaaggatattaatatttgacagattgcaagcccaaccatgtgtcttcccaaaatcttatgtccatcccattaccaagtttaaaagatccattttgaaaaaaatgatcttttactttcattaggccagcccaaaattgagatgttcctggtttgtgtgacatgtgggagaggggtttaccctttaagtacttgttgcgtaaaagatttttccataggccatcaccattaacaagcttgaatagccatttgctcaagaaaaatctattcatgatatcaagatttagtacacccagtccaccttgatcttttggtcggcatatataatcccattttgttaacctatatttcttttcctgcctatcactgctccagaaaaagctcgatcggtagtaatctagtctttgaagtacacctcaaggtatttcaaaaaaggataacataaacatgggaaggcttgaaagaactgagttaagaagaaccaatctccaaccataggagttatttttgcctatccatgtgctaagttttctttgaaacctatcctccacacatttccaatcagaatttctgagttttcgatagtgtatgggaattcctaagtatctgaatggaaaggaaccataattacaaccaaacagttgtctatattggtcctccatttccttagctccctcaaaacagaaaatttcgcttttatgaaagttgattttcagccccgagagatgttcaaacacacaaagaatggccttcatgttttttgcttgttaaaaatcatgttcaagaaatattattgtatcgtcggcatattggagaatggacaaaccatcatccactaagtgtggaattacccctctaatttggccatcggctttggctctttcaataagaatggctaacatatcagccactatgttaaaaagaaatggggacattggatccccttgtctcaagcctttgcatgttcggaaattttttcctacattatcattgactctgacacttacagttcctccttcaacctagttagaaatccaattgcaccacgattgtgagaaccctttcattcgtaatgtctgctgaaggaactgccatttaactttgtcataagcctttatgaagtcaattttgaatatgataccatcgatcttctttgtgtgtaactcatggacagtctcatgcaaaatcaccaccccttccatgatatttatatctggcaaaaacctcgtttgggttgggcgaattactttgtgagcaaccgttgtaatcctattggtgccaacttttgtacaaattttaaagctgacattcagtaggcaaataggcctatattgttgaatttgttttgcatcagccttttttggcagtagcacgatgatcccaaagtttaggcaataaaggggtaatgtccctttatgaaattctctgaatagagccatgagatcattcttaacgatctcccaaaagacctgataaaactctacaggaaagccatttggacctggggaggagttatgatccatttgaaaaattgcctctttgacttccttttatgaaaattcagcagtaaggatgttattttccaagtcagacacttgacgaatatcaccagtccatccctctgtcatggatacatgattatgatctggaggaccaaataaacctttataataattggttatatattctttgagattcccatcacccgttattatagtgtcctcttgttccaaccgactgctacttaagtacttatatcctaaaaatatagatgctttaatatggtatgatggacttccattcttttttacggaaaatggattaaaaatcccggcctctacatccatgattgacttccatgctttttcaatttcgattatgaggtaactagtaagaatgtctgatacttggacacataacctaactagaatctgataaaaaaaatgagttgtgcaagggagaaaggaaagaatatggagaatcacagcatggcataaccttaattaaatcagaacgtcgggaccttgctagagagtgatcaaatcaggatcttgctgtcttgtatgttgcgattattctattgtttataatgttaatcttttgattggttttattcttctcttcagtacttgttaacttagggatattttccccagtaaactaacaataaaataacacttaacgtaccagaattatcctattttagtatatatatatatttggatgaccaggatgtacaagcattaattaagacaagataaatcacatgagtagtcaagacagaaatttcacctgagtaatattgttattctatatgattcctctatgtgtgcaatactgttgtgtgctactgttgagtcaaattgggatgttggggtagaacttatgctcgaatatgatttgttgtttcattcatgtgtaggtgtgtcttgatgcatcgggagagagttgccagtgatggatcgggcgtcaactgagaagaagatatcatctaaacggtcaaagatatcatgtgggataattagattaaagaacaatgcatatgtgtcatggttatggataaggcatatcttctacctcacaacttacggaatatatggatacaacatacctctgtatgtacgatatgtttccgtatatgataagaaaatctacaagagattataaaaataatcctcgcaggcaagtgaataacagagtcccactcggtgaggattaggattgtactatatcgtgttgggttcggtatttacgagttctacttggagataaaggtaattcacggtataaatagcgccaacatcaccaccatagcctacaatccggaggacgtgaagtctactcgctaggagatctcgtcaaaaccatctcgacaaggatctcgctggtaatctcgggatcgccggtcttctattgtaatatgtggtttttccgtatcaatctcatataaactggattagggctattaccttatgatgggcctaaatcaatataatccttgccttcctatgtgcttgatattctatcgtgtagatcatcgtaccaacgtaccccaatatcctattcatccggtctacgggtactccccgtcgacaatatggttgatggagattccatgcttcatacgatgggagattgtgtgcatatgacatgagtcatgaaggagtccaaattttggaatactgaattttgaattgggaagagataagatagtttcttgtacgggaaggcttcctagtggactagaacttcttcaacaagttagatacatagttctagagatacatagttctagactgcttacttatctcggttacaaattgagggggttggggttgcactttctaaacacagatagaaacaataaagttaaatctacttttacaaaattattttacttttatttctattttttaccttattttatcctatttctgtttggtcctatgtacacaattaacctgagaagacaacaatgcaaatgttgcagaaacggctccggatgaccaggcctagagctgactggactatacaggccagcatgcatggtgtcaccagtgcacatgccaatgggggttgctagcgcgcgtgcgcgcgccaggaaaggagctggcgcagcgtccctacgtatttcttttgttaccttttttttcaatctcctattttggtgcatttcctttttttctctttttttttctcaatctcctattttgacgccaccgtttccttttttttgttttcttttcagatatttttaattgttagcatgcatatttttgaatgttttgaattttgttatgaaaattttcaaatttaagtaaaaaaatttgaaatttagggtgaaagtttataaatttgagttaaaagttttcgaacctgagttaagttttctaatcttgacttgaatttttaaaaatgtaagttgaaagttccaaatcttcagttgaaagttttcaaatccgagttgtaagtttttaaattcaagttgaaagttttcaaattcgagttgaaagtttttaaatccgtcctgaaaattttcaaatccgagttgaaagtttctaaatcttgaattgaaagcttttaaatccaagttgaaagttttcaaaaccgagttaaaagtttttaaatccgacttgaaattttttaaatccgagttaaaagtttttaaatatgagtttaaaatttcaaaaaatcttgagttgaaagttttaaatcttgacttctatacgcgtgcagtagtcaacagaaaaaaaaagaaacgcgacacttgcaagaaaaagaaaaaaaagaacacacgtgagagcgcgtgcgctcggaagatgggccgtgtgggccggcgcgtgcgcgccaattagcttttctgcatgccaatagccttttctttcttttgtttttctttcacggtgaaacgtctagactaatccagagagcaaagccatagcacattccctaaatcattaacaaactaatccagagttgccatgtggaccaatgaaacgctggcaaaatggccggctttggattgatacatagattaatacatgaaccaatgaattatacacatctgcaccaaatatatgtgtatagctgatatccaaggttttgggtgatacgacataatattgatgatcaaggagtaaacattattatgatctcagattgtacaagacacttcatccctctctatagaacatcgcccacactttcctcatgcttcccaaatcccaagccaaaattatttgtctcttcgactaagaaacagtgagaggtgggtgggtggggggtgggggggggttctgattgagctgtttttagtatgtagccgcatcagagatgacctaagcgagaattaagacagagcaagaatgcaaactaaagttgtaattggtgatactatgtttgttttattagtgtgttattactgtctttttcttactgatagttaggattgggttcgaagatagacagtcctagaagctagcagatggaagggcaaagaggaaagggcgaggctggagagaattgaagaccataagagacgcggtacacgtgagtgaaagggatcggttgttttggccatggattgtttacatcttatagctagctacaccatctatttatgcatggccttaagatgtatccataagagatagatactcctcctaaccatggttaatcatggtcttttcttgtaaaaataaaatcattgtgtctaccgatatggtgttaccatgcattcttagtttgtgtagaggatggaagttaaatatacttttatttttaaaaggaaaagataacatctaacaattaagatcgataaccctaagtataagcattaaaaaaactaaaccaatcgttcatgatattaacatcagtcaaaagtatactaatttcagcatacttattttcctgacacaaaaacagagttaattttcaatggtgcatgtgtaatttaaattcagtatgtgactgtacagtgtatgttggtcaattatccattacgttcctgatggctaaagtgcaaccgatggtgtgaacatgaagagaacaatattacagttaatacgagagctgtgctccaatattcataagctgataacagtgaattttctggaaacccaagtgtttcaagtggagcagaatgacctgatatcctttgtgtttttgttcgatgatcacgactgccaagcatctagctatctcccaatgtcgcccaatccaaaattttcatggtaccatagtgcgcagcaacggggaattcagaggtagtgcacataaactgcaaaactcagatgaattttacctttcgatatttggatgcatggcagtcaggaacaaacatatatgaaacattttgatctcactggaggctgacactagtcattgctgataaaggtgctccaagcgtggtacataaatagtagtggtgtaggaggatacaaaaggaaaaccttacatcgagatggatggaaatgtcagtcactatgctggactaggtcatctctgacgggcccaaacccttacctttgatgggtttggtcttggtcagtgattagtggtcactgatgacaaaattacctgtgacgggtgaaacacccgtcacagataacccatctctgactggtatataagtcatctctgacgggttaaaacttgtcacccgtcacagatgagttatcagtgacgtgtcgtaactacctggccgtcactgatgactcatctctgacgggttgtaacttacgacccgtcactgatgacaaagcaagaaatacaatttttgaattttaaacgcaatgaaaaaacgtcaaaaaaatattttgaattttactagccatcctatacatcgttacacatcactacctacaaattcacaatttttcacgcaatatagcctgcatgctacatatgagatttgaactccagacctcaaccttccataaattcacaatttttcatgcaatatagcctgcatgctacatgtgagatttgaactccagacctcaacctccataaagagctcccttaccaactcacctactcagcacatattgactactcacccaatgttattattttgtctatgcttgtctgaatcatttaaatatatttaacaccctaaatgacttcaaatgaaaatattatcaactaaatagttatagatctcatcgtgttttataacttttacatagaaaatatcttcatccgatgtgtttgaactttgaagaattcaaaatttcatttttcaaaatatatctcactttataacctgtattttgaacatgtaaactttgtgaaatgaaaatattttcaattataatgttgtaaatctggttgagttctatgactttgatatggggcatgtatccatccatgtccatttgaaaaaaaactcaaaattttgtttttaaaagtagatctgatcacttgtaatgcatgttcggggatgtaaacgatctctaatagaaatgttgttagttataaagttgtggatatcatcgagagctacaacttttatatatgacatatctcaatctgaggttttttgcaaaatttaaaattttgaattttcactcatcactgacgggtcataactacaacccgtcagagataacaatatctgtgacgtgtgttagttaaagacccgtcagagatgagtggtctcttttgtgatggttcataatactacacccgtcacagataacatgtcatctatgacgagccatggttgtgacccgtcacagatcgtcacagacgatctgtgacgggttccaagtgcaagccgtcacagatgacctcacatctatgacgggtcctccctggtagccatatattgaagaggatattttttcggcccgttagagatgactcatctttgacgagatgcgttgtcccgtcacagatgacctgccactgaagcccggatctgtagtagtgagttgtggtcacggtgacaggtaatccataattgattgtccattaattagcttatcaggctgggttgcaagcttttcagtcagattttgaagacaaattaaatttaaaactgaaatatacagtttatgacaattttagaagttttgatgaaaggatgtaatgtaaatcgtaaagttcaacaatacaatgtctgccaaagcccattttgttaagaggagaaaaacctccggagccatcgttccacttattcgcggcatatttgcaaacgaaaagtaatttgtgaaaaaaatatttatatatgtgtttttagcgatctaaaagtaaaggctgaaaaataaatttcgatgtaaaaacctcaaaatcgtgaggaggggaaaactaagagaagattgagagagaagtaaaacaagttgagtcattagtacatgatcaattgagtattaattatgttaaatttgataaatggattaatatgttttttaaaacaattatcgtttagaattttttgttgcaaaaacacaccgtctaaaagttcagaaagcatgcgcataaaaacaagagaaactttttacgtgggtttgtaactattaagttacaggactctcaaccaattaatactagttaatcaaagagcaattctacggtccttgataaggtgccaaaaatttagtgtaaaatttggtaccatataggacctatataacacgaggtatcaaatttacattaaaaaagttgtacctcgtgttacctacttaaggaccataaaattgctattaatcaaattataacaatactttgctgaaagtagtagtttagccattctacagagctgcttggtacaaatcacatgatctatacatgacccaggaaaaaacaactccacaaacttgttaaagcaccaactgaagaaagttagattttttttaagcatctgtagaaagttagattcaaactccactactccactcatcctttatcatcgatatcctaatgatatgctgacaatgtaggaagctcttggccatggttagaacttagtgttgcctttcagccgtcttctcaccagcattcactagtttccatacagcgtcttaagggtttgccgtaacttcttaacaccagggttagatttgatcttggcacaggaccacctatgctttcctaatgcctcatatgcccagagagaggatacattcagcctcctcccatcgtctctaataaaaaactgcatttttagctagtcaaagacagattaaggatgttaaaacactgctatgctcttcattactgtccaaggagaggatacatattcggcctcctgccattgtgatataagatgtagacagagctaaggagcagtactgctggaggagatgaatgatataaagactgagaggtggaaactccaaacattcatgaatgatatgcgatacattaatcaatgtagcaataggtcacctcgtcatcttttaatttgctgctccacttcttgttattggaaaattctgagatggcgattctgctttgagactgcttttggctcaacagttaacagtattagctcgaataaaaagatctgcaacttttaacagtaggagtcaacctaatactacaaagtgaacagtgaagtagggatgatggtatgtgatcactatattttgtacctttggacaattgaacttgggttttaactgtaagttcaagaaaaattcttgtggtaattaaactacagctcgagagtgaaaacaacactggtatatctaggggtgaaaacggtaacggtaattccaggccgaccggcgttcgttttcgattttctacgggccgagccatatggaaatggtaatcgaccgaaataaaaatagaaatggtaaaaaatatagaaatgaaaacggaaatggttttgctgttataccgatcgtttccgtatttaccgtattcttgtggaaattaccgtttcttattaatatggtaattaccatattctaaatatgtcaatatttataagccatatctctacttgacccatagcttacagattgattgactcttcaatcaaatctctaacttttatttttgtgcatggctaaaatggagttaatttataatttatatagtataagcttgaatttatgtatgtaaagttaaatatatgtttttatagtttaatattttcgtatttgttaccggtttccgctctgtaccgacctgtttccatccgtattgttccgtttccggttttccgatattttcgatatcgttttcgttttcgactttactgttttcgatttcgtttccgagaaaaatatggttccaaaatggttgaggctgttttccgatcgtttccgaccgttttcatccctaggtatatctagtagtagagatatccctgaatccatatggaacttggctatagctagtaacaattaattatcaggctctaatgaaagaagctacaactcactggattggtaccgatcctctgccaccggcaaggaaacagcaaggtcgccattgtgcctatccaccgtccaaatagattggatggctagaaaataacgccgaattcttttcagcaacttgaaacggcaacattcttcttttccattagcacacttctcgaacggataatcggtgtgttttgtaaaaaaaaagtagatttttttaaaatttatgttagttaataggtaaataatcatgcggtgattatccacacagttttccattttacggggcttatatcttgtttcttttggagtccaaccattcttctccatcgctaggaagagaaaacaagtatagaattgctagttggcgattacgcgccattagcttaagtcgcgtgcattttttttccccaaggctccgtatgcggtccacgtactcactagcagcccatccgattggttttttcctttttcgcgtggcaatagtcttccttttcttttttccccgtcgcgaagccgtgattagatccgataatcgggagaaaattgtgatcagctgcacttctacgtaattagatccgataatcacggtacttcctttttttcacataacattgttttccttttttactaaagatttgaaacctatcaacttgaattttaaaagctttcaacttttcatctcaaatttaaaaaacttttaacctagatttgaaaactttcaacccaggtttgaaaactttcaactcaaatttaaaaattttcaactcaaaaattgaaaactttcaacttttcatctaaaatttaaaaaactttcaagccatatttaaaaactttcgacccaggtttaaaagcattcaattcaaattataaactgtcaactcaaaatttaaaaaaattcaactcaaattttaaaactttcaagtcaaaattaaaaactttaaattatacatttgtaaagagatgtgtgaaagattagaagaaaaatgggaaaggaacggcgaaaaaaagtgcgaatagagaaaattaaaaagcgccaaaagaataaaagaaaaaggcccacaggaggggtccagctagcgcacgccagtgaaattgctggcgcttacgcgcgcattagcgccccccaaacaaatatgctactaccatatccttttcatttcttcaagttcgccaatataatataataaatctctttattctacagattttttttattctacagatgattccaacttagcaagctttcatacacagctaattgcggaattgcctaggaggtgttttctggtttcctgctattttctttattaagtattttctactccagcgttcatggcttcttgccagcatgtttatctttaatatgcatgatctgatcagccttttcctgaggccttccaagccaagacaataaaatatttgttttctttcgcaagcgagttgagtaccaaaatcttcattgcacgaaagaacagagagatagaaaagagctaggagtgtcgctaaattatataaggaattgaaagtagccagtaactcttcaagagtaactgcatgacctacaaatctctagcttcattctaacttcagtaatactactgtactcttttaacagtaactatacagctacagttttgagtccaatgtgtgtgcagcaagtgcttttcttttctggggcttctatctatgatgggaacatattgtgcaaattaattagtaggtttgcatgactatagatttttttttcttgaaaatgtaaatgctatgcatttcatttcattaaagagaagagaaagtatgtacaacagagcagaaaacacaaaaataaaagggtcgccgaagtgatgggcaacaactctcataagagctaatctcctaaggccttgttcggtttagaggggattatttagaggggattaaagaggattggagaggattgaggaggaatagttccacaccacaataggagtggaataaattccctctaatccctctctcctagggattaaccgaacatagcctaagtggggatcgaccagcccaagaattcgtgaaaagctcttcctacggcatcacaccataataaattctcctttgccactgcatccaaaacaaagtagtactaggtgtgggattgttaaaggcgcagtcattccagtgctttaaaatttcccaagccactaagataatcaaagagtatagcccttccttagcatcctgagagacacctctgcatgaccagggatgaatgtagatgcagagggaggtgggtcgatcactgcgagatttcagtttctttaaagaaacgtctataaaacagaggctacagatctagaagaaatatacaagaacaataaacaaaactcatgttgctgcttttgaaacagcaatttgatcaatttgtttttaaaacttgatgcttggatctagaaattgaggctgttctgcggtgctttgaaatttaccgagctacctgcaaccagaacctcaatccgtggaagactttggtgctccaatttgagtgtccatggaagacaggagaattacactatgatcgtaaatgtttcgtttgatgttccattggaccttctggtgtagtgagattcatcgacaatatcctcatcagtgccggttggaaggcctcatcagtacaagtttcccaaccggcactacaatttgggcgctgatgtggggtgccatcaattccagtttaggcaccggcaatgataaacctgtatgagcccaaaaaaaaagtaaagaccggctcgaaaaatcagctaattgagtcgattcttcgagccggcccctctcattccacatgccaatccatatccaaaaccattccatgttcaacaataagaacactcattccccattaaagaacggatcaagaacacaacaaatattgatttaacacattcgatgaacattatatacagattgggatgaacacatatataaccaacattggctcaacatacatattaatccatcccaatggtaaccatatcaagaatcccaattatcatcgaattgtaatatccccaatcaatccccaatttcaagagtagtaatatatattcaacagatcaagaacacataatctagtacctacacaaggtttgcctcaccgcagccatcccagaggatacaccaacgccttcgtcgatctccttcgctgccatcatctcccttcagccatcaacaccacctccggctcgctttcacgttcttccgctcggcaatgccttctccttcctcactggcttccccatcgagccgctcaatctaaactgcttccctgaatcccctctatctggacggagagaggaagaggaggaaggtgttagcggcagccctgtagttcactcaaaactcacactcgatcggaggttgaagacagtgaacagtagaaacatcaggtgttctacatgagaattttttgcactgcgtagaatgtgcagcattttctggtttatcatgaacttaaatagcaatcatacatgaagactcaaaacaaacaaaaagggaaagagtggagagaactggttgttaggaaacgataagcgaacaaacgataaaaaacaatagatcaatcacagaagacacgagatttaacgtggaaaaccctcccaaaacaggagaaaaaaaaccacgggtgccagccagcaaaatatcttcactatatctggggtgaggttacatcgccgcacggcggtttacaagaggtatatatatggtggaaccctaaaagggatgacaacgggccaagcctttattaagtacaaatgaatttggatcacaactcaacaaactccaccttgagacaaattccttcttatagcatgaaacaatccttcaccctgaacacaacaaagacaaaaacactttcggcgccaaatagcctcttgggctaaaccactataccaattaagcttgagcaaagctcaaacttagcaacaggaacaggctttgtcatcatatcagcaggattatcatgagtacttattttgcataccttcagcttaccttgcgcgactacatcgcgaacataatggttcttgatatcaatgtgctttgtcctctcatgaaacatctgatctttagtgaggcatatagcactttgactgtcacaaaacaagttaatgcaagaatcaactccacaaagctcagcaaacaatcctttcaaccaaactgattatttacatgcttcagcaatagccatgtattctgcttcagtggtagactgggcaacaacaggctacaatgttgccttccaactcacagcacaactaccaatggtaaacacataacctatgagtgagcttctcttatccaaatctgcagtaaaatcagaatccacatatccaacaagccccttatcagtcctgccaaacttcaagcaagcatcagctgtgcctctgaggtacctgaaaatccactgaacagctttccagtgttctttaccaggattagccatgtatctactaaccaaactcatagcatgagataaatttggacgggagcaaaccatggcatacatcaaagaactaatagcactagaatatggaactctagacatgtattccacatcctcatcagtactagcacattgtaaagctgataatttaaaatgaggtgcaataggagtagtaacaggctttgcatcatgcatgttaaaacgctaaagaacattcttaatgtagctttgctaactaagaaatagcaaaccagaatttctgtctctagtgatttccatacctagaattttcttagcagcaccaagatccttcatatcaaactcactactcaattgtttcttcaatgtactgatttgttccttgctcttggtagcaatcagcatatcatcaacttataacagcaagtatataggtgatccattaacaaatttaatatacacacagctatcaaattcagacctcttaaagccatgtgacaacataaatgaatcaaaccttttataccattgacgaggagactgtttcaaaccatacaaagatcttttcaacttgcaaacataatcctccttaccaggcactatgaacccttctggctggtccatgtatatctcctcctcaagctctccatgtaaaaatgctgtcttcacatctaactgctcaagctcaagatcatgcatagcaacaatactgaagaatgtgcgaattgaactatgctttacaactggagagaacacatcattataatcaacaccagcaatttgactgaaaccttttgctactaaccttgccttaaacctcggaggctcgctaggagataaaccctcctttctcttgaagatccatttacaacgaacaggcttcttctgttttggcaagtgcacaagctcccatgtgccattcttctcaagagattgcatctcctcctacatagctgagatccacttctcacggtctccagagacaacagcttcaatgtatgtggctggctcaagagtattctccacctgttcagcgcaactaaaagcataataaaccatatcacatttctcaataaggcggactggagctccacaactcctctttgttctgcgatgtgcaataggttcatcttctggctgcaaaataggaggtgagtgctgaacagtatcattaacatcattactaacaatttcagtttcctgatcatccacgtgctccacctgcacgctaacatattgctgctcctcatcagaaccacctggtatgacatctgtgggcaagctgtctttaaacataacagattcattgaaaacaacactcctgctcatgaatgtcttattagtttcaggattccataacttatatccttttactcctgaaccataaccaagaaacagacacttaatagctctaggctctaattttccgttatcaacatgagcataagcagtgcatccaaaaactctcaactatgaataatcagcaggcataccagaccatacctcaatgggagttttcttattaagtgggatagaaggcgacctgttgattaagtagcaggcggtgttagtagcctctgcccaaaaacgcttgctcatgcgagcgttggacagcatacaacgagccttggagatgatggttctattcatgcgctcagccacaccattctgctgtggagtgtacgggatggtgtgatgcctaacgatgccttccttcctgcagtaatcatcaaaagcatccgaacaaaattcaccaccattgtcagtgcgaaatacttttacctccttttcagtttgcctttctatcatgactttccactctttaaaagcagcaaatgtatcatctttatgtttcaggaaataagccacacttttctggagaaatcatcaataatggtaagcatataacgagcaccaccaagagagggcttacgagaaggcccccacaaatcagcatgtacataatcaagtatacctttggtgcgatgaactgaggtattgaattttaccctcttgtgcttaccaaaaacacagtgctcacagaacttcatgttaccctgagtgcagccatccagcaggttcctcttcatcaattatgccataccaagttcactcatatgtccaagacgcatatgccacaggtgagtcttactaggttcatctttagaaacagcagcagcggtaacagaaccatgtaatgtacttcctctaaggacaaataagtttgcagaattcatatcaccaatcatataaacgagagaaccttttgatacctttacaactccacctgaaccggagtatttgtatccttctgcatcaagtgtgctaagagagatgagatttctcgccatacctggtaagtgtctcacatctttcagcatgcgtgtcatgccatcatgtgtcttgatctaaacagagccaatgcccacgatctcacgtgggttatcatctcccatgcgcacaacatctccattctgcacagacttgtaagaactaaacccatctctgttaatgcaaatatgaaacgaacatgcagtatcaagtatccattcatcatgactagcaacacaaccagcaaaaacgacgagacaatcttctgaatcagagttatcagcactggtaataacagaggccttaccatcaaatttccttttctccttgttctgcagcttccaacattcttcaatgaagtgatttttctttttgcaatacttacagaactttttacctctagacttagaacggcctctactctggctcttgtcacgatcattgctgtcgttgtaggttctctgctcagatctgcctctgacctgcaatgcttcgcccttagaggacgatgcatcagactaaaccatacctctcatcttctccctgttttggagcgcctcatagacttctgctagggttagttcatcacagcttaaaagtatggtgtcatgaaaatttgcatatgaactagacagtgagcataatagtaaaagacctaaatcttcatcatcaaactgtacctccatcgacactaggtcggcaacgatctccttgaagaccgatatgtggttcaaaacagaaccactctcctgcaacttgtgcgagaacaacttcatcttgatatgcatcttactggttagatctttagacatgcagatcgattccagtttgagccaaagttctgcagcagtcttttcctgcaacacttcttgcaaaatatcattagatagatgaagttggatcagtgacagagccttacgatctttccgcttctcctcagcggtccattcagtcgatttcttcttcccgaagcttttcagcgcctcatcaagatccgaagtttgcgccagaacagcccgcatcttgacttgccacagcgagaatcttgtcttgtagtctagcagcggtagaacatacttcatcgacgccatcgcgaaaccctaatgtgggaacaagctctgataccacttgttaggaaacgataagcgaacaaacgataaagaacaatagatcaatcacagaagacacgagatttaacatggaaaatcctcccaaaacaggagagaaaaaaccacgggcaccagccagcaaaatatcttcactatatctggggtgaggttacattgccgcatggtggcttacaaaagatatatatatggtggaaccctaaaagggatgacgatccgttttgcgggggctccgtccccgcacccccgggcgtccccacgtgcacagcccaagcctcccggcaacgggcctccgctccactacggcagaagctggcctttattaagtgcaaatgaatttggatcacaactcaacactggtgagcgttcgccatgcacgccaccactccacgaagtcctggcacacagattactcctaaagactcgctccgcccttgaacatggctagagcacaacgcccacaaggcacgcaggtaggtgtacaacagaccgacaaatgaatgctacagttagcttcataggatacaaagtgactggcacgggattatgtaaagtcgaacagaagggagggcactgtgcagcatgtgtggagagagaaattggattggaggaggccacacagaggccgagcggcggtagcggtaaggagaaggcatattggtggcggcgacaattttgggagagagacaaagagagagcgagaggaactaagaagaatcgagaagcgaagaaaaaatacagagaaagagaaagagctagacttatctgaggagttcattggttggcttatgattatacttataagacaaaatttaaatgttagaacataattttgaatttaatttttttttcatcgtagtttattttacaacatttgattttagtcgctaaggacatgaatataaaaattttattcatgaatttgataggatctattcctatgaaacgaataatgcatatacggaaaaaatagtaaggttcaattcctacaacaatcctttagaaatcctttaaaccaaatgaactcttagtaccgggtttttttattgaaccgggactggtgtggtgtcatcagcgccggtgcttgcttttacagcgcactggtggttttcctggaacgggtttagtcgaaccggtactggtaatggcagcactgatatgctgttctgcagcggcggatgcagaaggatatattcctgataactcccaagctgatgcggtcgcttcaatagaagcagaaatgagtgaatttagtgagaagtgttgtatcctaggagtttaattactatcgtgcagagaaaagacgatgcaaaggctagaagcatcagagtgtgtggcttcaccttagcctacaatgacgtggtcatgtggccatatattcggtatggatgtggatagggctggcaaacaatgcaaccatacacgttatctaaaatatgacaacatgaaactggtttcattgtcaaaggcacgttatagcacactttgaaacaatgggatattaatatatggtaaactaggtaatgcagaccagtgttatgtatattcatttaagagaaagagtgtccaaacggttccaagtaggacagccaaatccaataaaaacactggaatgcccaaataatattacaatttccatgtaaaatcgtatgatttgtacaattattttattttcatttatgataaggtttctacttcaatgacagcaatcacatgggatgattgttggggcaagcaaactttatagatgttatcggggagcatttaaaaaagcatgattggaggtatagtaacactactgcaggatagggctgtagtaacacatcattatcagtaacacaaactagtatgcgttgctacaacatgatcttgtagcacatagcaattcctattgataaaaaaacgtgttacaatcattcagctagtaacatctctttttaggacctgtaacgcaaaagcatgtgttgccatagatcctaggaacacatattttttccaccagtaacacataaacaatatatgttcacataagtggtaacatcatttttaattataataaaaaatagtaatatcagtttaagattgcccagttatcacaaatgtaaataattattaaagatctttatcaagcatcacatattaacatgtttgaattacacggaaagtaactgtatattacatccattgagaacatacaaaataactcgatctagggagttggtccattaagaggccaactaccgaacaaccatttcatatttgagtatacttgtaattcgagcctcagccctcatgtgctatacaagtccctgcagttgacaaaaaaatattgacccatagaaattaatatgtactatactccgctgcacaaaaaagcatccgctgcacattgtgttgaattaaaatgaaagtatttaaggcttgtatagccgtagttttaaaaccatggttttgttaaaatgtcacgaaggctccaatatcagagtacaatacataaaaggatccggtagcatatatatatgattggacaattggaagaaaagcttacaaattacttactagtgatttcagaaaaaaaaaagtacaagtgtttttcttggaataggaactagcagcttatttatacggtcttgtaaagtaaagaattaagatcagagcagagtatttctacacaaacgataattttagtgcaaggcattgaactagtcagaagacgtatgaacaaaattgaattaaaacattctcatgattagtacatatatacaagctgtaactacatctttgatattataatagggtttgtgtgaactaaaattttgtgtttcattatttgcttcagacattgtatgcagatattgttgtatatatgcttctttaattcccatggttgtaaaacttataagtgattactaattgctttgttcatatctcccggccgtcagaattttcatttcattatctaataaaaaaatgatgaggagacgttgcataggggtacacacttacgagttacgatgtatatttgattcccaactacctgttactagtttacaatctagcaactttggagacatctcttggcatgggcaacctgtgagcccagaaaaggagacaagtaagtgtcgagtatcgagagatgttatgataggatggggatactaacagatttagaaagtacatatttttacttaaaaatataatatgttgcataaattaaagcatataaattgcttttagtaaatctaattgatttttatgtgaacttaagcatatttattcatactatttttaatccaccttattttaaataatattgtgtcagatcatagaattatgatactacctaaaattttgtagaatcatgtgtaaataatcatacatgcaaatttaaactctccaaaccaaggagcacattgcaaggaccggctatgctaagaaatgttggtaccaaagaatttgcaaggaccggctctatgcctctatgtagattaaaataataaaaaaacagtctgtcacatctttcttggagcatgcatgaagcatatgtccgcatttatgttatttttgcctctagtgggtcccaatacttagatggactggtgctaaaccatattgtacagaagcttagtatcttaaaacttctatgtggtgagtggcaaacttttagcttcccaaccgagcagttagatttaggcatatgtttggcacggctcgagttctagccccaactctactggagttaaagtcctaccaaacagtgagttgaccctaaaagagagtaaagcgggctgaaacagtgagttgaccctaaaagagagtagagcgggttgaagtaatctggaaaaaatactgaagaggagcgcattttaggcaccctattgtgtgacactcataaattagagaaacatccatccattgattttcacttaaatcgatagacacattattttacatcgatagacacattattttacatcgttattggatctttttttttaaaaaaaaacatcccataccatattcccttcctctccatccctatgtgcattaaagtacataaacattttgctaagctgctacttgtctcacttaaattagaagaaatcctaataattctgagaaaaaaaaataaaatccaaccatcggttttttacttaaacatcaacacatttcattattttatgtcatctgatcactcttttttttaataaagaaaacatccaaaccctccctccatccccgtccccgtgcggtgtgaggcgttacttttctctgtttttcctatatttatgataattaaaattaaaattatttttgtgggcaaagaaaagaccacaaacgaatctccacctattaggtctagccaactattatttttttaagtgatatcaataacttaatgcccaaattgactatatttaaatgctaacaaaaaattacattatggacccacatgcatattgaggcctccacttaataaagacaaaattttctacatgacattaaaaaaagtgtgattagctgggagacactacaagaatgtacatctactatgatacactgcaaaaatggtaataagctgcttggatacccgtgatattattttgttatatccaaagaaaaaggagatagaaacaatcacgaaagtatgattttgccccctttctgccatgtgcggctcgcatatagctctgacgccatggacgtcactacatgggtggcggagggtaccgctgcgagaccgactgcaatagcaagtgctctacggcaccctgctcaacatgaaccaggaggtggcccacgttgtgctctccccaagtgtggtgtgtggcggagcatcggcgccggcgtggctctcgcgctgcagcggcgacgagtgcgggaacgatgcggacccatgggcctaggcgcaaaggtcctcctcaaaaccttgcccccacagagccacctcaccggctgcaggtgcggttgtggtgtcagaggggaatgtgagacagacttggtaggcaggagcaaaaatcatacttttgtaattgtttttctctccatttcgtttggatattgtaaaataatatcacagatatccaacagctaattaccaattttttcgatgtcccactcataaattagaaactacacagtttacacagtttaaagtaattttagttcacaatttatatgttgcaagtaaccagtgttcaaagtgtaggatcgaaacacaagaacaaagccaaccagaggggggtgaatggttggtatacccaaaaaccgaaaacttttagcggaaataaaagttaccctcgaattcgatagatcgcggtctgaccgaagttgtattgccggtctgactgccagatgaatgtcggttcgaccgatgtagatcgatcgatcgaaccgccgaagtcgcctgccacgcctgccgccgccaccggtcagaccgcccgtatgccgctggtctgtccgccgcgtgccgccggtctgaccaccggtatatcgccggttagaccgccgaaacccggtaaacacaaatcgaagaactcttaaagtggatgacgactttattgattctctctgtgtttacaaagtgcaccaacagcactccttacaaaaatttcgactaaactcgaaaccctaactcaaaactcaactcaattgctttcaaaagcaataccgggaagcctcacgctccccctctatttgtacccgaggtaggcagcctaaatccacgaaccaaactcatactaagagtcctaaacaccttaggaaaccctctagtacaagaaagaaactttacataaccaatcgtaccaaacttggactccttccaa

SEQ ID NO: 7617 - DNA, 1763 bp, Oryza sativa
gccctattggcacaggtgggtgcgatgtttttcaccgaaattaaaaagttgaaaaagcaccaaaacatgatttttggacatatttgagtgttttgggtgctttcgtggcaaaaagtcacttcgtgattcgtttggcacttttgtcaattaatgccagtattggcgtatatttgcacaggtgggtgcgatgtttttgacaaaaatgaaaaagttcaaaaatcaccaaaacatgatttttgaacatattggagtgtgttgggtgcattcgcggcaaaaaatcacttcgtgattcgcgcggcgaactgttgtcaattgatgccaatattggcatatattggcaaacgtgggtgcgatgttttacaccgcaatgaaaaagctcaaaaagcaccaaaacatgatttttggacatattggagtgtgttgggtgcatttgtggcaaaaaatcacttcgtgattcgcgcggcgaacttttgtaaattaatgccaatattggcacaggtgggtgcgaggtttttcaccagaatgaaaaagttcaaaaagcaccaaaacatgatttttggacatatttgagtgttttgggtgctttcgtggcaaaaaatcacttcgtgattcgtgcggcgaacttttgtcaaccaatgccactattggcatataatggcacagatgggtgcgatgtttttgacaagaatgaaaaagttcaaaaatcaccaaaacatgatttttgaacatattggagtgtgttgggtactttcgcggctaaaaatcacttcgtgattcgcgcggcgaacttttgtcaattgatgccaatattggcatatattggcacacgtggatgcgatgttttacaccgcaatgaaaaagttcaaaaagcaccaaaacatgatttttggacatattggagtgtgttgggtgcattcgtggcaaaaaatcacttcgtgtttcgcgcggcgaactattgtaaattaatgccaatattggcacaggtgggtgcgatgtttttcaccggaatgaaaaagctcaaaaagcaccaaaacatgatttttggacatatttgagtgttttgggtgctttcgtggcaaaaaatcttttcgtgattcgtgcggcgaacttttgtcaactaatgccactattggcatataattgcacagatgtgtgcgatgtttttgaccggaatgaaaaagttcaaaaagcaccaaaacatgatttttggacatagtgtagtgtgttgggtgcattcgtggcaaaaaatcacttcgtgattcgcgcggcgaagttttgtcaattaatgtcaatattggcacaggtgggtgcgatgtttttcaccggaatgaaaaagttcaaaaagcaccaaaacatgatttttggacatatctgagtgttttgggtgctttcgtggcaaaaaatcacttcgtgattcgcgcggcgaacttttgtcaattaatgctagtattggcatatattggcacatgtcggtgcgatgtttcagactggaatgaaaatgttcaaaaagcaccaaaacatgatttttggacatatttgagtgttttgggtgcattcgtggcaaaaaatcacttcgtgattcgtgcggcgaactgttgtcaattgatgccaatattggcatatattggcaaacgtgggtgcgatgttttacaccgcaatgaaaaagctcaaaaagcaccaaaacatgatttttggacatattggagtgtgttgggtgcatttgtggcaaaaaatcacttcctgattcgcgcggcgaacttttg

SEQ ID NO: 7618 - DNA, 2751 bp, Oryza sativa
attgaagtttcttgggtgcgtccgtgtcgaaaattcactctgtgactcgcgcagtgaacttttatcacttaatgccaatattggcctatattagcacacgcggctgcgatatatttcaccggaatgaaaaggttcagaaagcaccaaaacatatttttgggcatactgtagagaattaggtgcgtccgtgtcaaaaaattactccgtgactcacgcggcgaagttttgacaattaatgtcaatattggcctatgttggcacacgtgggtgcaatgtttttcaccggaaaaaaaaacttcaaaaagcagcaaaacatgatttttggacatattggagtatgttgggtgagtccgtgttgaaaaatcactccgtgactcgcgcggcgaacttttgtcaattaatgccagtattggcatatattgccacacgtgggtgcgatgtttttcaccggaatgaagaacttcaaaaagcaccaaaacatgatttttggacatattggagtatgttgggtgagtccgtgtcgaaaaatcactccgtgactcgcgcggcgaacttttgtcaattaatgccaatattggcctatattgggacgcgtgggtgcgatgttttgcaccggaatgaaaaacttcaaaagccaccaaaacacgagttttggacatattggagtatggtgggagagtccgtgtcgaaaaatcactccgtgactcgcgcgacgaacttttgtcaattaatgccaacattggcttatattgacacacgtgggtgagttgtttttcaccggaatgaaaaagttcaaaaagaactgatttttggacatattggagtgtcttgggtgagtccgtgtcgaaaaatcactccgtgactcgcgcagtgaacttttatcacttaatgccaatattggcctatattagcacacgcgggtgcaatgtttttcaccggaatgaagaactttaaaaagcagcaaaacatgatttttggacatattggagtatgttgggtgagtccgtgtcgaaaaatcactccgtgactcgcgcggcgaacttttgtcaattaatgccaatattggcctatgttgggacacgtgggtgcgatgttttgcaccggaatgaaaaagttcaaaaagcaccaaaacactagttttggacatattggagtatggtaggtgagtccatgtcgaaaaattactccgtaactcgcgcagcgaacttttgtcacttaatgccaaattgtcctatattagcacacgtggttgcgatgtatttcaccggaatgaaaaagttcagaaagcaccgaaacataattttggacatactgtagagaattgggtgcgtccgtgtcgaaaaattactccgtgactcacgcggcgaacttttgtaaattaatgccagtattgggatatattgctacacatgggtgcgatgtttttcaccggaatgaagaacttcaaaaagcagcaaaacatgtttttggacatattggagtatgttgggtgagtccgtgtcgaaaaatcactccgtgactcgcacggcgaacttttgtcaattaatgccaacattggcctatattggcatacgtgggtgagttgtttttcaccggaatgaaaaatttcataaagcattgatttttggacatattggagtgtactgggtgcgtccgtgtcgaaaaatcactccgtgactcacgcggcgaagttttgtcacttaatgccaatattggcctatattagcagacgtgggtgcgatgtatttcatcggaatgaaaatgtttagaaagcaccaaaacatgtttttggacatactgaagagaattgggtgcgtctatgtcgaaaaattcctcagtgactcacgcggcgaagttttgtcaattaatgccaatattggcatatattagcacacgtgggtgcgatgtttttcaccggaatgaaaaacttcaaaaagcaccaaaacgtgatttttggacatattggagtatgttgggtcagtccgtgtcaaaaaatcactccgtgactcgcgcgacgaactgtcaaaaatgaatgccaatattggcatatattgccacacgtgggtgcgatgtatttcaccggaacgaaaaagcaccaaaacatggtttttgtacgtactgtagagcattgggagcgtccgtatccaaaaatcactctgtgactcgcacggcgaacttttgtcaattaatccaaatattggcctatattggcacacgtgggtgttttcaccgaaatgaaaatcttcacaaagcagcaaaacatgatttttggacatattggcgtatgttgggtgagttcgtgtcgaaaaatcacttcgtgactcgagaggcgaaaacttttgtcaattaatgccaaattggcctatattggcacacgtgggtgcgatgtttttcaccggaatgaaaaagttcaaaaagcaccaagacatgatttttagatatattggagtgtatgggtgcgcccgtgtcaaaaaatcactccgtgactcgcgctgcgaaattttgtcaattaataccaaagttggcctatattggccaacgtgggtgcgatgtttttcaccggaatgaaagagttcaaaaattaccaaaacacgactttggacagaaggagtgtattgggtgcgtccgtatcgaaaaatcactgcgtgacttgcgcggcgaacttttgtcttgccaaagttggcgtatattggcacacgttggtgcgatgtttttccccgtaatgaaaatgttcaaaaagcagcaaaacat

SEQ ID NO: 7619 - DNA, 1865 bp, Oryza sativa
gctttttaagtttttctttccggtgaaaaacatcgcacccacgtgtgccaacataggccaatattgacattaattgtcaaaacttcgccgcgtgagtcaaggagtaattttttgacacagacgcacccaattctcttcagtatgtccaaaaacatgttttggtgctttctgaactttttcattccggtgaaatatatcgcagccgcgtgtgctaatataggccaatattggcagtaagtgataaaagttcactgcgcgagtcacggagtgatttttcgacacggacgcacccaagacactccaatatgtccaaaaatcagttctttttgaactttttcattccggtgaaaaacaactcacccacgtgtgtcaatataagccaatgttggcattaattgacaaaagttcgtcgcgcgagtcacggagtgatttttcgacacggactctcccaccatactccaatatgtccaaaactcgtgttttggtggcttttgaagtttttcattccggtgcaaaacatcgcacccacgcgtcccaatataggccaatattggcattaattgacaaaagttcgccgcgcgagtcacggagtgatttttcgacacggactcacccaacatactccaatatgtccaaaaatcatgttttggtgctttttgaagttcttcattccggtgaaaaacatcgcacccacgtgtggcaatatatgccaatactggcattaattgacaaaagttcgccgcgcgagtcacggagtgatttttcaacacggactcacccaacatactccaatatgtccaaaaatcatgttttgcagctttttgaagtttttctttccggtgaaaaacatcgcacccacgtgtgccaacataggccaatattgacattaattgtcaaaacttcgccgcgtgagtcacggagtaattttttgacacggacgcacccaattctctacagtatgtccaaaaatatgttttggtgctttctgaaccttttcattccggtgaaatatatcgcagccgcgtgtgctaatataggccaatattggcattaagtgataaaagttcactgcgcgagtcacggagtgatttttcgacacggacgcacccaagacactccaatatgtccaaaaatcagtactttttgaactttttcattccggtgaaaaacaactcacccacgtgtgccaatataagccaatgttggcattaattgacaaaagttcgtcgcgcgaaacacggagttatttttcgacacgaacgcacccaatacactccaatatgcaaaaatcatgttttggtcctttttgaagtttttcattccggtaaaaaacatcgcacccacgtgtgccagtataggccaatattggcattaattgacaaaagtttgccacgcgagtcacagagtgatttttcgacacagacgcacccaattctctacagtatgtccaaaaacatgtttgtgtgctttctgaactttttcattccggtgaaaaacatcgcagccacgtgtgttaatatatgccaatattggcattatttgacaaaaagttcgtcgcgcgagtcacggagtgatttttcgacacgaactcacccaacatactccaataagtccaaaaatcatgttttggtgctttttgaagtttttcattccggtgaaaaacatcgcacccacatgtaccaatacgggccaatattggcattaattgacaaaacttcgcgcgcgagtcacagagtgatttttcgacacagactcaccaaacagactccaatatgtcaaaaaatcaagttttggtgctttttgaagtttttcattctggtgaaaaacattacacccacgtgtgccaactatatatctatattggc

SEQ ID NO: 7620 - DNA, 1927 bp, Oryza sativa
caccaaaacatgatttttggacatattggagtttactgggtgcgtttgtggtaaaaaatcacttcgtgattcgcgcggcgaacttttgtcaattaatgccaatattggcacaggtgggtgcgatgtttttcaccggaatgaaaaagttcaaaaaccaccaaaacatgatttttggacatatttgagtgttttgggtgcattcgtgggaaaaaattacttcgtgattcgcgcgacgaactttcatcaatttctgccaatattggcacacgtgggtgcgatgttttagaccggaatgaaaaagttcaaaaagaaccaaaacatgatttttggacatattggagtgtattaggtgcgttcgtgacaaaaaatcagttcgttattcgcacggcgaaattttgtcaattactgccaatattggcacaggtgggtgcgatatttttcaccggaattaaaaagttctaaaagtactaaaacatgatttttggacatattggagtgtgttgggtgcattcgtggcaaaaaatcacatcgtgattcgcgcggcgaacttttatcaattactgccaatattggcacatgtgggtgcgatgttttagacaagaatgaaaaagctcaaaatgcaccaaaacatgatttttggacatattggagtgtattgggtgcgttcgtggccaaaaataacttcgtgattcacgcggcgaacttttgtcaattaatgctaatattggcatatattggaacaggtttgtgcgatgttttagaccggaatgaaaatgttcaaaaagcaccaaaacatgaattttggacatatttgagtgttttgggtgttttcgtggcaaaaaatcacttcgtgattcgtgcggcgaacttttgtcaactaatgccactattggcatataattgcacaggtgggtgcgatgtttttgacaagaatgaaaaagttcaaaaagcaccaaaacatgatttttggacatatttcagtgttttggttgctttcgtggcaaaaaatcacttcgtgattcgtgcggcgaacttttgtcaactaatgccactattggcatataattgcacagatgggtgcgatgtttttgacaagaatgaaaaagttcaaaaatcaccaaaacatgatttttgaacatattggagtgcgttgggtgctttcgcagctaaaaatcacttcgtgattcgcgcggcgaacttttgtcaattgatgccaacattggcatatattggcacacgtgggtgcgatgttttacaccgcaatgaatgccaatattggcacacgtgggtgcaatgttttagaccggaattaaaaagttcaaaaagcaccaaaacatgatttttggatatattggagtgtgttgggtgcattcgtggcaaaacatcacttcgtgattcacgcggcgaacttttatcaattactgccaatattggctcacgtgggtccgatgttttagaccgcaatgaaaaagttcaaaaagcaccaaaacatgatttttgaacatattggagtgtgtttggtgcattcgcggctaaaaatcatttcgtgattcgcgcggcgaacttttgtcaattaatgccaatattggcatatattggcacacgtgggtgcgattttctacaccgcaatgaaaaagttcaaaaagcaccaaaacatgatttttggacatattggagtttactgggtgcgtttgtggtaaaaaatcacttcgtgattcgcgcggcgaacttttgtcaattaatgccaatattggcacaggtgggtgcgatgtttttcaccggaatgaaaaagttcaaaaaccaccaaaacatgatttttggacatatttgagtgttttgggtgcattcgtgggaaaaaattacttcgtgattcgcgcgacgaactttcatcaatttctggcaatattggcacacgtgggtgcgatgt

SEQ ID NO: 7621 - DNA, 20708 bp, Oryza sativa
tatatggtaaaaaaactaaaatgcaacaacaaaatggaaacacatttcaaatgaatgtattacatgtgatggagtcagtagaccagcagggcttcgccgctccccttctcctccccctcacccctccctctttctctttttttggattttgagtgaatacattgaaaattctcatagggggaaggggttttatagtggggaggggaaaaatcgccctccctaagggcggcaagggggcctcctacaaaattccaggcagcctcgccgtccttttgtaggcgcccccccacacagtggtaaatcgccctccctaagggcgacaagggggccacctgcaaaaaaaccaggccgccctcgtcgccctgttgcaggcggcccccgaacagagcaaaaccgccctccgtaagggcggcaagggggccgcctgcaaaatggcacgccccccatagccggccgttaggaatgacctaacggccgtgtgccacgtcacaaaaaccaccctttgggagggccccaagggcggcgggcgactagttttgtaaaattttcaaacacaaaattagttttgtaaatattttaataaaaaaattaaaaacaaaaaaaattctcttccggaaaggttttataaatccactagaccattaggcgtgcctttcccgtgccctagccggagtaaagggtgcatcattaagagggcgatatatttttagatttgggaagggaaatttctaaatacttaaaccacataattgtgaatggtaacatgagccttgctagtacagaattggtaggttgtggtgtagagttgcatataatggaacatggtaccgtcattagtaaatagcatagtaagtactggtcgatggtttataaactgatcatagatagtttttacatggtaggccctagagcaaaatcggctacacgtattaggtagcctgattgtgccatatatggtctattgtctctaggcactgttacacaaaagcagtgcatatggagatagcatcagtaggctggtttcatggacaactcaaaaggcattgttcctaaagctggcataggtatattacagctactcttctgagacaatataaaccactgcttctaagcgcttcctaatataaaagtggaatatgcagatagctccaatgcttatgctattctcctccatgaaagatttccatcctgttgttaagttgcagcgtccatctgttttgctatgaactctgtagaaaactgcgttgtgaagtattagaaaaacatattgatgttagttgagtatgtgtaaaatatacttgcattgatgtggattatgaaaaatgtataccactctgccttttaatggctgttgcattgatggacattgttggaggcatgccacgagggccttcaaccagacctgccaaaacagtctaactcgcgaggaattaagccaagtctagaagattcggttgaggcgatgatgtggactagggttcccgatctttcgaaaggttctgataaccaataatttgggcggactcgcgacacaaatcgatccggcatcttgatcgaacacgctcttgagccccgcaatcgcaacaccatgtctcctctggttatcacccgtatcgaaacgcggatgacctcactgagaaggctaatccctgtttgccaatcgaagaacacaaacaagaacaagatagaatacaaccaaaattgcagatgaatgattaagctcactagttggggtcttacaaaccgatttagcggcgaaactgttctcgatagaataatctaagcaaaacccgactctaaatgatgacgactaaagaataaatatgattagagatgtcctagggttggcctagggcgcacacccccttgagctaatgtaacgccccgattttcgttcgggattaaaaatcaattaataatgcatttctagaaattatattaaaagttaaaacaatttattcgagtgaattaatgggagaattaaatttttcccttaaaaatcattggccgggaatattttgcaatattctttgtgccctaaaatattctctgaaattttctcgtgaattttcggagctcaataaataattttaatagcacatagatcatttaatcaattaattaaaaagaaaaacaaataaaattccctcttctccctttgggccgctttcggcccattcccctccttgctcctttcccttccggctgggcgcctccctcccctctcctctttgggctgctcggcccagttcagctcccctccccccccccccaaagtccagaaaacccccacctggcttcccctctctcttccattggctgacaggtgggacccgcagccccacctgtcatccccttcccctacctccagccaccccatcgccagggaccggcaattgccgccccaccctgccgctaaaaccgccgcctcccgcctccctcgcgcacgttcgaccgtgcggatgtggtcgccacccactcctcctcattttcccccacttttccccaaaaatcacgccggtttgacctccctcgagctccatgtcgccaccccacgtcgccggccggttgccgcccgattccgctcctttcggcaacgatttccctctcctgagcctatataaacactgtccatgcgaccctcgtccatttccccaattttcccgtactccccacactctctcccgctctccccacgcgagcccaagcgccgccgctcgccggcgactctccagctggctgctgccgccgctgccgccgtccccgcgccgcgccgtttgcgtcgccggcctcgccgcgcgttgccgaaccccgtccaccgctccgcttctgcaataaaccacccgggcgccggtttcaccgtgcacccgagccacagccgcctctcgtctcctccagtcgctcgccaccgccactcgcgtcgctgccacgctgcgccaccaccgtcgaaagcttcgtcgtgcctcgccgcaccccggcatccgattcgtttccctaaatcgccaccgcaaccacccctccaccgtcgacccgagccaccacctccgtttgtcgactgcagccgcgtcgtcccactgctttggtcgtcgccaacccacgtcgtcgcctccctcggctccgcaaggacgaggaggtcctcggccaccactccccgtcacccgaatcctgccggaactccaccttcatcgcacaccggtgagcacccgctagtcttctttcttccggccggtgattcacgccgccgggtgtctcctcgtgccctcctaatcccgccatccccttccccaggtcctgctggcgctcggtcgtccctccgctttcgccggacgtcgccggagtcccgccgtcgccgtgcctcctcgaggagcttgtcgccgccgcgttcccgtcgtctcctcgccgttgcgcgagctcggtgagcatccctcccttaccctctgtctccccttcaccggccgcctggcgacgcgccaccaccgccggtggccgtctggccggttcatcgccgccgtgctccgcgcccgcacctctgccggctgtgctgggcagccggctgccgcctcccctcgccgcgccgcgccgccactccctagcgtgcgtcgccgctgcccgcgtgcgctgccgctccccgcgccgtcgctagccgtcgccgccggtggtcgtgcgccgccgcgcgtcgtgtctcagctgggccggctctgagccgtgcccgtgctctaggcgccttgccctgtggctgcccgtggaccacccgttgtctcggtccacggtgccgccccggccgcggtggaccgtgtccaccgtgcgtctccccctttgacccgctgacgtgtggggcccgcgtgtcggcaccggccgccccttgctgacgtcagcgatcatcttttcctttgagaaattaaataataattgcgcaataaatcaataataattctagaaattcatttaaatggctcaaaacttctaaaattcatatctaattcatatgaactccgaattgggccattcaacttgcaaaattcatctaaaattgagctctacatgtttgtttactttttatgtactgtttccttggtttttactagggtttttcctcgttttgcgtgcctgcgtgtagttcgcgtcgtttcggaagttcgcggtcgcgaggatcagagttcagaaggttgtagtgaagaagcaaggcaagtcacacattccccttgagcatgttgatcccaatttataaatgttttaccgtttgcaaataaacatgcatgtcttgctaattacatgggatccgagtattacctatctgctcgcttgtgccaatgtttacttgatatctgtcctttgtcaaccttgtgtgataaatcaactagctcatggtacttatgtgacctagctagaactatatgcttagccatgcttaattaccactagctcagttgatgggataattacagtattagacctttttagtatcagaatgagctgcatgctcgagacatctgaccatgcttcgtggtcttaattatccaactaaaatacaactgaatggtgggctgtgggtgcatggttttgctagtcgcatccatggcaattaaggaccggttcgcgggatgccctggaagaacttatcgtacttaccacaagccagcgtgggcaacggctgggcttgtagtgtagctttcgtctagccgacgcatcctggcaagggtgggcgtgatggagtttggatgggccctgcgacggtctatgcggcttccggattcacctaggcacgagaggggactgcccgctgccttgcgaggagtgggggtgaaacctgaggtgtggtgtgcttggttagagggagttatgcaaagggtcctgtcatgggctctttccggtatgtcgtggtggcatgtcggcgcacggaaacgtgtcgtggggctgtgtcttgtgggtacagttgtacacctctgatcagagtaaaactattcgaatagccgtgcccgcggttatgggcggttgaccagattcaccgtgattagtcccaccttaataaatcgactcaatgcactgtagatcagtggtgatttaatgttactttaattactcaacagttttactgttttgctaaataaaatgttttacaaccgcctttatgcaaatagccacaaaccgtccctttgttccccttgcacgtctgcatcattggtgtggcttgctgagtacggtggttgtactcagccttgctattattcccccttttcagaagtgtagtgcttctgagctgaagatgaagttagaagaccaaggctcagaccccagttgagttttgcctgtggagtggagctgaagccccgctaggatcgcctttttccgctgctgtcgttctgtttcggtgtgaggactaagtgcctcttctataagtattttacactttatttacgtttggaaccgtatattacttgtcgttttgtgtaccctggctggtcctggacagggatttaatacacaaaatagtctggaaatttgggctaaatttctgggcgtgacagctaagcccacgacacaattacaaggcccaaaacacaaatcagattcggactggattagatatgtggcttgttttgcagattcacggcagctcggtaggaattttgatgtgggaccaaaatcatatgaaagtagactccataagaatcagcggctaggtccgtttgtagttggtgctgtgaggaggcccgaatccgaatccaaaacatgttgaactttatcttttgtcttctatggaccaaaagtgacgtggtgagatgaaagaagacttggagaaggttttggtttggttcccaatcaacttcttcaatcatccatgcattccttatgctcggtctcttttctttcgcccaagcaagtacctctgcaattgaaaacacacaaaactcattgtgtagcaacgtttgttcgaatatataacaagtaaatctaatataaaacatatgcacctttggttgattaatacataaggtagtcatggttatatccgagctagttgtgtcctcatcaggcaaagccacaaggtgaagcatgatggcaaagatcaaaagatcgggtccaagctcgacaattcgggagacatctgccaatgggtgaaagccacatgtcgaaggccatgtggcaaagcatgaaggcttcaccctagataaaacacagtcgggagaaaaggattgaagggccgcacagtccatggaggcctttcgccatagttgggccgacctagctagcccattaagagcccattaatgaaaaggacactgtgtgcctcactaatgtccttataataagggtatccatgtaaatttccctgtacaacctaaaccctagaggatgtaagcctgtactaagactataaatagtcccctggagacatgtaaaggggggatcccaaacaattttactaaataatccaacttgctgttgagtgaaccacgtctttcgacgtgacgtggttgtcaatcgagaatagttggcaccgaccatggggatctcagggcgaaatcactgagaacaagagcgaaaccactaatgccaccaaagaagatcgccaaagagagagttaccaccaagcataagtagagtgatgatgaagtggagatggctggcgaagagggtgtacagcttccagcagccggagttgttgtagcacctcttcaaggggtggcgcctccttgtcacaccttgattttcgtcttaggatttataaattatttaataaattattattagaatttatattaaatgttcattaatttacaagtgaagttaaatgtgggaaataaaatttcctaaatataaagcatggatggatttaatttttattaaattctccattgttaattatactctctggaattttctcggatttttttcggagctcaattcctaattttaatcatacaaagaacatttcagtaaatacccacatattaaattaatcattaaatggtctaattatatttttttaagtactttgagtgtccaagtattttcaggatttttcttgaaattatttgagcattggaagtatttttaacaattcaaagatcatttaagtgattattttaattggaaaagtaataaaaatcctcctcctcagcttgggccctttttggcccatttcttcctcttctctctccctcgcgcgcgtgctgtgcagtccaagccggcccaagtcaagtgctctgttctattctcagccaaccgaaaaagtctaatttgcctccctagacactgttcatcttctacctctagcagccgaactgagaccgagtgggctcggtttttcccctccaaatccgaccttttcccttgtgttttcctaaaattagttgaggggaaatattcctcttatcctcctctatcctttcccccaagaatcagactttatcccgaagaaatcaacgcggaatcgaattcgttttcgagtttatctctccaactaaccctcggtttttccggctcaaatcctctcgtttggagtccgatctctctaatccaagcctataaatagcatcccctagtcgccctctttcgtttgccccatctcccgagccttctcgtgccccgtagcgccgtcgccacgccgtccaagccgccgccgtcgccggccgacgaggagccgcctcgcgccgccgcttgcgtcgtccgccgcctcccgtcgccgccgttaggtgtgcatggcggagtagagtcccggccgccccctccccgctgtcgccggtcgccggagagccgtcgccgccgtcaatcgatccaccgccgccagacaagttcgtcgccggccaccatccgtcgtcgttcttcgttttggtgagcaccgttgagttcgcaatgttgtcctctacgcgtaggtgccctccaatcgcccagccaaggtccgcagcgccggcaaggtcgtcgtccaacccgtggctgccgtcgatgacgtcagcgatgatgtcattaatcccttttctcggttttctttttagatgcaaatcgattaaaacttcggaaattcataactaaatcgccgtagctccgattcgagtggttcaagttgctaaatttttctaaaatcgagatctacatgttaaaaatatccacatgtactgtttatgcttgtttttgtactgttttgttgaattttgttctttcggtttagtttccgacgttccggaggagagcgttttcgttgaggaaggttcggaagtgtttgcggaagctcaaggcaagtcacacagatcccaaacaactctttgagcatgttgaacccgtttaaagctattgttttatttcaacttatacattattttcgaatgtcatcgcgcgggggggggggggggggggttgagcctttcctaattaattaatgggcgaagatgactttattttcctatgggttataatttgattagcatgaaccttatatattggattggttcagctaaatgccatatgtatgtttgcttagtcatgcgtagaaacattagctaattaaaggggattaaatataaattatattattattattaattatggttatatttaatgatagctcacgatggttaatcatgttatgttgattaattgataactaaaatatgataaaggtgggttgtgagcatatggttttgatggttgtgctcatgacaattaaggaccggttcgcgagctactgttgtgagacattaaccgtgccaaccacaagccagcgtgggcaacggctttatcttttgtatagcatgattcattatggtgtgccagactgtgaagcggcgagaagtccgtgggggtcgctggggagtccatgcctctggttttgagggggtgattatgatccaggaatggtgcactgtggtgagttgtgttgtgcgaagggtattgtcacgatttcccccttagcagtgccgtggtggtacttcggggcatggcaacatgtgtggaatcgtgtcttgtgggtatagtggtacacctctggctagagtaaaactatttgaatagccgtgcccgcggttatgggcgagttgagcaatgtttttcgtgattagtcccacactactcattaatggtactaatgtgctaattaatttgactcctggtttggaatggataattccttgtttggaggtttgatctgtacgaccggggttggttgttcaggtttggttgggcctgagcagcatgggtgtgctgttcagtgttgattaaaattgatgattaattactctactgttttacttctcttaaatgtttgttaaatgctgcttttgcaaatgagtctatattatgccatcctttggtatccttgtgcacttgcatatttgctgtgtggcttgttgagtatgtcatatgctcattcttgcaataatcatcaaacctcagttgaagaaaaaggatccagaaggagaagacgtttggcttataccccagttgagctgcctgtgggagtggagctgaagccatcgctagaccgttattccgctgctgttttcttttcttttgtaagtatgtaacgttatcattatgatggatttgtatattaaattgtcagtttgtgtacctcggctgattcctggacgagggttttatgtagaaataagttcggaaattactagtgaatttctgggcgtgtcactcctccacctttggcacaagctacttcggtagtccaagcttcaaccaaggtagcggcttcgacatcttaaacggccacacgggcagtggttgcggtgaaggccccttcgaccgccgccgcctctttgtcccaggcgggaggctcaacccaagccgctgccacgacccaacaagctacggcttccaccatgctcacatccgttcaagcgaacgctgacctcgaggcacaagccgaagccgacatgggtgttgtgcgccagaacatggccaagttgcacgacatgcttcaccaaatgcaagaacaacaacaagcatttgaaacagcaagacaagcgaaggcctcttgggtagccccgcaaccgccttcgtgtcgatgcgaaaaacactcacggcctaggagatctgcgtagatctaatgcaggcccaaggcttgcctcgagtgctaagggtgtgccagctgatttgatcctacaatcaacaaggaaacaaaaaagaggaggtcggtcagccgatagccgatcggccgataggccgatagcgtatcgttggtggtccccagccgattggaccggctatggactgggtatatcaaagaatgtgtatgctgtaagaatgccctatcggctaaaagcactgcctatgaagataaaacatgtgaatcgagacaacactagcaaaagagcagccgatgaagtaaaggaagagcataaaggtaacgtgccagctagtactctggcacgtacctatacagcctggccaaaccataacaaggcgtcaaggctaagccaagagtcagatcgatggcctcagctgatacgacataacctcagtgccaagttatagcagggcctgcttgtataggtggtagatacacgtgcaataatttaagaaacaagcatattaggtaagatcagctgaaaccccgatgctaaccctaggactgaccgaaaacaggctatacctctcggttctaagcacgacttagcagatcaaacctaactgattcagcactgagtatgaaaagaaacacgaggtatagacaatcaagccaccgaccagcagtcaggctggtagataccctggctaatctaatctggtaggatgatatagtcaataccagcatcaaccctaaagcgaatatcagtcgatacaactaaatcgggctaccaagctagattagacatgatatatgataaaaccaagcaaaacgcgtaatccaaaccagtgcgatccaagagatctatcgtttctgatacagccttgaacaacatcgatgtagttgatacgattgcttgggccgacagaacgtaggacttaccccttcaccggatattgaagccgatgcagccctgcgtcaagtgccaagttctgctgaaacgtaaaaacgaaagtgaaaagtaaaagggtggcgatgcgccgaagttgtattggattgtctcccatattacaatgctagggggttaatatttatacctaaggtacaagataagtccattatggacacgactcaaacattctaaaaactctgtcggagagtgatctccactagcgggaggttggaagtcccccctttgtgagttcggccaggggagcaggtgcaatgctgaggagtatcctttctcgcaatcgcgatggatccgtggaaatcgggctcacgcggttgaaggtgacacagagagagagagagagagagagagagagagagagagagagaggttatacaggttcgggccactatcgagcgtaataccctactcttatgtgtgtgatgatcttcctatggttacaagcactccagattctcagtgcacaagctagggcttggccagccttccgcccagattctggttttttcaaagaacctctctctactcgtgggcagtgtcctccttttatagatgaaggggacatcacacgcgccgcccccatcctcaaccatcgggagagggccgacattgccgatattaaaatacatcttatgccttgggccggaagcgatccgcatggctaatctcgggtggcccccactgaatccctccggctgacacgggggacgacccctatcattccttattaaatgtttggcgacttcgtgggcacacgcacattggggggtccgatccggacatgcctcaccggttaaagccactatcaactgggcgagggacgctgggcttcctactgcaaatgatgggacaggacatacctgcccccacgccgcctgacacaagtcagggtgtgggtgcattgccgcctgtcccttctatccatcgccgggtcacagactggccacagggtggtcgcaggcacacgtcggtcagcatgcgccgcacgccgtgccacgtcacattgaatgcgacaggggcggttaccgcgccactcataaatgcgcctggcggacggcactcacgcccgctcaaggctcctgcatggccgccacgtggtggctgagcgaggatgtcacgcccagaaattcccgaatagaattccaagcagaatgtgcattaaaatccccgtccaggaccggccggggaacacaaacgacaatgttgacatacagatccacgtcttacaaacatcataaaagtcttacataaatgcagcggaaaacaaaagataacaggagctaagccttgacttgaactgcagcgggaacaccactccacaggcatcctcgacggcacggacgaagcctactcctcggataacccaccatcggacacatactcatactctggggttggggaaaatagagcaagactgagtactatccactgtactcagcaagtcacaccggaataggggtatgatgcagggatttatcaagggatagctgtacaggttcatttgcataattttggcttttataaagagaagtggaatgcgaaaacagttgtaataattagtcaatattaatcatccactatccaacgctacaccacgttgtaacaggcccaaccatccacctgtactatccaatttcattagactaaactaggatgagactaatcacggtgaatctggttgaccgcccataaccgcgggcacggctattcgaatagttttactctgatcagaggtgtacaactgtacccacaagacacagccccacgacacgtttccgtgcgccgacatgccaccacgacataccggaaagaggccgtgacaggacccttcgcataactccctctagccaagcacaccacacctcaggtttcacccccgtccctagcgggcgacgggcagtcccctctcatgcctaggtgaatccggaagccgcataggccgtcgcagggcccatccaaactccatcacgcccacccttgcctggatgcgtcagctagagaaaagctacactacaagcccagccattgcccacgctggcttgtggtaagtacgaggaattcttctagggtttcccgagaaccggtccttatttaccatgggtgcgactagcaaaaccatgcacccacagtccaccatgtgattcattttaattaaccaacaccaaagcggtggtactaatccaacattaccattagaacctgcagtctatatttcaatgggatttttcccccaaagtgtgctagttgaactaagcatggctaagcaattcctagtccaaagtctattcatgttataacccaagctaacaaaggagcatggtaccaaaatagcaaggctgtaacaattggtaaacatcccatattattattgcaaaacatatgcagtatttgaaagaaaacattagaacatttgcaatataggatcaacatgatcaagtgacaggcatgacttgccttgctttgctgctggaggaacctcggcgactatctcgaagtacaccggagcgtcggaagagccggaatctaaacgacatacaaggcaaacaatgcaaacaggctataagattactgaaacagagaacaaaaccatttttaatagattctacacatttttcttgttttactgagacttgaatgggcttaaacggagctcggatgaattagttatgaattttagaagattcactgtgtttattactataacaaaaagtccttaaatcatttattgcgcaataaatcccagggctgacgtcatcaaaggggggaggcggcgccgacagacggggcccgcatgtcagcggcgcacgggtggcctgtctaccgtggaccgggaccacgtgggtggtccaccgccggtccacgggatcgacggcccggatcggcccagggccgatcggacggtgcggcggcggcctggcttggctcggctcggcacaaagccagccggccggccatggcaaaggcggcggcgcgcgcgtgttgccggcgacggcaaccggctgcggaggtggcggcgtaaaggcggcggctcgacccggcgcggctaggaaggagagggaggggaatagaggaggagggggtgcctcaccgaaagtggccggtgcggagggagacgacggcgaacagtgacggcgagccacgggaggacggtggcgatgggcggacgagctccaggatgctctaagagaggaaaagagagagattagagggagggaggtgaaccacggcgatcggaagccatggccgaaggcgatggtagaggtggtgctcaccggagtgcgaggggatgcgggttccggcgacggacctcgacggaggaggggcggacggggtggcccttgaccacgcgaacccgacggcggcgacggcgcggtgcggcggcgagcctagcggcggctagcggcggccggagtagcgggagcggcggcggcgggtggatgcacggcgcgggagcgatggagagctcgggagagttcgacaagatggggaaaaagagagggggtggcggtggagcttaaataggggagggggagctcggacgtggccggtaggggcgggattcgccggccgacgtggggagtgtgggaggagagagaggcgggatttgaaattcgaatcccggccatctcgggcgcgggcacgagcgggagagagggggaaatgggtgcgggagacgcggcgcacgaccggggcggtcgacatggcccggaggaggcgggacgtgggcgcggcggcggtttcggcggtggtggcgacgtggggcgggcggacggaggaaggggacgaccccgacaggtggggcccacctgtcggcgtcccggggagagaggggaggcggccggcctgactgggcctcggcctgcggccggcccagtgggggaagggggagagggagagaatggtccggcggcccattcgaaaaaaaagggaaaaaggaaaaagaaaaaggaagaaaaggatttcctggaattaaatattgcttgtgctatttttaattggttaaaattatttagagggctctgaaaattccactaaaaatcttgttagcgtatttcgacatgtagaacttaagaaaacttccacatgccaaatccgattatgatttgcattaatttattagggttttctcttgctttagcaccaatattttctcgggtggattataaattccattttaggcttaggaaagaacttcagggtgtgacaaacctaccccccccttaaacggaatctcggccccgagattcgaggagctggcgaagaggtgcggatgggcagccttcaactcatcttccctttcccaagttgcttcctcctctgaatggtgactccactgaacccgacaaaacctggtgaccttgtttctagtcctcctttcgctggtctcaaggatatgaactggcttctccacgtaggtcagatcctcctggatatcgatgtgctccgaatcggcctgttcttcgggtacccttaagcacttctttaattgggacatgtggaacacgtcatgaatgccgattatattggatggaagctccagctgataagcaacttctccccttcgttccaagattttgtatggtcccacgaagcgtggtgccaacttgcctttcgtctggaaacggtgtactccccggagcggagtaacacgaagttacacataatctcctgcttcgaaagtgagctcccttcggcggttatccgtgtagctcttctgtcgagactgggcaattctcaacctttccctgatggttctgactttctcttctgcttccgttaacacctctgttccaaacagttgacgctcacctgtctgatcccagaagagaggggtgcgacacttccggccgtataaagcttcaaatggtgccatttggagactaacctggtaactattgttgtacgagaattccgcatatggcaggctcttatcccatgctccaccaaagtcaagtgcacaagctcgcagcatatcctccaaaatctgattgaccctctcagtctggccatctgtccgcagatggtaggctgtactgaaatttaaacgggtccccaattctttttgcaatttctgccagaactttgaagtgaattggctccctcgatcagatattatctttctgggtaccccatgcagacacatgatccttcccaggtacaactctgccaatttctttcccgtataggtggtatgcactggtatgaagtgagctaccttagtgagtcggtccacgactacccagattgaatcgtgacccgatgatgtctgcggcagtccagctataaaatccattccaatttcctcccatttccattccgggatttgaagaggttggagtaaacctgctggcctttggtgctctgccttcactcgttggcaaacgtcgcagagtgcgatgaattcagctatttctcttctcatgctgtcccaccaaaacttttctttgaggtcttggtacattttggtgctgcctgggtgaatggaatactgtgtctgatgagcctcggtgagtatcagatccttcaattccttgtcatcaggtacacacaatctttctcccatccaaattgtgccgtgctcatcctcaaggaagtcccgggcttttccaaccctcatattctttttcaattcagctatttcagggtcatttacttgagcggctctaacctgatccacgagcgtaggccgtgcttccagagcggctacgaacccgtgttcaacaattcccactttgagacgctcaagctcctgctgcaattcttcacacatgccctcgatgcatagggcattgcagtagcttttcctgcttagcgcatctgccaccacattggctttacccgggtggtagtgaatgctcatgtcgtagtctttgattagttccaaccatcttcgttgtcggagatttaggtccggttgggtgaagatgtatttcagactcttgtggtctgtatatacttcgcagcggttgccaatcagataatgcctccagatcttcaaagcatgaaccactgctgccaattccaggtcatgagttggataattcccttcatgtggacgcaactatcgcgaggcatatgcaaccatcctgccttcctgcaatagaacacattcaagcccatggcgagatgcgtcgcaatagacttggaagtctttcatctgattgggcaggaccaaaaccggtgcggacactaatttctttttgagctcctcaaaattcttgtcgcactcggctatccatttaaacttctcatctttcttaagcaactgagtcatgggtcgggcaatcctggagaagttttcgatgaatcggcggtaataaccttgaagtccaagaaaactccgaatttgcgacacggtcttaggtggggtccatttggtaactgactccacatttgctggatcaactgccacgccttgagctgtaatcacgtgacccagaaacttgacttccgacaaccagaagtcacacttgctgaatttggcatataactggtgctcctttaacttctcgagtaccagacggagatgttgctcatgttcttcttcggactttgaatagataagtatgtcgtcgatgaataccgcaacaaacttgtcaagaaattccatgaacactttgttcatcagattcatgaagaatacgggtgcgttggtaagtccgaaagacataaccgtgcactcatacagcccgtaccgagtggtgaaggccgtctttggaatatcctcttcccgaattcttagctggtggtagcctgatcacaggtctatcttagaaaacaccttagctcccttcagttgatcaaacaaatcatcgatccgtggtaaaggatatttgttcttgattgtgacctcgttgagtgcgcgataatcgacgcacatcctcttcgtcttatcctttttctccacaaaaatgaccggagcaccccaaggtgaagtacttggtcgaatgtaccttttctgcagttgctcatcaacctgcttcttgacctctgctagttcattggctgccatcctgtatggtctcttgtagattggagcggttcccggtgccaaatcaatccggaactcaatctccctcttgggtggcttggtagtgaggtcttcaggaaacacttctgggtactcgcagactatgggaatctcttccaacttcctcgaattcctctcctcggtgaccactgggatttccacctcaatctgattcaaggagaccccttgttttggtgagactagtgatttgtacactactgtttctcccttctcgttggtcaaggtgactgtgcgattcgcacaatcaatgactcccttgaacttggtcagccaatccatccccagaatgacatctaggtctttggattcaagaagaatgaggttggctagaaatggtgatctttgaatttctattagcactgaagggctaaaactgaccgaggttgaactatttcccggggtatgaaccctcattggtgtactaagctcttctttccttaacccatgcttccccacaaatttctttgaaatgaaagaacgcgttgcaccagaatcaaaaagtacggtagcagggactgagttgacagaaaacgtacccagtacgacctctggtgctgcttgtgcctcctctacagacgcgtggttgacatgagcctagacgaaccttggcccggcacgcttaggcttcgggcatttgtcagcgaagtggccaagctcaccacagttgaagcaggaccctggctttgctccagtctccttcttggcttgcgcggatggagctgactgtgctggttgcattggtgggcgtggagctgcaccgcggttgggctgacctccatggtggttctggctgctactggcaccctgatggaagttgctggcattgaaagggcggtgctggcggacgatcatggtggtaggtccaccctgttgtccgggagtgaagcgcggtcgctggtggctcccttggttggaccagaactgcgccaccttcctcttcctgtccattttattgcgctgatcctcctgacggattgccttgtcaaccagcctctcaaagtcggtgtagcctcccgatatcagctggttggttagctcgtcatccagacctgccaggaacttttcctgcttctctgcgtcagttcggacatcctccggtgcatatcgcgcgaggcgattgaactcatggagatactccgtcactgtcctgttgccctggtggagtgcccggaattccctcttcttttgtgccacgaccccatctggcacctgcgccttcctgaagctgcgacagaactccgcccaagtgacttccatgcctggcggacgtatggccatgtgattgtcccaccaagctgacacgggaccttggagctggcgaaagcgaccttctcctgatcattacactgcaggagattcagcttcttttctatagcatggagccagtcattcgcctccatggggttggtggtgctggagaaagtgggtggcctgacgcgtagaaactccggcagtttggactgagggggagggggaccaaactgctgctgatgctgttcggcgtgctactgcatcctctggtgcatctgctggtgctggtgctgcatctgctgcatcatggctgccatcatctgagtctgatgtgccattacttgggctagcgtcggattctcggggagtagtgggggaccattgccggaatcactgttgggatgcacaccatcagtgcgctcttcgccgttgctgccctcgcctgttgtgcgggtgccattccaggtgtagaccatctggaggaagagcagacggggaaacggagaaaaacagatactcaggaactaagctttattatatagaaatttaaactgcaattgttctgatctgatttaaaacacttaaacagcaagcaacaatccttattaagacagccatatcataggaacatgatatcgaccgtcgactgacccacaagcgagcaacctaaacacgcaaactaacaagcaaaagctaaacagtcgataaactaatggaaagcgagcctaatgctcggaacggctcctgcggtcggtggagtcgaaggcgtcgtcctgctcgtcaccaggtccctctgagcgactcctggagcctggcagatatgtctcgccgctgcccggctctgagccactggagctactgctgccgcggtcgtggctgccattgggagtagcaggcaaccaacccccattgccactggcggggcccctgacggctgatgctggcgtgaaggagagagcggatgcaggagctgacacgggaacaggagctggaactggcgctggagctgcaggagctgcgggaactactggcggaggtgggttcctgggcgcaagctggatgcgcacgggtgccgttgtcgacttgcggggcgtagtgcggatccggactcctcctggcgcgggtagaccctttaattgagcattctcctccagccggggaacacaaacgacaatgttgacatacagatccacgtcttacaaacatcataaaagtcttacataaatgcagcggaaaacgaaagataacaggagctaagccttgacttgaactgcagcgggaacaccactccacaggcatcctcgacggcacagacgaagcctactcctcggagaacccaccatcggacacatactcatactctggggttggggaaaatagagcaagactgagtactatccattgtactcagcaagtca

SEQ ID NO: 7622 - DNA, 16259 bp, Oryza sativa
agttcaaaaagcagcaaaaaatgattttttttgacatattggagtgtattgggtgcatccgtatcgaaaaatcactccatgactcgcgcggcaaacttttgtcagttaatgccaatattgtcctatatgggcacacgtgggtgcgatgtttttcaccggaatgaaaaacttcaaaaagcaccaaacttgattttttgacatattggagtgtattgggtgcgtccgtgtcgaaaaatcactccgtgactcgcgtggcgaacttttgttaattaacgccaatactgtcctatattggcacacgttggtgcgatgtttttcaccggaattaaaaagttcaaaaagcagcaaaacatgattttttgacatattggagtgtattggcttcgtccgtgtcaaaaaatcactacgtgactcgcgcggtgaacttttgtcaattaatgccaatattggcatatattgacacacgtggatgcgttgtttttgaccggaatgaataagttcaaaagcaccaaaacatgatttttggacatatttgagtgtattgggtgcgtccgtgtcgataaatcactccgtgattcgcgcggcgaacttttgtcaattaatgccaatattgtcctgtattggcacaggtgggtgtgatgtttttgacgggaatgaaaatgttcaaaaagcaccaaaacatgatttttggatatattggagtgtattgggtgcgttcgtggcaaaacaatcacttcgtgattcgcgcgccaatattggcaaacttgggtgcgatgtttttgaccagaatgaaaaagttcataaagcaccaaaacatgatttttggacatattggagtatatcgggtgcgttcgtggcaaaaacatcacttcgtgattcgcgcaccaatattggcacacgtgggtgcgatgtttttgaccagaataaaaagttcaaaaatcatcaaaacatgattttgggacatatttgagtgtattggttgcgtgattttgggaaatattcgaaaaatcactctgtgactcgtgcggcgaacttttgtcaattaatgccaatattgtcctagattggcccacgtgggtgcgatgtttttgaccggaatgaaaaattcaaaaagcaccaaaatatgattttaggaaatattggagcgtattgggtgcgttcgttgcataaaatcactctgtgactcgcgcgacgaacttttgtcaattaatgtcaatattcgcctatattggcacacgtgggtgcgatgttttcgaccgaaagacaaagttcgaaaatcaccgaatcaagatttttggacatattggagtgtattgggtgcgttggtggcgaaaaaaaacttcgtgattcgcgtggcgaacttttgtcaattaatgccaaaattggcacatgtgggtgtgatgtttttcactggaatgaaaaagttaaaaaagcacccaaacatgagttttggacatattggagtgtgttgggtgcgtgcgtgtcgaaaaaccactccgggactcacacggcgatcttttgtcaactaatgccaatattgtcctgcattagctgtaacaccctgaaaattcaagacaagaaaaatcactaaaattttgaactttttaaaacttttgcatcatgttggatgttgtggttgcttttacttgccgagctataaattgtcacaatggaaaatttaactaaagttatacaactgagtaataattataacaataagatatttatcatgaaccctataaatatttacgcacaagaaagcaaagtcagacaaaaggaaggttaattactaatttaacttatggatcaaatattaaataccgaaccatgtgatgcgtgccatgaaatataaacacttaggaaattataatcgttcagatcaatggaactctatctatagaatagatttactgggaaaaattaatctgatattatataatttgaattgaatcacgaatgctaaattatagaaatccatgtggtggtaaaaaccaatcaaaaagataaaccaatatgtgtgaaaacggataaataccaaaatcccaaatataggaaaacaggaaaaattagaaaaatacataataaaaataaaatgtgggcaatattaagtttgaatacaaatttacatttgaataacttagattttgtgtgaaacacattgtgacaaaataggtggcaatagtccattttctaaattagaaaaacatctaataaaatccaataaatcagttaacactgttcattgccccctaggtgcttgaccctgtcccatcgccgcgcctagccctgcccctactctgccgcgccacgcctagccctgctgcgccactgccttgtgccccgcgccgccgcacgccgtcatgtcgccgtcgccccgacgcgctgtgcgccatcggttcgcactgcgcgcgccgctgccgtgccccctcgcgtcccgtcgtgccgcgcgccgtcgccgtcgttggtcgcatcgtctcgagccccactcctccgcgcgtgccttcaccgtcgcgtcatcatcatcgtcgcgtgtcgccatcacctcgagccccgcgccgctcgtgtcgccgtcgcccgtgccgcgccgagccccgcgccgctgccgcgccgtcgtcgtcgcccgtcgcgtcgcccttgagccccgcgcccccataccaccgagtcatgcgcgtgcgccgcacgaacgtcgcgtcaccgtggttgtcgtgctgccatcgccatcgcgccgatgcatcgccgcctgtcgccctcgcgactgcgcaccaccgcatcgcccatcccgtcgccgtgcatccgttgccgcgccccctcgcgtcccgtcgcgccacgcgccgtcgctgtcgccgttgcgtcggctccactgccgcaccgcgcgccatcgccatcagcgcctcgagacccacacgcgctgcgcactgtcgctgtcatcattaggcaccgcccaacccctccgcctatataaacccccccgggcgcccattgcttcccacaccaccctcaccacctcccctccctttcccctctctttcccgtccccggcatcgccgcctctttggaagccaccgccgccgctgagccgacatgccccgccgccgcgctgtgcctcgtcgccacgccgtgctccaacgtcgacccctccgctgcgtctccgttgaccccgccgtcagtccggtgagccttcccctcccccaccgcttgacgtcgcgccgcgccgcccgccggttccagccgagccgcgagagagagaggaagcaaagaggttgcgcagagagagagaagagaaaggagaggagagaggttagagtgggccccacgtgattagtaaatagtaatccccttcttaatctttataagttaagtctattacatgtgggtccgagtggttaaaaatctagttatggagggtttataattttgagtctatgacaagcgggccctaccaggtttaatggccggtttgaccctagtcaaaggagtcgggcccacctgtcatttgcccatatggattcctttagaaagaaaaataaaataaaagaaaagaaaataggaagaccgcacctgtcaggcactatagcttgtggataaggttgtattaaaaataaatgaattaggaacagtacaatttcgcaattattagatttaattcaaatttgaatctttacactagcataacttattcattttagctccgatttgagtgaaacttgaatctaaattcatctaaattcataagctttccaatggtatataattcactatttgataaaatatatttataattattaaataattaatatcaagatgatgcataatagttaacttaaaaatgtgccaataaataaaattgatattgtactgtaaagtagatgtcaaataattgtctttaacacgctttctcactgtaaaacctatgtaaactaatgaggagcattgtttcaaattaattaaagcataggaaatactagtgccatttgttaatatatgtcaatatataattatactcatgacgtccaaattgtataaataatgtttagcctcatactttgtgactaaaattttaacacacgtagatgagtctttaacttatttatgagagataataacagagctagtgtgactaaaatcacccgcacgaaattaattaacggcatttcctatacagtagtatatgtttaggttggaaatcgacccttaagttgtatagacggtaactcactcataaatccacttaaaatcacatgtactgtgtagcttgtagtaaatagcaactattcaaataaatgattcaatattaagatattgtgcacacacctatactgtacatcccattatagctatacggtataatattaatttgcttgttgcatatattaaattagagggactatatgacaaacatgaatattagataaatactagttataaatcttgacctcatataattatagttcaattgtaaattaggattattcattgtaaaattatgtgatgggataatctgtaaccataatatgattatcctaaacaactctaacatacaaagcatggataattattaaccttttataatttattgtgacaagtaaaatattttcataattaaagaaaagcctccatcaataaaataataatacaaatggttccctgtgattaattgcttgatcccaaatccatccgacgacaacagaacctctagtatatatatgaccattttatttagatagatgcatgtgtagccataatccttccatagccattagctagactaaaccacatattagccaaatgtgtatctcatttatactatgtcggctagctccccataaaccaccatgacaacagaaagattaagaaactttagcccttagcatgattggaatcccctagcaaacaataatagtacgagcaaccctaggtacgaccaacaagtacattttgttgtgcatatttgattgttgtttgaatattggtttttctcgtgtattgtagacattgtatatcggttagtcgtgaggcaatgtatgcaacttctaggaggtgaaggttgatcaagattgtatcaagaataaggactatcctgagcaggcaagtcatcactattccttgaacatgttgatcccaattgcaaaattgttttgtttacaaataaaattgcaagcaatgataaacatcctacttgtgattacgccatgccttgattattgtttacccttaaaatccttgtaaccacgattacgtatgagtccctagtcaattatgacaattgcttagaaatgctattctagaatcatgcatactcatatttatcaaatgctatatgcttgggcaattacctttgggaaggtaattgagatgcggcatgtggagacatgagcaccacattgccatgatattgatgacatgatttgtgaaaggagaaataaaactaaacaacagttttcgactggggcggacggaggatttgggtggtatcttgaaaaggctagtaccgtcccctgtcaattaaggactgagccatgaagttaagcttgaaacgacccccgtacaaccgtacttctcgaatgggtatagacctagcggattagatagccgagtggaggcagtatcccttcatagatggttcacccctgagtgaggcaggtgcggtacggtggggcagccgttgaggtagggccgcaaggcgtgccctacatcagtgtcgccatttgtaggactaccatgagagtgtgagagagaacttaatgtgtgtgtgagacttcttccccgggagcgccagaactcctctcactgctagaaacatggatgcctgagtgcatgaggaagtaagttcgtggagcgggtactgccaatgcgaggttatcgaaaggctttgccgtgacgcgtctcatgtgttgggacgaggctcatgtgttgggcagtcgctgagtgcgggtaaagtgtacatccactgcagtgtgagtaaaccaaatctattcgaatagccgtgctcgcggttattgagcaccgggacgtgtattacacttggctagactctaaattcttaacttgtgtgggatgggatattgcataatgatttttatgctgatggagccacttcctgagaagagtgaaggtggtcgtcctcagaaaaccatgacgactcaatggcgggaagctatccttgggatcacaatggatggtagacagaaccgtcgttgtttaatgagaacattggtactaaaatttgatcagtctatgctagatcttaggcttgtgaaaagatttgcaaaacttgctttacgcaaaagaacctgaagccgttccttgaaataccctctatcatatgcattgttgctgtggtggcttgctgagtacggttggtactcacccttgctatttatatatcttttaggagagtgttaaagagaatcccttgtcggtacgcttgcgtatccaacaagatgattggagtgcggtcttgttctaggtctcgttccccagtcgactacctgtagcatgttaaccgggcccttatattattttgtcttccgttgttgttctctgatatttgttggcctacttggccctaattgttaacaaccaaatttggtaacctcagtatcggaaatgaagattggatcgaaacagaatcaaatacgagtatcatttcggaaacagagcaagaatcggatggagtccaaatcggctatgaccagatcggctgagtccgaatcagatagggttagccgatacagccgattccggcaatatgacttggtttacatcatcaggctgagttaatgtgcttcgtgtggattgccacacatggatagagtcctaagaaggcaattgtatctattaattaggatattttatgtaatttccttagagataagtgtgggcaaaagtctgccgcaaagacttatggtatcttagaatttgttagagataagagtcgtgtccgacaaggacatattttgtaatcttgggtataactagaccccgagccccatgtaataaggaagacagacgttcaaatacaatctcggcgcatcgcccatcgccacccttttgctttcgttttatttcgacgagttcttgctttcgagttgagctgcatcggtttcgatcttcaactagaggtatgacttgctatggcagcttgcgttctcgggattagtgcttccatcattatgatactctaatcttgtctatgtaagttgtcgagttatcatatatcctatataatctctgacaatatcgctttctaacctccaattggctaatatctatcgctagggagcagccgattaggttaaatatcgatgttggcttagattatataagatattcaccactctatgaagctcccaatagcttgattgtctagatattgtatttcttttcgtacttatggctgcatcagttgagtttgatctgatgagtcatgcttagaactataatctcgagcctgcttcttggttgtcgattagagtagtatcggggtttcagccgatcttaactgatttagctctatatttatttcatgtgctcaagtgaaacgatagatctgccctttatattaagatcttattgcttttagatatgttaagcttcttgtttgatatattttactcgctttaatatcttagtttagagtggtatcggagtattagctgatacatgctagatctatcttatcggctatgctgtgaacatatataatctcattattaatataagtttagatctaagtgatttatactatctcggcatggcgaccgatctatcccaatcacttgatttaagtatatattgacataaggattatatattgttaatgactacagccgatcgaatagatttagaccttccttatttattcatgactgtcgatcgatgcaaagatgacatgggcccaaagataaatgatacgtcatcggcgattggccgatcggctatcatttatggattaactacggtttctttgtctttatttcttgttgattacaggatcaaatcaactggcacactcacgaacctaaaaaggtgagattttggaccttcactggagttaagcagatctcccaggccggtgtgttcgattttttcgtcaacacgctcttggcacgcccggtgggacccgagttttcaacgacttcatcacgatggctgaaaaaccaccaccgtcaccggggacaggagtcaaacctcctgtaaataaaacaggagccaaaaatccatcagctgaagtggacccaaccaacattgttccaatcatattggataggctgacggctgagtagagggatgaacttgaacagatgatgagcaacgtgaagagcaagttcatggattcttttcaggatcgcagaggaaccattgtacagaagtacaagctgaaggtggttgcagccgatgaggtcggcttgagttcatctcagggtgacaaaggtactacaactggctcaggtgataaaagtggcgttcctcaagatggtgcagttgaagaccttggtatagatggcaaccaagagccgttgcagttcaataattttcaagataggatcgactatgccgtgcaacatgccttgatgaatcaatctggagtattagttaataccttaaccaacatggtgaaaactgttgttgatggttcgatagccgagcaccaagcctcaggtccagtctatctaccaggaggtgtttttgccaaattatagatctgtggttacggcaaatcagcagaatacctctaatacactgccggctcggccgacggctccagctactgcacaagctacatcgtcagcaccaagacagatggttaacaccagattgttgaccagggaacaaccacaacatcttgggaaaaatgccaatcggctgactcaggagcaagttgctgcaacgtttttgccaaatccatcgatagccgatccaacacagccgttgccgacccagcaagcacaaccgagacagcagacggttcagccgactcagcatcagaatttgcagcatgcatcggcaaggttaagaacacctgacaatcggccagtacagcatacagtaaaccaagtgattcctgaacacttggtccatcacgtataggccgatcaatcagttgtgcctcaaattatacctgaacatttggtgcataatatttagccgaatcttcagaactatcaaggaggaaatctaggttatcaatatcagcctccgtcacctcatgttcagtatcagcagacagggtcgccccagcctcagtacgctcctcaattcaatcagtttgagccgatgcaacaacaaatgcaaggagtacctcagcatgcgtcattggctgatatgatcgcagatgtaatgagtgaacagtttgggctcaaaccaaaagacaatggaaatttgtatcggcatccttatcctgagtggtttgagagggttcaattgcctagccaatacaaagtacctgacttctccaaattctcagggcaggataatgtttcaacttatgaacatgtcagccgattcatagctcaatgtggtgtggcatcggctacaaatgccttgagagttagattgtttcctttatctctgtcaggatcagcatttacatggttttcttccttgacatataattctgttaatagttgggccgatttggaaaagcagtttcatagttatttttacagtggagttcacgagatgaaactgtccgatttgacagcaattaaacaaaggcacgatgagtctgtgcaagattacattcaaagatttagggagatgagaaacatgtgttacagtttatctttgacagattctcagctagccgatttggcttttcaggggttgatagcaccaatcaaagaaaagttttcggctcaagattttgagagtttgtcacatcttgcacaaaaggtgactctacatgagcaaaggtttattgaggccaagaagaacttcaagaaaatcaatcatgtatatccttacatgtatgattctgatgatgaggatgatgattccgaagtagcagcaaccgaatgggtcaagagcaagaaagtcataccatgccaatgggtgaggagctctggaaaagaggaaagatttgacttcgacatcactaaggctgacaagatttttgatttattacttcgggaaaaacagattcaacttcctgctggtcatcagccgaagagttaggcaaaagaaggtattgcaagtggcataattctggttctcattctaccaacgattgcaaagtgtttcggcagcagatccaggcggccatcaaggggggaaagatcaaatttgatgattcaaagaagctgatgaaggttgatggtaatcccttccctgttaatatggtgcatacgtctggaaggacagccgatggtgggaagaacagaaattttcagatgaattcggctaggattatcaacaagtaccaaagaaagtatgataaacagtaggagaaatatcatgaaagagatggtggttttgatcctcattggaattgtgaatttttaagattctgttggaatgaaggtatgaggctaccatcgattgaggattgccctggatgcaatgaagatgcagggaattcaagccgatccaataatagaggtaatcggctgagccagaagagagtatctgttcatcagaggttgggcccggtcaatcaagatggtgattatgatgaagatgaagataggaagacacaatggtgtcctacaggcattttcaccaagaatcagaagagaagggtgcaaaggttgaggaacagggagcgttttcaggaggtgcagcaagaaattaatcatcggctagggaaaacaaaaaccaggcaagaatggcgtgttaagcgcataattacaacagccgatgaagttgaggccgacaaagcaaaaagggtgctcaagggtaaggctgttgcatctgcatcggtgaacatggttttcatgctgccagccgaatttgaagccaagcaagtcgaagttattgacgttgaagaggcttcggctaagttagttttgtcaccagagcaagcaatctttgagaaaccggaagggacacaaaatcggcatctcaagccattgtatatcaatgggtttgtcaatgggaagctgatgtctaagatgattgttgatggaggagctgctgtgaatttgatgccatatgctacattcaggaagttgggcagaaatccacatgatctaatcaagaccaacatggttctcaaggattttggtggcaatccatcagagaccaaaggagttttgaatgtagagctaacagtcggcagtaaaactgttcctacaacgttttttgtcatcgatgggaagggttcctatagcctgttgctcggaagggattggattcatgctacttgttgtattccttcaaccatgcatcggtgcttgattcaatggcagggtgacaagattgagatcgtgccagctgacaggtcagttaacgttgctagtgctgatttagctatttgggagatggatggtattgattgcttgtctggaaaagtttgggaacagtcgattgaagatcgagagcccaaattattattttgagggcgttgtggagggttcaaacgtctacaacaaggacacggtagatgatctcgatgacaaacaaggacaaggtttcatgtcggccgatgatttggaagaaattgacataggtccaggagatcgaccatggccgacatttatcagtaaaaacttatcttcagaatttagaaccaagttgatagagcttttaaaagagtacagggattgctttgcttgggaatattatgagatgccaggactcagtcgatcgattgttgaacatcagcttcctattaagcctgggattcggccatactagcagccaccaaggaggtgtaaagccgatatgcttgaagctattaaggctgaggtaaagcatttgtatgatgctggttttattcgtccatgccgatatgctgaatgggtttcaaatatagttccagtcatcaagaagaatagcaaagttagggtgtgcattgattttcgaaatctaaacaaggctacgccaaaggacgagtacccaatgccaatagtcgatcagttggttgatgctgcttcaggatataagattttgagttttatggatggcaatgcaggttacaatcaaatttttatggccgaagaagacattcataagacagcttttagatgtcctggtgcaatcggcttgtttgagtgggttgtgatgactttccgcttgaaaagtgctagggccacatatcaaagagccatgaatcggctggttggttgaagtttatattgatgatgtggttgtcaagtcaaaggaaatagaagaccacatagccgatttgagaaaagttttaagagaactcgaaagtatggcttgaagatgaacccgacaaaatgtgcttttggcgtatcggctggccagtttttgggatttcttgttcatgagagggggattgaagtgactcaaaggggcattaatgcaattcagaagattcaacctctagaggacaagacaaagttgcaggagctgatcggcaaggtaaattttgttaggagatttatatctaatttgtttggaagattagagccttttacacctttgttgagattgaaagctgatcaggagttcacttggggggcagaacaacagaaagctttggataatattaagaaatattttagttccccaccagttttaatttctccacaaaaaggaatacctttcagattgtacctatcggctggtgataagtcgatcggctcagtgttgattcaggagcttgaaggaaaagaaagggctatattttacttaagtcacagactattggatgcagagacaaggtattctccagtggaaaagttgtgcttatgtttgtatttttcttgcaccaagttaaggcattatctattgtccaatgaatgcactgtgatatgtaaagccgatatagtcaaatacatgttgtcggctccaattttgaaaggaagggttggaaagtggattttttctatagctgattaagggacaagctatagctgattttattgtggatcatcgtgatgactcaatcggttcagttgatattgtgccgtggactttattttttgatggatcagtgtgcactcatgattgtggtatccgcttggttatcatttcacctcgggggccaagtttcgagtttgcctatactattaagccctatgcaactaataatcaagctgaatatgaggcagttctcaaggggttgcaattgttgagagaagttgaagccgatgctatcgaaattatgggtgattccttactggttattagtcaattggcaggagaatatgaatgcaagaacgctacgttgatggtctataatgagaagtgccgaaggttaatggaaggatttcggctaataactttgaagcatgttcctcacgagaagaatatagaagctaatgatttggctcaaggggcatcaggatataagccgatgtggaaggatgttgagatcggagttgctacgatcacagccgatgattggagatatgatttgtttcaatatttgcacaatccatctcagtcggcttcgcggaaagtacgttataaggccttacaatacacctggttggataatgaactatattattggacgatcgatggggtgttgcttaagtgtttgagcgttgatcaagcaaaagttgcgataggtgaagtacatgaagggatttatggtactcatcaatcggctcacaagatgaagtggttgcttcggcgtgcaggatatttttggccgacaatgttggaagattgcttcaaatactataaaggatgccaagattgtcaaaagtttggggcaattcagagagcaccagcatcggctatgaatcctattatcaagccatggctgtttagaggatggggtatggacatgatcggccagattaatccatcttcaagtaagggacatacgtttatattggttgcgactgattatttcaccaagtgggtagaggctattcctttgaaaaaggttgattcaggagatgctatccaatttgttaaggaacacataatcaatcgatttggtattccgcagaccattacaaccgatcaaggctctatatttgtatctgatgaatttgttcaatttgccgatagcatcggtatcaggttgttgaattcctctccttactatgcacaagccaatggacaagccgaggcttctaacaagagtttgatcaagttgattaagagatagatttctgattatcctcggcaatggcacattaggttagccgaagcattgtggtcttatcggatggcttgtcatgggtcgattcaagttcctccctacaagcttgtttatgggcatgaggcagttttaccatgggaagttagaatcggctcgagaagaacaaatttgcagaatgaattgacagccgatgaatattacaatctcatggccgatgaaagagaagatctggttcagtcaaggctgcgagctcttgcacaagttactaaggataaggaaagggttgctcggcattataacaacaaggtggtgcctaaatctttttatgaaggagagcttgtttggaagttgatcttgccgattgggactcgttataataaattcggcaaatggtcaccaactagggaaggaccatttcaaatacataacgttgtgtccaaaggagcttatatgttccaaggacttgatggagaagtttatggacgaccgcttaatggaatatacttgaagaaatattaccgcttaatggaatatacttgaagaaatattatccaagtgtttggcacaggtggatgcgatgttttagaccggaatgaaaaagttcaaaaagcaacaaaacatgattttcggacatattggagtgtattggctgtgttcgtggcaaaaaatcactacgtgattcgcgcggcgaacttctgtcaattaatgctaatatttgcatatattggcacacgtgggtgcgatgttttacaccggaatgaaaaagttcaaaaagcaccaaaacatgatttttggacatatttgagtgttttgggtgcattcgtgggaaaagatcacttcgcgattcgcgcgacgaactttcatcaattactgccaatattggcacacgtgggtgcgatgttttagaccggaatgaaaaagttcaaaaagcaccaaaacaagatttttggacatattggagtgtattgggtgcgttcatggcaaaaaatcacttcgtgattcgcacggcgaaattttgtcaattactgccaatattggcatatattggaacaggtgggtgcgatgtttttcaccggaattaaaaagttcaaaaagcactaaaacatgatttttggacatattcgagtgtgttgggtgcattcgtggcaaaaaatcacatcgtgattcgcgcggcgatcttttatcaattactgccaatattggcatataattgcacaggtgggtgcgatgttttagaccagaatgaaaaagttcaaaatgcaccaaaacatgatttttggacatatttcagtgttttggttgctttcgtggcaaaaaatcacttcgtgattcgtgcggcgaacttttgtcaactaatgccactattggcatataattgcacagatgggtgcgaagtttttgacaagaatgaaaaagttcaaaaatcaccaaaacatgatttttgaacatattggagtgcgttgggtgctttcgcggctaaaaatcacttcgtgattcgcgcggcgaacttttgtcaattgatgccaacattggcatatattggcacacgtgggtgcgatgttttagaccggaatgaaaaagtttaaaaagcaccaaaacaagatttttggacatattggagtgtattgggtgcgttcatggcaaaaaatcacttcgtgattcgcacggcgaaattttgtcaattactgccaatattggcacaggtgggtgcgatgtttttcaccgaaattaaaaagttcaaaaggcactaaaacatgatttttggacatattggagtgtgttgggtgcattcgtggcaaaaaatcacatcgtgattcgcgcggcgaacttttatcatttactgccaattggcacacgtgggtgcgatgttttagaccagaatgaaaaagttcaaaatgcaccaaaacatgatttttggacatattggagtgtattgggtgcgttcgtggcaaaaaataacttcgtgattcgcgcagcgaacttttgtcaactaatgctaatattggcatatatt

SEQ ID NO: 7623 - DNA, 12743 bp, Oryza sativa
agctcatcaggacttacatagcgataaaataatgagaaattagatacatactaataataataataagagcattaataccttgcaacccatattcctgagttaggacctaatgcattcctcccatcaaaccctagactgacctaatttgacaaatctcacttaaacgagcgaccaagatttttcccttgaaccacaagaacagatcccaattttcccggaacaaatccaattgcaaagaacatatgcaatgaaaaggattcagagggctcttaggttttttcccatttggcttgtcctacggtcaaggttggctctgataccaagttgtcacgcccagaaattcccgaatagaattccaagcagaatgtgcattaaaatccccatccaggaccggccggggggtacacaaacgacaaagttgacatacagatccacgtcttacaaaaattataaaagtcttacataaatgtagcggaaaaataaaagataactggagctaagccttgacttggactgcagcgggaacaccagtccacaggcatcctcgacggcacgaacgaagcctattcctcggagaaaccaccatctaacgcatactcaaactctggggtttggggaaaatagagcaagactgagtataaccaccacactcagcaagtcataccggaacagggggtatgatgcaggatattaccaaaggatagctagagaggttcttttgcgtaaaacgagcatttataaacagtagttgaaagcaggaaatcaggtgtaataattaatcaatattagccatccactgtccaacgctacaccacgttgcaacaggcccaaccaaccacctgaactaatcagttccatcatattaaactagggtgagactaatcacggtgaatctggttgaccgcccataaccgcgggcaaggctattcaaatagttttactctgatcagaggtgtacaactgtacccacaaaacacagccccacgacacgtttccgtgcgccgacatgccaccacgacataccggaaagaggccgtgacaggactcttcgcataaccccctctagccaagcacactacacctcaggtttcacccccgtccccagtgggcaacgggcagtcccctctcgtgcctaggtgaatctggaagcgacaaaggccgtcgcagggcccgccctgctccatcacacccacccttgcctggatgcgtcaactagaggaaagctacactacaagcccagccgttgcccacgctggcttgtggtaagtacgataagttcttccagggcatcccgcgaaccggtccttaaatgccatgggcgcgaccaacaaaaccatgcacccacagcccaccatttggtatattttaattaaccaacaccggggcggtggcattaaccaacgtcattactagaatctgatatctatgcattaatgtgatttcccccattgtgtgctagttgaactaagcatggctaagcaatccctagtccaatctctagtcatgtttatatcccaagctaacaaaggagcatggtacagaaatagcatggctgtaacagtaggtaaacatcccatagtatcattatgaaacaatgcaatatttgaaggaaaacaatagaacatttgcaatataggatcaacatcttcaagtgacaagcatgacttgccttgctctgctgctggaggaacctcggcgactatttcaaagtacaccggagcgtcgggagagccggaatctaagcgacatacaaagcaaacaatacaaacaggctataagactactgaaacagagaacaaaaccattttgaatggattctacacatttttcttgatttactgagacttgaatgggcttaaacggagctcggatgaattagatatgaattttagaagattcacagaaaaatccttaattgatttattgcacaataaataaaccctaggagagagggggcagcgccgacatgcgggccccacatggcagtgactccggtggcggtccgcggtggaccgagtccacggaccggggaagggggcggcgcaccacgtggcactgacgtggcgccgacgtggcgcacacgtggcggccacatggcacgccacgcgggtggccgaaccgacgtccccgatctacccgagagtagatcggacggcggcggggagcacgcggtcggcacacacgagcggcccaagccggcccgatggccacggtgcacagcggcgctaccgcagggcggcggcggcagacagcggtgaccgacggcaagcggcggcggcgcgacggcgcgggtgatgctagcggcggctaagcagctaggcggcagcgcggcgactaagcggcgtgggagagagagggaggaaggggaggaggtgtctcaccgacggcgattgatgacggcgagcgacggagggcgatgacggcaacgggacgagctctggaaccacctagcgaacacgatgaaaggggttagagagagaggaagatggaagagggcgaggacgccggccgaaggcggtggccatggcggtgctcaccggcgcaaggcgcggagtgggttccggaggcggaatccgacgggagaggggcggacggggtgacctgcacgacggcgaacgtgacggcgtcgacgacgcggctcggcgcagcggctagcggcggctagcagcgaccggagcggtggcggcggcggcggaaaggagggcgacagcgctagggcgatagagggcacgggagagctcgcgaaatggagaaaaagagagaggggagagtggggatgcttaaataggggagagggagctcgaacgtggctaggagaggcgggaatcgccagccgacgtggggtagtgggagaggagagagaggcgggatttgaaaatcgaatcctggccgtctcgagcgcgggcgcgggcgggagagagagggagtgggcgcgggagacgtgggcgcacgcgcgggcaaggccgacgtggcccggaagacgcgggagtgagggtgcggcggcggctggaggttgggggaggactcgacaggtgggccccacctatcggcgaccccgggagagaggaggggctcgggcggccagcccagcgggaaggggagggaggagagaatgggccggcggaccattccgaaaagaaaagagggaaaaagaaagaaaaataaggaaaagaatttctagggaattaaatattgcttgtggtcatttttaattgattaaaattatttctagagctcttaaaattccactaaaatcttgttagcgtatttcgacatgtagaactcaggaaaaaatcccacatgccagttccgattattatttgcatcaattattttagggtttctctcttgcttttgcagcggtattttgttgagaccatttataaattcaatttaggcttgggagaaaaatctcagggtgtgacactcacccaagatactccaatatgtccaaaaatcttgttttggtgctttttgaactttttcattccggtgaaaaacatcgcacccacgtgtgccaacataggccaatattggcattaatttacaaaagttcgccgcgcgattcacggagtgatttttcgacacggacacacccaattctctacaagtatgtccaaaaacatgttttggtgctttctgaacgttttcattccggtaaaatacatcgcacccacgtatgctaatataggccaatattggcattaagtgacaaaagttcgttgcgcgaatcacggagtgaattttcgacactgatgcacctagtaaactccaataagtcctaaaatcatgttttggtgctttttgaactttttcattccgggaaaaaacagcgcacccacgtgtgcgaatataggccaatattggcattaattgacaaaacttcaccgcgcgagtcacagagtgatttttcgagacggacgcaccctgtacactccaatatgtccaaaaatcatgtttttggtgctttttgaactttttcattccggtgaaaaacaactcacccacgtctggcaatataggccaatactggcattaattgacaaaagttcgccgcgcgagttacggagttatttttcgacacggactcacccaacatactccaatatgtccaaaaatcacgttttggtgctttttcaagtttttcattccggtgaaaaacatcacacccacgtgtgccaacataggccaattttggtattaattgacaaaacttcgccgcgtgagtcacggagtaatttttcgtcacggactaacccaacatactccaatttgcccaaaaatcatattttggtgctttttgaagtctttcatttcggtgaaaaacatcgcacccacgtgtgccaatatgggccagtattggcattaattgacaaaagttcaccgcgcgagtcacggagtgatttttcgatacagactcacccaacagactccaatatgtccaagaatcattttttggtgctttttcaagtttttcattccggtgaaaaacattgcacccacgtgtgccagtatatatctatattggcattaattgacaaaagttcgccgcgcgagtcacggagtgatttttcgacgcggacgcacccaatacactccaatatgtcgaaaaatcatgttttggtgctttttgatctttttcattacggtgaaacccacgtgtggcaatattggcatcaattgataaaagttcgccgcgcgagtgacaaattgatttttctactcggacgcacccaatatactccaatatgtccaaaaatcatgttttggtgctttttgaaatttttcattccggtgaaaaacattgcacccacgtgtgccaatagatgtctatattggcaataattgacaaaagttcgccgcgcgagttacggagtgatttttcgacacggactcacccaacatactccaatatgtccaaaaatcatgttttggtgcttttggaagtttttctttccggtgaaaaacattgcacccacgtgtgccaatataggccaatatcggtattaattgacaaaagttcgccgcgcgagtcacagagtgatttttcgacacggacgcaccctgtacactccaatatgtccaaaaatcatgttttggttttttttttaactttttcattccggtgaaaaagaactcacccacgtgtgccaatataggccaatagtggcactaattgacaaaagttcgccacgcgagtcacggagtgatttttcgacacggactaacccaacatactccaatatgtccaaaaaatcacgttttcgtgctttttcaagtttttcattccggtgaaaaacatcgcacccacgtgtccaacataggccaatattggtattagttgacaaaacttcgccgcgtgagtcatggagtaatttttcgacacggacacacccaattatctacagtatgtccaaaaacatgtttgtgtgctttctgaactttttcattccggtgaaaaacatcgcacccacgtgtgccaatataggccaatattggcgttatttgacaaaagttcgtcgcgcgagtcacggagcgatttttcaacaccaactcacccaacatactcaaatatgtccaaagatattggcattagttgataaaagttcgccgcgcgagtcacaaattaatttttctacacggacgcacccaatatactccaataagtccaaaaatcatgttttggtgctttttgaagtttttcattccggtgaaaaacattgcacctacgtgtgccaatatatatctatattggcattaattgacaaaagttcgccgcgcgagtcacggagtgatttttcgacacggactcacccagcatattccaatatgtccaaaaatcatgttttggtgctttttgaagttattctttccggtgtaaaactccgcacccacgtgtgccaacataggccaatattggcattaattgacaaaactttgccgcgcgagtcacggagtgatttttcgacacggacgcacccaattctctacagtatgtccaaaaacatgttttggtgctttctgaacttttttattccgctaaaattcatcgcacccatgtatgctaatataggccaatattggcattaagtgacaaaagttcgctgcgcgaatcacagagtgaattttcgacacggacgcacccagtacactccatgtggagaatatggatatcccatatctacatgacagttataatttagtcggatatacggtaccaaatatagatagaatatctttatgaagactcgggtttgttttttacttgtatgtcaaggaaatacccgagatcttagtcggttaggattgtattttatctataatcccatattccgttaggatatggactgtattttgtaaagcggactccttcccctatataaggagggtccgtgtgcctctcggggcgcaattcttttttccaatatatacaatcaataacatactcggcggaatcatccccggacaggagtagggtattacttcttgaataagaaggcctgaacctgtataaaattccttgtctccaaacccatccactttcctagcttgatagccacccccttttattattgccgaaatcttgtttcgacagttggcgcgccaggtaggggcagcgtcaagtttttgccgactaagtgcgatgggttccatttctggcatcgacgacttcgccttccctcccgggcaggcgttccggttcggcagcctcaacttcatcaccaacgacttcagcaagatctctctccttgactcggattcgaaccagtcagggagagaccaggtccccgtgccgttcggtattccgaactcggccgaggcctactccaagatcatatcttccgagtcggcttcaaaccactcggacgagatccaatctactcctccgcgaccagatcaagacgacgggtcctatccttcaatcttgatgaaacttcctgatgacttggacgccgtcttcacagtcaaaacatctcccactcagagatctaggcgagctccggcatcggccctgatccagtctagatccagggaggttggcgttatactccaacttcttgggacagtctcgacggaagatttggatggctacctcagctcccccggcgtcagttctcgaccaaccgagatcctcgactacgacgaccacgacgacctcgacaacttcgacgacagctatgaggataactacacgcccctcttcttcggtgtattcatggctgacaacgaaacggaggaacagcgccgagcccgagaagcggaccaagatcgcgcacggcaagaagctgaacgtcgccgactggaggaagagcgacagcgacaggagcgagaacgactatagcgtgagcaacaagatcgcgaacggattgcaaaggaggctgaagatcgacggcaacgcaccttggaatccgggaggcgagcgagagagctcattgggcaacaagacgtcgacggaacagcggtctttcgcaccccccagcagaacgcggttgcagcaatcactctcctcgacaccctcctcaaggaagacgcactcaaccaagctgatcatgttgtcaacatcttgaaccagacgaagaccatgatcgcttcctcgggtccagccaactccgcaagcacccgcaccttgactggtagccgagtccctcatcttcgatctcaagactatcaccagccatgcctcagcattgccagtgccggatctagtcacaggagcagaggacatgatgaacggtctgttcgttcacctcccgaacggtatagggagcgtcgagttgaacgaccacactccccacatcgaaggcgccccatcgatcttcgcgacaccatcaactagcgccgtccagcaagaggccaccattcaccagatcgttacgacaacgatgtggacggagttgctgccttcacaagcgatctgcgtcgagtggattggccagccggctttaagccgactggaattgagaaatatgatggcaccaccaaccctgagtcttggctcaccgtctatggtctcgcaatccgcgcagcaggaggagacagcaaggccatggcaaactatctgcctgtggctctagcggattccgcccgatcctggctccacggactaccccgtggcacaatcggatcatgggcagaacttcgtgatcacttcatcgccaacttccagggcacctttgaacgccccggcacacagtttgatctctacaacgtcgttcagaagtctagaggatcccttcaagattacatccggcgcttctccgagcaacgcaacaagatctccgacatcaccgacgacgtcatcattgctgcctttactaaaggcattcgccacgaggacctagtcggcaagttcggatgcaaacctcccaagacggtcaagcaaatgtttgaaaaagccaacgagtatgccaaagccgaagatgctattacagcgtccaagcagtcgggcaccacttggaagccaaagaaggacacgccgaccgcaggagggagtggaagtaacaaccgcaaggatcgcaagcgtaagcccgaagaacttgtggcaacaacctctccatcttcccgacaacgtccccgcgtcaacacattcgacaagataatgaactcccaatgtccgcatcatcctaactccaaccacgtggccaaagactgcttcgtctacaaacaatttgcggagcaatacgtcaagaatgcacgtaagccttcagacggagagcaaggcacatcaaagaagaaagacgatgaagacgatgcctcgactggttttcaagatcatcgcaaagaactcaatcacatcttcggcggacctctggcttatgaatctaagagaaagcagaagctaacagaacgggagatcaatgcggttcagcccaacacgccccaataccttcggtggtcagaaatagcaatcaagtttgaccgctcggatcatcccgaccgagtggtccacccggggcggtaccccctagtactatacctagtggttcgcaatgtcaagctccgaagaactctcattgatggtggcagtgcactcaacatccttttcgctaagaccctggacgatatgcagattcctcgcacggaattaaagccgagcaatgcacccttccacggtgttatccctggattatcagctacaccactcggctagatcactcttccggtcactttcggcactcgggagaattttcgcacagaaaatgtttgtttcgaagtcgctgatttcgagacagcataccatgctatacttggacgaccggccctagccaaattcatggccgtcccacactacacctacatgatgatgaagatgcttggtcctcgaggagtcatatcactacgaagcaacatcaagaaagccgtcacatgtgacaaagaaagttgcgagatggcccagacccgcgagattacactcgaccgagaagagatccgactggctgcgaccatggcaagcgaaggagaagtgcccgcaaccaagatgctcaaaagcggagaaagcaatggtaagacgaaaaagattcccttagatccctctgatcctgataagattgctgtaataggcgctgagttagattgtaaataggaaagcgcgctcatcacctttcttcaaaataataaagatatctttgcatggaaaccatccgatatgcctggtattcctagagaggtgattgagcactctttacatgttaaggaagacgccaaacccatcaagcaacgactccaccgttttgcacaggacaggaaggatgcaatcaaggaggaattaaccaagctgttagcagcgggcttcatcaaggaagtccttcatccagactggctggctaacccagtcctagttcggaaaaagacggggcaatggcacatgtgtgttgattacaccgacctcaacaagtcttgccccaaagacccttttgggttacctcgcattgaccaggtggttgactcaacggccggctgcgagttactcagtttcttggactgctactcgggatatcatcagatccgactgaaagaatccgactgcttgaagatctcgtttattacacccttcggggcctactgctacatcaccatgccctttggatggaagaacgcaggagtaacctatcaacgcatgattcagagatgtttctcgactcagatcggccgcaatgttgaagcttacgttgatgatgtagttgtcaagaccaagcagaaggatgacctgatcacagatttagaggaaacttttacaagcattcgtgctttcaggatgaaactaaaccctgaaaagtgcatcttcggagtaccgtcagggaagttgctcggatttatggtatctcaaagaggcatacaggccaacccggagaaaatcaacgccatcctcaacatgaaaccgccaagctcccaaaaagacgtccaaaagctgactggttgtatggcggcgctcagccggttcgtctcatgactcggcgagcgggggatgccctttttcaagctgctgaagaagactgacaattttcagtggggacccgaagcacaaaaagcctttgaagacttcaagagacttctcaccactccaccagttttggcctcgccgcatctacaagagccgctactgttatatatgacggcgacctcccaggttgtgagcacggtcctggttgttgagcgtgaagaggaaggccatattcaaaaagtccaacgaccaatttattttgtcagtgaggttttagccgactccaagacaaggtatcctcaggttcaaaagttattatatggtgtcttaattaccgtcatgaaattatctcactactttcaaagtcactcggtcacggtggtcacatcgtttccactcggggatatacatcataatcgcgaagcaaacggacggattgcgaagtgggccttagaattgatgtctttggacatatcgttcaaaccacgaacttcgatcaagtcacaagctttagctgatttccttgccgagtggaccgagtgccaagaagacatgccagaggaaaagagggaatattggactatgcattttgatgggtcgaagaggcttacaggcactggagctggggttgttttaatctcccgacttgagaaagattgagctacgtattgtggatacatttttctgcgtcccataacgtggcggaatacgaggcgctactccatggattaaggattgccatctctctaggcattcgccgattaattgtccgaggggactctcagttggttgttaatcaagtcatgaaagagtggtcctatctagatgatactatgactgcttatcgacaagaggtacgcatgttggaagacaaattcgatggactcgagctcacccatgttctccgacataacaatgaggcagccgacaggctggccaattttggttcaaaacaggaagctgctccttcagatgtgttcgttgaacatctttacgaaccaaccgtgcccagaaaagagacaattgaagccatggatactcaaggcgtaagcatgatcgaagccgactggagagaaccgttcataaaatttttgagcaaacaagaacttcctcaagacaaaaatgaagccgagcagatttcccggcgcagcagactttacattattcatgaaactgatatgtacaagaaaaatccatcaggaatactgcaacgctgtgtgtctttggaagaaggaagacaattgttgaaggatatacattctggtatttgtggtaaccatgccgctgcatggactattgtcggcaaagcttaccggcaaggttttttctggcctacagctgtatctgatgctgacaagattgtgcggacgtgcgagggttgtcaattttttgccagacaaattcacctaccagcccaagagttgcaaaccatcccgttgtcctggccgtttgcggtctgggggcttgacatggtcggcctgtttaaaagggcagtcgggggttacacgcatctctttatggctattgacaaattctccaaatggattgaggctaaaccggtcatcacgattacggcagataaagctagagattttttcattaacattgtgcatcggtttggggtacctaatcggatcatcactgataatggcactcaattcactggcggagcatttaaagacttttgtgaagacttcggtataaaaatttgctatgcctccgtggcacaccccatgagtaacggacaagtcgagcgtgctaatggcatgatacttcaagggataaaagcacgagttttcgaccgactacatccctatgctggcaagtgggtcaatcagctgccgtccgtactttagtctttacacactactcccagtcgggctaccggccagtcgccgttctttttggtttatggtgcagaagcaatgttgccagtgaagtggaatttgaatcactacgatttcggaacttcaacgaggagcgttatgaagagggccaagtagacgacatcaatcgattagaagaagcccgtgaagcagctttaattcagtcgactcggtatttgcaagggttgcgccgttatcataatcggaatgttcgatcgtgagcctttttagtcggcgacctggttctgaggaaaattcaaaccacacaggatcggcataaattatctcccttatgggcaggaccgttcataattgctgaagtcacttggccaggttcttatcgactcaagcgcgaagatggtactctcatcaacaattcttggaatattgaacaccttcgtcgattttatgcttag

SEQ ID NO: 7624 - DNA, 2599 bp, Oryza sativa
acacctcctctccgtcctccctctctctcccgcgccgcttagtcgccgcaccgccgcctagccccttatccgccgctagcgacacccgcgccatcgcgctgccaccgcttgccgtcggtcgccgccgtctgccgccgctgccccgcggtagcgccaccgtgcgccatggccgtcgggccgtcttgagccgctcgtgcgtgccgaccgcgtggtccccgccgccgtccgatctactctcgggtagatcggggacgtcggttcggccgcccgcgtggcgtgccatgtggccgccacgtgtgcgccacgtcggcgccacgtcagtgccacgtggtgcgccgcccccttccccggtccgtggactcggtccaccgcggaccgccaccggagtcactgccatgtggggcccgcatgtcggcgctgccccctctctcctagggtttatttattgtgcaataaatcaattaaggatttttctgtgaatcttctaaaattcatatctaattcatccgagctccgtttaagcccattcatgtcttagtaaatcaagaaaaatgtgtagaatccattcaaaatggttttgttctctgtttcggtagtcttatagcctgtttgtattgtttgctttgtatgtcgcttagattccggctctcccgatgctccggtgtactttgaaatagtcgccgaggttcctccagcagcagagcaaggcaagtcatgcttgtcacttgaacatgttgatcctatattgcaaatgttctattgttttccttcaaatattgcattattttacaatgatactatgggatgtttacctactattacagccatgctatttctgtaccatgctcctttgttagcttgggatataaacatgactagagattggactagggattgcttagccatgcttagttcaactagcacacaatggggaaaatcacattaatgcatagatatcagattctagtaatgacgttggttaatgccaccgccccggtgttggttaattaaaatatatcaaatggtgggctgtgggtgcatggttttgttggtcgcgcccatggcatttaaggaccggttcgcgggatgccctggaagaacttatcatacttaccacaagccagcgtgtgcaacggctgggcttgtagtgtagttttcctctagttgacgcatccaggaaagggtgggcgtgatggagcagggcgggccctgtgacggcctctgtcgcttccggattcacctaggcacgagaggggactgcccgttgcccgctggggacggggtgaaacctgaggtgtggtgtgcttggctagagggggttatgcgaagagtcctgtcacggcctctttccggtatgtcgtggtggcatgtcggcgcacggaaacgtgtcgtggggctgtgttttgtgggtacagttgtacacctctgatcagagtaaaactatttgaatagccttgcccgcggttatgggcggtcaaccagattcaccgtgattagtctcaccctagtttaatatgatggaactgattagttcaggtggttggttgggcctgttgcaacgtggtgtagcgttggacagtggatggctaatattgattaattattacacctgatttcctgctttcaactactgtttataaatgctcgttttacgcaaaagaacctctctagctatcctttggtaatatcctgcatcataccccctgttccggtatgacttgctgagtacggtggttgtactcagtcttgctctattttccccaaaccccagagtttgagtatgcgtcagatggtggtttctccgaggaataggcttcgttcgtgccgtcgaggatgcctgtggagtggtgttcccgctgcagtccaagtcaaggtttagctctagttatcttttatttttccgttgcatttatgtaaaacttttataatgtttgtaagacgtagatttgtatgtcaactttgtcgtttgtgtaccccggccggtcctggacggggattttaatgcacattctgcttggaattctattcgggaatttctgggcgtgacaatgagtccgtgtcgaaaaatcactccgtgactcgcgcggtgaacttttgtcaattaatgccaatattagcctatattggcacacgtgggtgcgatatatttcaccgaaatgaaaaagtttagaaagcaccaaaacatgtttttggacatactgtagagaattgggtgcgtccgtgtcgaaaaattactccgtgactcaagcggcgaagttttgttaattaatgccaatattggcctatgttggcacacgtgggtgcgatgtttttcaccggaatgaagaacttcaaaaagcagcaaaacatgatttttggacatattggagtatggtgggtgagtccgtgtcgaaaaatcactccgtgactcgcgcgacgaacttttgtcaattaatgccaacattggcttatattggcacacgtgggtgagttgtttttcatcggaatgaaaaagttcaaaaagtactgatttttggacatattggagtgtcttgggtgcgtccgtgtcgaaaaatcactctgtgactcgcgcagtgaacttttatcactgaatgccaat

SEQ ID NO: 7625 - DNA, 5132 bp, Oryza sativa
aatgttgccagtgaagtggaatttgaatcactacgatttcggaacttcaacgaggagcgttatgaagagggccaagtagacgacatcaatcgattagaagaagcccgtgaagcagctttaattcagtcgactcggtatttgcaagggttgcgccgttatcataatcggaatgttcgatcgtgagcctttttagtcggcgacctggttctgaggaaaattcaaaccacacaggatcggcataaattatctcccttatgggcaggaccgttcataattgctgaagtcacttggccaggttcttatcgactcaagcgcgaagatggtactctcatcaacaattcttggaatattgaacaccttcgtcgattttatgcttaggcgtttcgtttgtatctttcctctttgactgctaatctcaagtttttccttgaagttttcagtcgggggctactatgataataatggagtgtgatttttatcaattcaatttgcttacttgatttatcattgccctatttggtctttcgacttagtcgatgaggactgaaggtttttaatagcttttgcgggttttaggctcaataaggctagataaaggcttttaagaaatcaaaagctaagtatggaacaccaagcatagcataaattcatcagtattgtacaaattgagccttcatcatcattaattatcaaaatcattgttatatcaatcagtatcagttttttcatcatcagacttatcagacccagtcggccgaaggtcgacttcttggaatctttcaaccacatcagcagcaatcttgtcagcggctttctgcgcatcgttaatgaggtcaagagcagcttcttcgctcgtcccatctgcaaagccatcaatggcatccatatcaacccttggataaagggatttggtcatcgccaacgccagacttgctcccatacttccagcttctttgatgttcttgaaataagtatctggagcgactctcagcttgtcgaagattttggcagcatcaagtgtactcgaaccggcgttattgaagaacatggcccggatgagtggagtagcatcattagcgactttatccctggctccttcaagcttgttgatcttgtcaactaagacatcaaactgtgcttgagacttgatcttgcggtctgcatcaacagattcacattaatgaatcagcatatagaagataatggcttttgaggtattgattattggtaccttcaacctcctttaaagctgaatccctctatcttgccagctctgccttgtcattttccatagtttggatcttcttctctagttcagatatcttggcagcttgcagtacattaacttcggttaatcaagattacagagataacagcccaaatcagttgggcagagtttgcgcgaacctttggatgagccactcagtttataattggattcctggagctcagcaatccaatccctcaaatcgtgttcattctttctggcaagttctctggcctcgtgcagttgactcctggtggtttcgagggttccaagatgaggaactagtttctcaagggttgcggttttcgcctcgttcctaagatgaatcctctgcagagcagtttaatcagcgctcgagccagacggcaaacaagatggctgaggtcaggcatcaaggaacttacatttacaatgcgagtcgcttggttgagtgccttcttcattaggcagacctcttcgtcttctttttgccggtttattataattccttgaggttgcaagttgtcatcccaccacttgaccagaatgggagggcacgaatcttcggctgcttgtatacggggaatttcttcttcatcaccaatcattggtcctaatgtatctactgacaaaggttagacgattgatcagagttatttgggtcgacatggtttcagacaaagtgtttacccgtaatgatttctggacgaggacgagtggattcagatgcctttaaagtagatccagatctccggtcattgctggcgtcttgtccgcgagggttgtctgcttgggtttcaacttctggaatctcttggcttggccctgcgtccgacaggtttccagtcgggggctcctgattaactccagcttcggcttcggccgactggtttccagtcaggggttcgtcgctgggttctacattgtcgctggcctgcagattatcactcgggagatcttttgcagtcggcccggtttcttttgaggaacccgcctccatgttggtcgggtcagagtcttttctagatagatctatatcagatggtttcctgcaagtttgattgtcagtactattatcgcaatgggtgcgcatcaatgcaacggagatcgtaatatgagttgcacctagagttcttcctgatttttggcacaggacgactggatgttttcttccttggagtagcctgcttcggcagtttattggttgcctctcggtctccaagctttctagcagtgtcgcctttgtcgtcacttagaaccagcttcacataaagctagagattatcttccgtcacatcggagggcgcctactggctctcgaagctttctctctcttccgccatgaatgtggactggatggtttgatttggtctgagatacggctggaaaggaatggggaattggagtggtggatgccggcagaaattttgtggagtgtttgaggatggattggagcggattgctgaaccctagcttggccggcgcagtttgtactgtagcaggaaatggggaaaatggcgagagtctcggcggggatgacgaagagacgtttttcacttcggtgatattagggtatcgggagtgctagcaggcctgggccggcacagtacttcagcccaattttatttccagcgtggcccattgtgatccttagggacttaggcactttttgctttggcaatttgtgctcacaatgatgtggtccaatgctgttaaaaccctttttaatgcggtttgataattctttggaattaaaacgatgcaaacaaaaggtgcccgacagaaaggtgttataccgtttttgtaagccttattaggctgcaaaagctgtttgggttgatttgagatgactggtttactaatagtcattcttttagcatgttatatgcttattttggttatggtaagggtcacagcctaggctattagactcattaattaccgtgattttttatcatgtttggtgaatcattttaagagtttcttactcggattcctatcaaatatgtctatttttggatcttttgagtgtttatcacttggccctttcatgttttttatccttgatatgttcaaggagtgttgataaaaccactcggttcttgactacgtgtttagtttttcaactaatcacatagtcgggcgctacacctaattaggtgcatctactcgatgcaccatgttttattttcgcccttcgcagtctttgattttagcactcggcaaactggagcaagttgaattgaagcactcggattgctgttttttgtttcgagaaggctattttgtcaactgcgaaggtctcgggactactgtggagaatatggatatcccatatctacatgacagttataatttagtcggatatatggtaccaaatatagatagaatatctttatgaagactcgagttagttttttacttgtatgtcaaggaaatacccgagatcttagtcggttaggattgtattttatctataatcccatattccgttaggatatggactgtattttgtaaagcggactccttcccctatataaggagggtccgtgtgcctctcggggcgcaattcttttctccaatatatataatcaataacatactcggtggaatcatccccggacaggagtagggtattacttcttgaataagaagacctgaacctgtataaaattccttgtctccaaacccatccactttgctagcttgatagccacccccttttattattgccgaaatcttgtttcgacactccaatatgtctaaaaatcatgttttggtgctttttgaactttttcattccggtgaaaaacaacacacccacgtgtgccaatataggccaatattggcattaattgacaaaacttcaccgcgcgagtcacgagtgatttttcgacacggacgaacccaattctctatagtatgtccaaaaacatgtttgtgtgctttctgaactttttcattccggtgaaaaacatcgcacccacgtgtgccaatataggccaatattggcattatttgacaaaagttcgttgcgcgagtcacggagtgatttttcgacatgaacacacccaacatagttcaataagtccaaaaatcatgttttcgagctttttgaaatttttcattccggtgaaaaacatcgcacccacgtgtcgcaatatatgccaatattggcatcaatagacaaaagttcgtcgtgcgagtcatggagttatttttcgacacggatgcacacaatacactccaatatgtccaaaaatcatgttttagtgctttttgaactttttcattcctatgaaaaacatcgcacagtttgcttcttccttcatccgggctaggcacgtactccgagcacgcacgtgggccaatataagccaactttggcattaattgaaaaaagctggctgcgcgagtcacggagtgatttttcgacacggacgcacacaatacactccaatatgtccaaaaatcatgtttcgatgctttttgaactttttccttccggtgaaaaacatcgcacccacatgtgccaatataggccaatattggcattaattgacaaaagttcgccgcgcgagtcacggagtgattttccgacacggactcacccaacatactccaataagtccaaaaatcatgttttggtgctttttgaagttttttattccggtgaaaaatatcgcacccacgtgtgccaacacgggccaatattgacattacttgacaaaagttcgccgcgcgagtcacggagtgatttttcgacacggaatcacccaacaaactccaatatgtccaaaaatcatgttttggtgctttttgaagtttttcattccggtgaaaaacattgcacccacgtgtgccaatatatatgcaatattggcat

SEQ ID NO: 7626 - DNA, 26268 bp, Oryza sativa
tttgtcacagttcctttccaaggtaccgtggtggtactgaggcgcatggtgacatgttgtgggattgtgtcttgtgggtacagtggtacacctctgattagagtaaaactattcgaatagctgtgcccgcggttatgggtgagttgagcaatgttttttgtgattagtcccacattattcattaatggtaattgtgctaatcaatttgactcctggtttggaatggtatattcctggtatggaggttggattagtacaaccggggttggttgttcagatgaggttgggcctatgcaacacgggtgtgttgtatggtgtttatctaatactgattaattattcaactgttgaactattctcttaaatatttattaaatgctgtttacacaaatgagctttattatgccatcctttgttattctgtgcacttgcatatttgctgtgtggcttgttaaatatgtcatatgctcattcttgcaatattcattcatcagaagaggagttcttcagtgaaggtgatgatctggaggactaggcttggtccgggttaagttgcctgtggagtggaatcgccatagctgttccgtagtttgctttagtttatttttccgctgcgtagaatgttattgtttgagaggaactatctacctctgtaatgatttattaattgcgaatattaaatagttgtttatttgtactctattatcaatttgttattgtgtgcctcggctgattcctggacgagggtttaacacacatgtaagcgtttggaattttggatagaaattccgggcgtgacaattctgttgatgtagaccgcaagatcaaatcacaagctctgttcgacgtcctggtcggcaaaatcaaaatgcttgaaggggccagggacgaagttgccaacgccgctactccactcgtccaagcaatgttctttaataacaacggtccgagtagattcgacgcttccgagatcttcgacaagctaagagtcgctccggatacatacttcaagaacatcaaggaagccgggagtatgtgagcaagtctggcgctggcgatgaccaaatccctgtacccaaagatcgatattgacgccattgatggctttgcagacgggacgagcaaagaagccactctcgatctcatcaacgatgcgcagaaagccgctgacaaaatagcagttgatgtagtagagagattccaggacaccgatcttcgaccgactggtcctgacagttctgatgatgaaaagactgacactgattgatgtatcaatgattttgatgatgagtgatggaggcacaatttgtacaatactgataaatttatgccgtgctcagtgtttcatacttagcttctgatttcttaaaagcctttgtcaagccttattgagcctaaaacccacaaaagctattaaaaactttcagtcctcatggactaagtcaaaaaatcaagcaaggcaataataaaccaaataagcaaattgaattgataaaaatcacactccattattattatagtagcccccgactgataacttcaaggggaagcttgatgttgtcagtaaacaaacttaagcataaaaacaacgaagatgttcgatattccaagagttgtcgataggtgtaccgtcttcgcgcttgagccgataggaacctggccgagtgacttcagatattataaatggcccttcccataaaggggataatttgtgccgatcccgtgtagttcgaattttcctcaaaaccaggtcgccgactaagaaagctcgcgatcggacgttacgattatgacaacgacgcaacccttgcaagtatcgggccgactgaattaaggctgcttcgcgggtctcttccagtcggtgtaggtcatccactcggtcttctccgtagcgctcttcacgaaaattgcgaaaacgcaaagattcaaactctacctcactaggcaacattgcttctgctccataaactaggaagaatggcgattggcccgtagcccgactgggggtggtgcgcaaggaccaaagtacggatggaagctgttccacccatttgccggcatagggatttagtcggtcaaaaactcgtgcctttattccttggagtaccatgccgttggcttgttcaacttgcccattgctcgtgggatgcgctacggaggcatagcagattttgataccgaagtcttcacaaaaatctttaaatactccgtcggtgagttgagtgccattatcagtgatgatctgattaggtaccccaaaccgatgcacaatattgatgaaaaagtctctggctttatctgccgtgattgtgatgaccggtttagcttcaatccacttggagaatttgtcgatagccacaaagaggtgtgtgtaaccgccgactgcctttttgaacgggccgaccatgtcaagcccccaaaccgcgaacggccaggacaacgggatggtttgtaactcttgggctggtagatgagtttgtctggcgaaaaattgacaaccttcgcatgtccgcacgatcttgtcggcatcggacacagcagtgggccagaaaaaaccttgccggtaagccttgccaccaatggtgcgtgtggcagcgtggttgccacagataccagaatgtatgtctttcagtaattgtctcccttcctctagggatactgttgacagaaaacacgaggcctgggagatctgcttaactccagtgcaggtccaaaactcaccttcggatgtgtgagcgtgccagttgatttgatcctgtaatcatcaagaaataaagacaaaggaaccgtggttaaatctataaatgatagccgatcggccagatgccgatgacatatcatttatattcgagccgatgtcatctgtgtatcgatcggcaatcgtagataagtaaggaaaaactaaatttacttgatcggctgtaaatattaacggtatataatccttatattgatgtttacttaaatcaagtgattgggatagatcggttatcacaccgagacagtataaatcacttagatcgaaatatacatccataacaggactatatatgtttatagcatagccgatcagatagatctagcatgtatcggctaatactccgatactactttgtattaagacgttgcaacaataatgatatgttgaacaatagtttaacacatttgaatatagcaataaagggcatatttaacatatcagcgaagcaaatagaataagtatggttaaatcagatacgatcggctgaaactccgatgctattctaattgacaactagatggcaggctagagatcaatattctaagcacgacttaatagatcaaactcaattgatgcagcattaagtatgaaaagaagaacaatatctagacaatcaagccgctagaagattcatagaatggtacatatcttatataatctaaatcaacgtcgagatctaacctaatcagctgtcttttgcatacaaatattagccgataatagattagataaagatattgttgaagattatgtaagatatatgataactcagcgaattatataaacgagattagagtgtcatgaagatgtaagcactaatccctaagaacataattcgtcataacgaattttacctcttgttgaagattgaaaccgatgcagctcaacccgaaagcaagaactcgtcgaaataaaacaaaagcaaaaggtggcgatgcgccggaattgtattgaatgtgtgtcttaaaattacatagggctcggggtctatttatactcgaggattacaagatatgcccataccggacataaccattatctctaacaaactctaaaatatcacaagtctctgcggcagacttttgcccatacttatctataaggaatttacataaatcatcctaattaatagatacaattgccttcccaggactctatccatgcgtggcaatcatcttgaagcacatcaacctgagcccgacgtcgcgcacaagttgtattgtcagaatcagctatatcagcttatttagcttaactcaaccttagccgatcctagccgtagccgatcctagccgtagccgatcctaactatagccgatctagactccagccgattcttgctctgttccagaactcgatctccgcctccaactcttctttgaccaaatcccctttcctgatacgaatacttaccaaattcggttgttaacagatacgcagcgttgcagaattcttgatggacttttcttgtacaaattggcctcatgaatgatgtaaagcctgctgcgcctggaaatccgctcagcttcgtctttatcttgagggagttcttgggaggtctgaaaccgtatgaggggctctctccagtcagcttcgaccatagctatgtcttgagtgtccgcggcttcagctgtttctctcttgggtacggttggctcataaagatgttcgacgaatacatcagaaggggccgcttcgtgtttggatccaaaattcgctagtctgtcggttgcttcgttattgtgccgaaaaacatgggtgagttcgagtccatcgaatttgtcctccaatttgcgtacctcttgtcgataagccatcatgttgtcatcgaggcaggaccactctttcataacttggttaacaaactaactgtgaatctccgcgaactatcagacgtctgatgcccaaagagattgcgatccgtagcccgtggaggagcgcctcgtactccgcgacattgtgagatgcagaaaaatgtatccatagcacatagctcaatctttctccagttggggaaattaaaacaactccggccccagtgcccgaaagtctctttgacccgtcaaaatgcatagtccagtactccatcttttcctcgggggtgtcctcttggcactcggtccacttggcaacaaagtcggctaaagcttgggacttcatcgaagttcgtggcttgaacgatatgtccaaggacatcagttctaaggcccattttgcaatccgtccgtttgcttcgcggttgataaaattcttattgattattatatatatattgtacgcactatatttgagataatacatcaatttataatttaacaaattatatttaggacacgagcgaaaatccgtgtaaacaaatgccccttcgagctgcggttgccaaaattttgcttttgcatccggagctcgaagcataattttggatctgcagggacgtggtgtgagctttatgctcacaactatgtgcccgctatttgaaagattgttgagaaaattaaggagcatctccccgattatttggtcacgttccctatcaccaggagcagtgaggcagttcgtttgctcttttaatcactaacccatccactactccagtctccagaggctagactccttcctcttcctcttcttctgtgtgaaggctttgaggaaagacatcaccggtggcagaatcaagggtaagaccctgctttgatcttgtgaactgaactggcgacccctttttcttactattttttttatttttcttattggctttcgtccctctgttctatttaggtttgtgctatgcacacacacctgaagatcctcgagttgatttcattgggtgcttggtgattcaggtgtggcaagtgaaaggtacgcatgaatcttcttaccatccttcaatccattcatttttttaatagatatgtcgatctctctgcacaacgttcatatttgatacgcctctgccaatataacttcctttaaccacattgtattgaattagttgttcgtatgatcggggttcccggacattttgtaatgttacacagccaatccacgttgttagatttgcatgtactccttcccatcacgattatttgatccaaagtactgaagtatcccgcgccaaataatatgactcggggggcaacaaatgaaacatgcacaacagttcaggaccttgagcatagaagaaataaatgatacaacctatgtcacttattatctacaacacattgacctctgtaataacagaatgacattatcaccatagatggtgaaacttccttgaaaacaagaattaatcgttatatctattcaggcaattttaagcattacgaattctcatcagatctacaacggtgcataacaaaaataaatgctacattattccactgtatgtaaacaaattagtgaaatgagtgaaataacagggggcagatccaacttgggacatgggggttcagttgaacccccccaaacttttgggggaacaacaaacaaactcaaactgttacttttattaaggttaaaggctctggaactaagagaagagcttcctccagatctacaagagaagctagggtttaggcaagcaaattccaagacagaagcatccccggtgagagagagagagagagagatgaatcatcagaaagaggatgcggatgctcaccaggatccccttgctcgccggatggagatcggcgaccctccccctcccctcccctgttcagccgcgaatggcgcaagaagcggatgagacgacgagacgggagatttttttttctcttttacgcgaagggaagggggaagagatactcgagtactccacctttagctcagatttactatgttacccattatgagtagcaggccaaatgggcggcccggcccagcatagctcggacccgctgatggcacggcaactgtaatgggccgggccgtgccgtgccaggtcttgggcagaacggcccaaggaagtgttgggccgtgtcgggccggcacggctactgttgcatggaccggtggcccacccacctgcaagagaacgttattcgtgtgaaactacagtcgcaagttttctatagtaggtaacacaattaggcaaaattgtgtttatatgggtatttttcattgtcaatattgtgctattatagccgtgttaaaaatttccataatttcctttggcacaactaagagaggtttaaccttacgtcccgacccaagcattcgttgtagatatcctgaaacacgaggttcggacttcggacctgttttaaacttttcgaccgttagacacattttaaacttatcggccattagttataaatatatggtcttatatcacgttactccctcaaatattgaaaatatgttgatttggatacattttaaacttctcaacctttggacacattttgaacttctcgaccgttagttataaatatctggtatgtacgagagcaatggttttaatttttaaaacacaccgttttgcacaagttccaaactcccaaacggcctatcaaagtgctccatccggtcttaaaaacaaaggtcatgtttcctgcacaaaaatgttacaccctatcacatcgaacgtttgaagtattaaatataagctaaaaaaataactaattacacagattgcgactaatttgcgagacgaatcttttaagcctaattgctccatgattttgacaatgtggtgctataataaacatctgttaatgacggattaattaggtttaataaattagtctcgcggtttactgacggatactacaattagtttttttattagtgcccgaacaccccatgcgacaccctatataatacccgatgtgaaacgcaaaaactttacactcctggatctaaacacccccaaagttattttggatactacattccaagttcaaatataaaaatctaatagcatgtacaataatagactataagtcggctacaagcttatgtggtgaacataaagagaggagatagaaaagaagcaggctgcagatttgtagctagctgtagcacggactcctaaatgctacgtgtgtatgacaagtgggagcagtaattaatgatgtactatatatttgtagttaactattgtataatttggctattagattatctataaataatttggagctagtagttggctatatactattaaaattcctctaagcggcaaaggccgtgttcgattattagtgttagaaactaaccctttgagcacgtaaaacgaaacggttcattaatgcataattaattaagtattagttatttcttaaaaatgagttaacatgattattcaaataactttcatacatacatacgttttaaaaaaaaacgcaccgtttaaccgtttgaaaagcacacatgtgaaaaatgagatagataagtaggaaaatacgataaagaatacttcctccatatcaaaatataagccttttttttttgtttttgacttcgacacggttttaaagatgctacattgataaacgatattcataaaagtaaaatattttaaataaaaagagttacatactgtgatagtttgtttaatgctaaatctagtaatatcattttttttagattgatcttttttaatttattttttcttattaataatcaaaggacttgacactatacttaaaaaatacttatattttttatattttagtacggagggaatacaaagttaaaatccgtcatcttctatgacagaagtagtaacacgaaattaatttagctctacatccgttctgtttatgaataacggtcgaaaacgtaataacccaaccacgacgacatgaaaaaaagaaagacagataaaacggtcgaataactaaaacaacttgctactactatttgaaatttgaacaactgtaacggcccaaaaactggggagtggattctaatccctcgagggatatcccctcgtatacctttttcttccaaattcgatacaaatagttatgaaaaattctgaaaaaaattaacaatgtagagtataatgatacctactagtccaccaaaattcatgttcaaattcgatctacacatcgagaaacaaaagaagacaaatttagatataaacagtacgctactattcatacgctgaatttgtctttttatatctcgacgtgtgagttgagtttggaattaagattttgtagagttgtatatatgtgttgtatgaatgttgtcaaattttttcagtatttttcataaccgtttagatggtttttgagcaaacgagggaacatcctcgagggattagaatagtttccccaaaaactggaaataatcgaaagagtcgtcgccattttctctcttctcctcctccgctcctctgagtcctctcctctccggctctcccctcctctgtcgggaagggaaggatccaagccctcgccctgctccgcctctgatccccgccggccgccgccgccctcgcaaccctcgcagcagcagcaggaggaggagggttcaggtggtggttgccgtcggccgatgtcgagcagcctagcctcccgccgctcgtcgtcgtcgtcggcggcgaagcggcccgcggcgggggagggaggagggaaggcggccgcgggcgccgcggcggccaagaagcgcgtcgcgctcggtaacatcaccaacgttgccgccgccgccaacaatgcggtacgtgaaggatcgcttgctgctgcttcttcttcttcttttttcctttttttttctctccaagatttgttctttgctttgcgcggtttgggtggagatcttttggtgtgtgaggtggttggaatggtttgggggtggctttttttttttttttttttgcttcttggttcctcttggggcacaagtgagtcgctgttgatgcggaaatggccgaagcgatctgtgtatgatttttttcttttttggtttttttccatcttgtttgtggaggacatacgcctcgatctgttggtttcaagcaaatataaatagtgtttcttgaattcgtcttcttgagttctttctttcagccaacaacaagattttcatttcttcaatttctccttggttagcctacaaacgattctcctcttccaatccccaatatattcttgccttttggtttttcagtgctcttcacattcaaatttggacctctgccacattcttccttgctgattttgaggattctcctattccaatccacaagatttttcttgctgattttctggtttcttttcatggttaattgattgattgatttcttggggagcatccaggtcaacaggctaaattcacttgagggtttattggcaccttcagaagttcaaaataaaagctttcttggtattcgctaagtgttttgtatgtttgcttgctttggaatcttctattggtaatatgatacttgcgtgctgctaatgtttctaataaatatttgttccttttcatgcttgtggtctggaatcccaaatgaacagattgaaatataagttctaaattgatttcttgtcttcaatcctcctgcagaaatttaattcagctacctgggctgcacctgtgaagaagggatctttggccagtggccgcaatgtgggcacgaatcgggtctcggcggtgaaatcagcttccaccaagccagcttcggccatatcccgccatgagagcgccccacagaaggagtcagttcttcctcctaaagtgcttagaattgttccaactgctgcacctgcacctgtcactgtaccctgcagcagcttcgtctcccctatgcattcaggagattcaggtggtgtttacttccagggacttaacttaagtccctgtctttagacactaatttagagtattaaatatagactacttacaaaactaattacataaataaaagctaattcacgagacaaattttttaagcctaattaatctataattagagaatgtttactgtagcatcacataggctaatcatggattaattaggctcattagattcgtctcgcaaattagtccaagattatggatgggttttattaatagtctacgtttaatatttataattaattttcaaacatccgatgtgatagggacttaaaagttttagtcccatctaaacagggcctcagtttcggttgatgagacgatgtcgacgtgcgactcaatgaaaagcccagactttgagtatattgataatggggattcctcctcagttctaggttccttgcagcgaagagcaaacgagaacctgcgtatctcagaggatagagatgttgaaggtgtgttttggttgctgaaatgcacagttatagctagaaaaatttgtgctatatggtgcattctattggaatggttgattgatcttttcccttgtttgtttcgcagaaactaagtggaagaaggatgctccttccccaatggaaatcgaccaaatttgtgatgttgacaataactacgaggatccgcagttgtgtgctactcttgcttctgatatctacatgcacttgcgcgaggccgaggtaatacattcttgactaaaccttatttctctgaaaacatttcccttgagcaccttattgtagtatgttttcataggaaggctttgttttgcttcctcatgatttgagacttgattgcatccatatgaaacacaagtaaaaaaagtttactttgatgagaccataaattaagaagagaataagtgcacatcactgatataaggcattattccaatgtaatttatcaggatatttttcacatttcaccacaatccgttcttttctgcttttcgctttgttggtgcaccttatcatctaccagacatgctttgtgaccatcaattttcagtagttttgttctgcatattatgtaaacaccttacataaaacattcttgaatacttttttttttctgaatagtgggttccatttaatggccatcatattgaaattccctatagaaccagtagaagcacagtataatatggagaaattgtaatggagttatcttcttaaagcattgactgaaccgatgaattgatacatttcaattgttgtaatcaatgctcttgaagtatttttcaattgctcattatttttgctgtgacatggactgcactactgcagtcagtttgatcaaatgacaattaatctgacctgagcacagtggtttcaaatctaggttgaatttcatatttacattgtgattttctatttgacttgaagcagaccaggaaacatccatcaaccgattttatggaaacactccaaaaggatgtaaacccaagcatgagagcgatcctgatagactggcttgtggaagtaagcttttataccgaacaaatttttttagttgattggagcctaaagaccacaatcgttacttaccactctatttgtgcttttcctttgtgcaggtcgctgaagaatatcgtcttgttcctgatacattatacctgacagttaactacattgaccgttatctttctggcaatgagatcaatcgtcaaagactgcaattacttggagttgcttgtatgcttattgctgcgtaagatctgattagcaatttttttaaatgtgtttctcagtttgcatctgagttttgtgtactgattttggcttgttcctatatcagaaaatacaaggagatatgtgcacctcaagtagaagaattctgctatataactgacaacacatacttcagagatgaggtttgttttgcatatctgtgaacatttctatgtttatctccatgactaacacatagattgtcaggttttggaaatggaagcttctgtcctgaattacctgaagtttgaaatgactgcacctacagcaaaatgctttttgaggttctattctctttcatctcatcgatgtctataatgctggaatgaatcgaactctaataactatcttcttgcctacaacaggagatttgtccgtgttgcacaagtatctgatgaggtgctgctctcttaatcatctcctgcttgctgcaatttcatactatttatatgctgcattgcattaacagcttttcatcgtgcaggatccagcattgcatcttgagttcctagccaattatgttgctgagctatcactgctggagtacaatctactttcttaccctccttcactagtagcggcatcagctattttcctggccaaattcatactgcagccagcaaagcacccttgggtacgtggtggcatcatcatattgaactttccatacatcttttatatcaacattcaaataaaaaaattacaagagctaacatatgcttctcattgtaaattggaagcagaattccacccttgctcactacacacaatacaagtcgtcagagttaagcgactgcgttaaggcattgcaccgccttttctgtgttggtcctgggagtaaccttcctgcaatcagggagaagtatacccaacataaggtataaactgcatatcctccccatttcttcagttatctgtactgttcctaatgctgcctcctgtacctttgtttctgcagtacaaatttgtggcgaagaagccctgcccaccctcaataccgaccgaattctttcgcgactcaacatgctgaactagaaaaataaaccaaggattagttacagttgctgactgaattcttcctccagaggcacctatgccaggttgtgccgtagaccgttcagataagcttgatgcaaggcatgctgcttgccccccctgttctttcaggtggtttggctgagtgtagatagatcgatgcttctgctgtgtgtggtaacttttatggtactgatgtgctttcttctatcttcttttccctgtacctagatgatccatggttttcagtactttgtacatcggagtcctgcagcaaagctttaaacatcttgtttgatattagctgccaacctgggcgtctcctaggttgatgtatgatagagtctctgttcgtgttgctcttgtgaaattctcaataagagcaccacattttcaacagtgctcattctgaataagtgctactagtgttcttgatgtttctagtaaaaaatactctctccgattctaaatatttgacgctgttgacttttttaaatatgtttgaccgttcgtcttattcaaaaaatttaagtaattattagtttttttcattcattgttaaatatacttatatgtatatatatagttttaaatatttcataaaagtttttgaataagacgaacggtcaaacatatgctaaaacgttaacggtgtcaaatatttagaaacggaggtagtatcaacttcagctttttttttttcaacctgttctgttcttctgttgacagatatatgcagctgatgtgatcgacttaaacatgatgattcagcgagattcttagataaaagcttctgacatcttttccacgaaagatgttttcatggacaaatgcatttaagattctgaaaatgaaaaatactacgtccatcctaaagtgtccaatgtttgaccgtccgttttatttgaaaaatttatgaattattttttaaaagtagtcacacataaagtactattcatgttttatcatctaataacaataaaaatagtaatcataattttttttaaataagacgaaaaatcaaacataatcaaacattgaagataaatagtgcaaaactgcacttattttgggacggagggagtatttgtcaatgcaacctgttgaagaagtgatgctcaagctatttccatacttgaagctaagcacagctgtttagacatgcatgcctgcgtgttgcatcatcatattgtacttagagctaattaatcacctatactaatataaaaagcattacttgtagtctttgctagctacactaaaaaaaagtgtacacaaattaacctcaggcaccctgcaatctaattgttgagattacaagttccagcttgtcttgcaatgcaacaggtgaactcacagattcaactccaccttggccctggcaaacgcggcggtgtgctagcaactacacgttccaaaatataaaaacctataatcggatgagacatttttttctggtactaagaatcggccaatccagattctcgtctcgctggagtctcatcctcgtctcactggagtctggaatctatagcaacgttgtttacagtagagttaacagaaattatcaccgtctaattaacttgctactgctttacaaaacgggagacaatcagacaacgccggggtgggttgaaaaggaagaaaatgcaagcacaggcaaatgccgacgataagatgactagatgagcaaggctactccctggggaaaaggctttgcttgccatggattgcaacacaagattaaaaaaaaattacaatacagaaagaatgattcgaagcatgagtctagcaaggttaaatcatcactgagctaggcctacaacatgtcgagttagaagtcctcttcgtcgtccagatctggatcatttgatggccgtattctcttgccgtctctccctccagggcgacctcccttctttggttttcctctgtccaaacacacgaggggtcagaactaggcaattctactaagggtgtgtttagttcacgctaaaattggaagtttggttgaaattggaacaatgtgacggaaaagttggaagtttgtgcgtgtaggaaagttttgatgtgatggaaaagttggaagtttgaagaaaaagtttggaactaaacaagggctaaaagggttgttcctagaaacactgttttttttaatataaagaagtgttagacaaacactgccccttgcaaggatgtatgtaaagctgataaggatagcacattttttgccacaaaggtaatctgagcacttactgcccgtttgcaggagtggttgcacctttcgaacgacctgatccatattctcttccatctgccaggatgcagctagtattgagcccagagtctcaattgttcctggtttcagcttaatgaaaacaagaaagagaacttaccatctcgtccagccatatgttcatcgacctggaatgaatagaaaataatggtatgtattagcaaactcacaaatatcagtatagcacagggggaataacaatcatcaatcaaagcaaaccaaaagattaaaaaaggggcacgggcttttcagtgcattaggatttaggatcattagtcataccgctggagatgtaaccgatgacagggagaacagcctctcatcagcctggaacttcctggagcgcttgagactgaaaataataagatagaaactgtcataactaattctgtgtgatctattagcagaacagaaatgataaaacatttgcttgtgcagaataatgaacacgcaacattatgccaatggtaatcataaatccaaccctcccttggtgatgctagatagtgcatatagagcacccctgcaattggccaataaactgacataacactatcatagcatattttgggttatgaatctgttgtataatacctgccactgccactatagtgatcagaggatcttttgttcatctgatcattagtaaattatatgtgatcagaggatcttttgttcaacatcattcatctgatcattagtaaattatatgtgatcagaggatcttttgttcaatatctataactataaattattcatccgaatattagctaaattatatgtgatcagaggctggtagaaagttcaagggaaggacagtaggtcattcaatcaacagttgaaagtaagcaaagaatgtggcatgaattctgaaggtttcgaactggtaagtatacagtgggatgtcaaaagaaaatgaatgaagacctccaaatagtaaagggcgtagcagtctaagaaaataaagatttcttacttggaagtgttctttgacgatgataagaatgattcaaaaccctttagcacacttccgaattgattagactcttgtaggtaggttgtctccatttcataaacctgcaacatatggacataaacatcatttgcaggttgtataagaacaattctgttaaaagcatgaatagatattttgttaaattatgagtgtttaatatcatatacaaaacttccccttaaagtcaagcaaagatggttgacattatagatcatgtgttgttcctggtattaaagagcgactgttttgttctttctaaaaaaaacacacatatcagtgccattaaaatacttgatatgagagcaatagcactttcctccctttttaggattatggtttctactaaaccaaacgctcctcttatttaatgattttggatgacacaccaagattcaccatcacaaacatatattggaatttggaccacatagtgtaactttgaaatactatgaatagaagtagctcatttgatacttgctgcgaataatttctgactaagacacagtagaaactccacattttaactcgaggatagaagaacagatggaattttcaggttgtagctaactgattttcttttttaccttagaataacaaagtgttctcaggcacaaagaacaacatacaagaaatagaatggtcatattcgacaagaatatcaaattgatactttcttcccttcctcctaattctatccaaattgttcgtcacaactgatcctctctgtgaaatgacaatcagtggtcactggtccagcatattggttccaaataggttcatatttctatcattcccaaggcattaagaaagattgaacaataaattcaggctactacaggtatccacaactccaattttacaaccatccgcagcaatgtaaattcgcaccactcattcgcatgttgagcaatggcaagcccttgccatctgaacatatatgcaacaaatccatggtctcctatacaaaaccctaattccaagagagagagagagagaggcgcaaaagagacagggaacagtgtgtaagacctaacctggcgctctatggagcggagctcctcctggagcttggcgcgcttgctcatcagggcggagagcatcgccgtggggttcgcggccgccgcccccgagggtgcggagcccgacgctgccttgtgcgatgcccctcctccgcctcccgagtccatggtcagggtttctagggttcgagttcgtggtttgcctgtttgggcgttcgttctgttttggctcggagacagttcactgttgtggagacgacttagcccctcctctccaatagtccgatcggtcctcttagccaaggtaaccagtatcaagatactatgtaggatcctttctcttcttggtttgatccttctcgatcggtttgattccttctaatggagaaagcttcctgtttgctgccacctgagctgtcaaatgcacatgtgaaaatgtttagcaatcaatgcatacatacccatgagtatcacacagaaaaggttaatagagtatttagcagaaatttgtgtttcacaatttttttctgttgagggatgaatttcactccaaataacattattggaatacatttctgcctataatctaagatgcacatgttttatgagcgatttgatcatgaccacaaacatgagataatgtccataccctagttaggtgcccgtgcattacaatgggaaaagagcatttggctatgtactccttcccatcacgattatttgatccaaagtactgaagtatcccgcgccaaataatatgactcggggggcaacaaatgaaacatgcacaacagttcaggaccttgagcatagaagaaataaatgatacaacctatgtcacttattatctacaacacattgacctctgtaataacataatgacattatcaccatagatggtgaaacttccttgaaaacaagaattaatcgttatatctattcaggcaattttaagcattacgaattctcatcagatctacaacggtgcataacaaaaataaatgctacattattccactgtatgtaaacaaattagtgaaatgagtgaaataacagggggcagatccaacttgggacatgggggttcagttgaaccccccaaacttttgggggaacaacaaacaaactcaaactgttacttgtattaaggttaaaggctctggaactaagagaagagcttcttccagatctacaagagaagctagggtttaggcaagcaaattccaagacagaagcatccccggtgagagagagagagatgaatcatcagaaagaggatgcggatgctcaccaggatccccttgctcgccggatggagatcggcgaccctccccctcccctcccctgttcagccgcgaatggcgcaagaagcggatgagacgacgagacgggagatttttttttctcttttacgcgaagggaagggggaagagatactcgagtactccacctttagctcagatttactatgttacccattatgagtagcaggccaaatgggcggcccggcccagcatagctcgggcccgctgatggcacggcaactgtaatgggccgggccgtgccgtgccaggtcttgggcagaacggcccaaggaagtgttgggccgtgtcgggccggcacggctactgttgcatggaccggtggcccacccacctgcacgagaacgttattcgtgtgaaactacagtcgcaagttttctatagtaggtaacacaattaggcaaaattgtgtttatatgggtatttttcattgtcaatattgtgccattatagccgtgttaaaaatttccataatttcctttggcacaactaagagaggtttaggggctgtttggttgatgccctgagaagaacttgcctgagtgaagacaagcctgaggttagtttgaaccttgttttggttgctatcctgagatcaactaccccttgcctggcctgattccttctgacttgcggttagcctgagccaggtgacccattttggtcgccagaactccaggccgcaacagccaccgataattagcgctgctaatccatcctgctggcctgcgcagccgagtagccgacaccccagatgccgcaccaaccccttgcccaatcctccgttcaattgttgctgctcgaagcttcaatgtcaactagatgcaagcgatacttgtgatcatcgtgcaattagatggactgctagtgtatatagatgagagattacttttgtaaaatgaatacgtattatatttttacgctttgttcacataataaacgtcattcaatggttgtgttttcagctcaggcacgcttgacctcagacctgcaaccaaacagagtaatctcaggcttgcctgatcaggccgaacacatcaagatctcagggagatttcaagcagcactttttcttcaggcatgcagctgagggcaccaaccaaacaagcccttaaccttacgtcccgacccaagcattcgttgtagatatcctgaaacacgaggttcggacttcggacctgttttaaacttttcgaccgttggacacattttaaacttatcggccattagttataaatatatggtcttatatcacgttactccctcaaatattgaaaatatgttgatttggatacattttaaacttctcaacctttggacacattttgaacttctcgaccgttagttataaatatctggtatgtacgagagcaatggttttaatttttaaaacacaccgttttgcacaagttccaaactcccaaaccgcctaacaaagtgctccatccggtcttaaaaacaaaggtcatgtttcctgcacaaaaatgttacaccctatcacatctgtcggagatataggcccgggggtatgtggagtaaaggagagctacttccctttccagccacacggctccgcgagctggtcccacccacatacctcgtgagtcactaaggcgaaggggagagcctcgggggtcgacgacatcccctcgggggtgacgtcaccccctcgggctctcccgtcgttttaccccgaggccctctctcggggggaagtgtgagaggggagtccaggctgggcggccataaatgtgcagcgccccaaccgtccctcgctgcattcaatgcggcgggggcagacgtgcggtgcgcccgaccgacccctgtcagtcggatgcgaccggtctgtgaccagtctattgccggtcacggccgattggacgggcggtcgtgcccccacgtcgcctctgtctccgcggagtggcggtaggtacgccccatcacatccggacggcgtttgatgcagggcttgccgcaagtcttccctcgtttatgagggaatgacagggctgccccccgtgtcaggcgggagacggcgctgggccccactcaaggaccgaccgatgcttagcttccaacaaaaggcacgggttgaaacccggtcgcagtagggagaaaggccccctcccctccctccgatggagggggagggtagagacggcgcatatggtatccccttaagctataaaaggaggaccttgcccaccaaaaagagggggagcgagggaaaccttttaaaattcactgataatcccaaacgtaggagtagggtattacgctccagagcggcctgaacctaggtaatccatttgtgtgctagctaatcggggatcggagggacgaacacgcgacttcggagagacgagtctctgcccccggccgaactcacgaaaggggggtcacgcgactccccgcgatcgggggtcttccctcgacagctggcacgccaagtagggggcagttgcgcgtttgagaagaagtcgcttccttccgtcccaggtcggaccaggccctagaccgccatggtcgaggtcctggaagcagaggaagcggtggcgcctacccccaccccgtctgggagtggggattcgggcgaaaaccgtgaccctcgtcaccatcgccatggctctcaaagtcctccccgccgcgagccttcgcggagggaggatccaacccgttcaagcggtacggccctctccccgcccccaggaggagggaggtcgcgacgcgtcggagcacgtcgccgtctcgactacggagacggtggttcgccccaaggcgcgcttcaggtggtgggcgcccttctgcggcatccccaggtgaacccggagccggagacccccgtgcggcgctggctggacgacgtggccaacttggtcaccgctgcccagcggcagttggccacgggtggccaatccaccgccacaggtacatcgagtaccccggctaccctttcctcgtcggcgaggagaagggcccgtcgatcggccacaaccttgaggcgatccacggctccaacgacatcggaggtctcgggaaggcggaggcgtcatgatgacctctacggggcgcaggatgctcgggtcaacatcgagcgacgcctggacgagcgccgggctacccgcatgggggaaggtgcctcctcatctggagtgccgcgctcttcttcgcgaggcggccctccccccacgctcacccctgggaggggcaggttgtagggctttcgttgcgagtctccagaatgtctggtggcccccgaagtttcgccccaatctcacggagaagtatgatggcagcatcaacccctccgagttcctccaaatctacaccacgatcatcgtggcggcagggggtgacgaccgggttatggcgaactactttcccatggcccttaagggtcaggcgcgtggctggttgatggcccagctccccgactccattcactcctgggaggatctatgccagcagttcgtcacaaacctctaggggacatatccctgcccgggggaagaagcggacctgcatgctgtgcggcggaaggacgacgagtccctccgttcgtatatacagcgcttctgccaggtccgccacaccataccgtgcattccagcccacgcagtagtgtatgcattccggaacggcgtgcggcataaccgcatgctggagaagatcgcctccaaggagcccaagaccaccgccgagctcttcgagctggcggacaaggtggcccggaaggaggaggcgtgggcctggaactctcctggcaccggtgcggcggctgcggctgcccccgagtctgcccctcgctctaagcggcgagataggagaggcaagaggaaaccggcccgttccgatgacgagggccatgtccttgcggcagagggcccacgtgggccccgcgcaaaggaaagattaccggcgataagccgagctccaccaccccctccggcggaggccggtcggcggacaagtggtgttcggggcacaacacttaccgccacagtctcaccgactgccgctcgtcaagaacttggccgagtggttccgaaaggccgatgaggaaaagcggcagggtcgacgggagggcaaggctcccatgacctcaaccagtgaccagcgagaggaggccaagaacaaggcccccgctgacgatggcggaggtggtgaggatctggatttctagataccccaagggaccgtcgccacattcgatgggggggcttgcgctcgcacttctcgtcgagggttcaaggctatgaggcgggaacttctggccgctgttcccacccatgaggcgatccggaaggcgtgctggtcggaggtaaagctcacctttgaccagagcgaccatccgacggtactcgctcggggagggaagttggccctggtggtctccccgactatccacaacgtcaagatgaagcgtgtgctggtggacggcggggccagtctgaacatcatctccccggctgcctttgacgcgctcaaggccccggggatgaagctccaaccgtcgctgccaatcattggcgttactccgggacacacgtggccgcttggtcacgtcgagctcctagtaaccttcggcgactccaccaatttccgcaccgagcggatcgacttcgatgtggcggatctcaatctgccctacaacgcggtcctgggcagacccgcgttggtaaagttcatggccgccacccattacgcctacctccagatgaagatgccgggtcctgccggtcccatcaccatctttagtgatgtcaaagtcgccctcgcctgtgcagaacagcgcgcggacaacctggcggcggccacggggccgcaggccccggaggcccccgcgtcccgcgcccccaagaagcgcctcaccttggccgacgaggtgcccgtcaaggagattccccttggcgacgatccgtccaaaaccgctaagattggcgaaaccttggacgccaaataggaaggcgcgctcatctccttcctgcgggcgaattctgacgttttcgcatggaagccgtcggatatgcccggggtccctagggaggtgattgagcaccgccttgccgtgcgaccggatgcgcgacctgtccggcaaaaagtgcggcgtcaagccccggagcgacaaaccttcatcagggaggaggtggcgcggctcctggaggctgatttcatccgcgaggtgattcatccggagtggctggcgaacccggtggtcgtcccgaaggccaacagcaagctgcggatgtgcatcgactacacagacctcaataaggtatgccctaaagatcccttccctctaccacgtatagatcagatagtcgactccactgcggggtgcgaccttttgtgtttcctagatgcatactctgggtaccatcagattcgcatggctagggaagatgaagaaaaaactgccttcattactcctgtaggcaccttttgttatacaactatgccttttgggttaaaaaatgccggccctacctttcagcgcatgactcgaattactttaagtaatcagatagggcgcaatgtagaggcgtatgtcgatgacctagtggtaaaaacgcgccgccaggacacgttgctgcaacacctggccgagactttcgatagtcttaggtccacacgtgtaaagctgaaccccgataagtgtgtgttcggcgtgccggcgggcaagcttctcggttttctagtctcttcccgaggcatagaagcaaatcccgagaaaatacgcgtgatagagaggatgcgccccccagcaagctcagggatgtgcaatgtgtcgctggatgcatggccgccctgagtcgatttatatcaagattgggcgagagagcgctgcccctattcaagctcctcaagcgccccaggccgtttgtatggacggaggaagctgagcaagccctcaatcagctgaaagcttacctcacttctccccctatcctggtggccccggggccggaggagccattgctactctacttggctgcgaccccccacgtggtgagtgccaccctagtagttgaacgcgaggagaccgagcaggaggtccctccggctcgtgatggcccctcgtcccccaaagcccccagcccccgggaggaccccgaggcccccggaggagaaggcgaggctttggcaggaggccccgagccctgtgatcccaagataatccggaatcccccgggggcccccgagcaggcgcgctccggatcatccgcccctgacaacacgaaccggcccgcccgaacggtgcagcggcccatctactttgtcagcgaggcgcttcgggatgtgaaaacccggtacccgcaggcccagaaaatgctttacgccgtattgatggcctcgaggaagttgcgccattacttccaagcacatcgggtttccgtggtaacatcgtaccctctcggccaaatcttgcacaaccgagagggcaccggacgggtggtaaaatgggccatcgagctggctgagttcgacctgcacttcgaaccgcggcacgcgatcaaaagtcaagtcctggctgacttcatcgcggaatgggccccagtggacgaccctgttccgtccgaaccccctccctcccccgaagagaaagaggacccaaacgccgacattcgtggcggacactggattatgcatctcgacggctccctcacccttcaaggcgcgggtgctggagtcacactaacctcgccaagcggagacgtcctcaaatacgtcgttcggctcgacttccgagccacgaacaacatggcagaatacgaagggctcctcgcaggattgagggcggcagccggaatgggcatccgccgtctcctggtcctaggtgactcccagctggtcgtaaatcaagtatccaaagagtaccaatgcaccgaccctcaaatggatgcatatgtccgcgaagtacggcgcatggaacgccacttcgacggaatcgagctccggcacgtgccccggcgcgacaacacactcgctgatgagctgccgcgtgttgcgtcggcgcgagccccacttcccccggggacctttgaagaaaggcttgtccaaccatcagcacgaccgaacccctcgaggggctccaacgacatgccctccgccccgattccttccaactcgcgccccttggagccggagggggtcgaccccgacccccctccgcgcccccggggcccgagggggtcgaccccgacccccctcgccaagtcgcatgatgaataatgtccgggcgtatctcgacgacaa

SEQ ID NO: 7627 - DNA, 23906 bp, Oryza sativa
aaaaagagagaggggagagtggggatccttaaataggggagagggagctcggacgtagccgggagaggcgggaatcgaatccctgccgtctcgagtgcgggcgtgggcgggagagagagggagtgagcgcgggagacgcgggcgcacgcgcgggcgtggccgacgtggcccggaagacgcgggagcgagggcgcggcggcggttccggggcacggaggtggcggctggaggttgggggaggacccgacaggtgggccccacctgtcggcgaccccaggagagaggaggggctcgggcggccggctcagctgggcctcggccttcggccggcccagcgggaaggggagggaggagagaatgggccggcggcccatttcgaaaagaaaagagggaaaaagaaagaaaaagaaggaaaagaatttccagggaattaaatattgcttgtgctcatttttaattgattaaaattatttctagagctctgaaaattccactaaaaatcttgttagcgtatttcgacatgtagaactcaagaaaaatcgcacatgccagttccgattattatttgcattaattattttagggtttctctcttgcttttgcaccggtattttcttgagaccatttataaattcaatttaggcttgggagaagaacttcagggtgtgacaaacctaccccccttaaacggaatctcgaccccgagattcggaagagccggtgaagaggtgcggatgggcggccttcaactcatcttccctttcccaggttgcttcttcttctgagtggtggctccattgaacccggcagaacctagtgaccttgtttctggttcttctttcactggtctcaagaatacaaactggcttttccacataggttagatcttcttgaatgtcgatgtgctcctccgaatcggcttgttcttcgggtaccctcaaacacttctttaactgggacacatggaacacgtcatggatactgatcattttgggtggaagttctagctgataagcaacttctcctcttcgttccaagattttgtatggtcccacgaagcgtggtgccaacttgcctttcgtttggaaacggtgtactccccggagcggagtaacacgaaagtacacgtaatcccctgcttcaaaagtgagctcccttcggcggttgtccgcatagctcttctgtcgagactgggcaattctcagcctctctctgacggttctgactttctcttctgcttccgttaacacttctgttccgaacagttgactttcgcctatttgatcccagaagagaggtgtgcggcacttccggccatacaacgcttcgaacggtgccatttgtagactggcctgatagctgttgttgtaggagaactccgcatacggcaagcttttgtcccatgctccactaaaatcaagcgcacaagcccttaacatatcctccaatatttgattgacccgctcggtctgaccatcggtctgcggatggtaggctgtgctgaagttcagccgggttcccaattcctcttgcaatttctgccagaactttgaagtgaattggctccctcgatcagatactatctttttgggtactccatgcagacacatgattctcgagagatagagctctgccaaccttttgcctgtatatgtagtatgcacaggaatgaaatgagcaactttggtaagtcgatccacgaccacccagattgaatcgtggcccgatgatgtcctgggcagacctgttatgaaatctatcccaatttcttcccatttccattccgggatctgaagaggttgtaacaatcctgcgggcctctgatgttctgctttaactcgctgacaaacatcgcagagcgcgacgaattcagctatttccctcctcatgctggcccaccaaaaattttctttgagatcttggtacatcttggtactaccccgatgaatggagtattgagtttgatgagcctcagtgagtatcagatcttttagctctttgtcatcaggcacacacaatctttctcccatgcagattgtgccatgttcatcttcaaggaaatcccgggcttttccaacccacatattctttttcagttcagctatctcaggatcatttacttgagctgctctgacttgatccacgagcgtaggacgtgcctctagagcagctacgaacccgtgttctacgattcccatgttgagacgttcaagctcttgctgcaattccttacacatgccttcggtgcataaagcattgtagtagctcttcctgcttaatgcatctgccaccacattggctttgcctggatggtagtgaatgctcatgtcataatctttgattaactccaaccatcttcgctgtcggagatttagatcaggttgggtgaagatatatttcagactcttgtgatctatatatacttcgcagtggttgccaatcagatattgcctccagattttcaaagcatgaaccaccgctgccaattccaggtcatgtgttggatagttcccttcatgtggacgcaactgccgcgaggcataagcgaccactctgccgtcttgcattagaacacatccaagcccgtggcgggacgcgtcgcaatagacttggaagtcctttgtttggtcgggcagaatcagaactggagcagacactaatctcttcttgagctcctcaaaactcttgtcacactcggccgtccatttaaatttctcatctttcttaagcaactgagtcatgggtctagcgatcctggagaaattttcaatgaaccgacggtaataacctgcaagtcgaagaaaactccgaatctatgacacggtcttaggtggggtccatttggtaactgactccacattcggtggatcgactgccacgccctgagctgtaatgacgtgacccagaaatttgacttccgacaaccagaagtcacacttactgaacttggcatataactggtgctccttcaacttctcgagtactagaaggagatgttgctcatgttcttcttcagactttgaatagataagtatgtcgtcaatgaataccacaacaaacttatcgagaaattccatgaacactttgttcatcaggttcatgaagaatgcaggtgcattggtaagtccaaaagatataaccgtgcactcatacaacccataccaagtggtaaaggctgacttgggaatatcctcttcccaaatcctcaactggttgtagcctgatcgcaggtctattatggaaaacaccttggctcctttcagctgattgaacagatcatcaatccgcggcaacgggtatttgttcttgaaagtgacctcattgagtgtgcgataatcgacacacattctcttcgtcttgtccttcttctccacaaaaatgactggagcaccccaaagtgaagtactcggtcgaatgtaccctttctgcagctgctcatcaacctgcttcttgacctctgctagctcgttggctgccattctgtacggtcttatgtaaattggagcagttcccggtgccaaatcaatccggaattcaatctctctcttgggtggcatggtagtgaggtcctcggggaacacttctggatacttgcagactatggggatatcttccaacttcctcgaactcttctcctcggtgaccactggaatttccacctcaatctgattcaaggagaccccctgctttggtgagactggagatttgtacactactgtttctcccttctcattggtcaaggtgactgtgcgattcacacaatcaatgacacccttgaacttggttagccaatccatcccaagattgatatctaggtctttggattcgagaagaatgaggttggctagaaatggtgatctttggatttctattgttatagaagggctgaattgaaccgaagtggagctattccctagggtatgaacccgcattggtgtactaagttcttcccttattaacccatgtatcccaacaaacttctttccaatgaacgaatgcgttgcaccagaatcgaaaagtactgttgtagggattgagttaacaggaaacgtacccagtacgacctctggtgctacttgcgcctcttctgcggacgcgtggttgacacgagcctgggcaaaccttggcccggcacgccttggcttcgggcatttgtcagcaaagtggccatgctcgccacagttgaagcaggatcctggctttgctccagtctccttcttggcttgggctgatggagctgactgtgctggtgccaatggtgggcgtggagctgcactgcggttgggctgacctccctggtggttctggctgccactagcgccctggtggaagctgctcgagttgaaagggcgatgttggcggacgatcatggtggtaggtgtttacacccaaatttggcacctaggattaaaataggaaagattgccgaaaattggaagtctaccggtttcctccgagtgggccggtctgacagccatgtcttggccggtcagaccgccggttgagagccggtcagaccggcggtgtgtggccggtctgaccggcaggtctgagttcgactgtgtttcgtcaggtctcgaggtttgcttgctcgggaaggcatgttttgggtttcctttggtttctaacccgagttggatgtggaggagggcctgtagagggcaagtgatgtgaccatggctactatggatacaaccattgctcacatcatggatgaacaagataatatccagatcaagtcctccaagtgctggaatcagattcggccacctgctacactgctgacttcaaatggccgccgaatctgcatacgacctccttttcggcccatgagtacttgatggaaagctctcggagtcctctttccaacggatttggcatcatcgccaaattccatcgaagtcatccacagatgaagaaacaaggtgctgcgtcacctgtcatgaacctgtgggcttgtaacttcttcatttgggaccccggtccaggtggggcccatgtggggtgcgccccaagctggtggagtacgaccctaggcacccctaggtcgtcctcccacccctatatatagctagttaccccttcagggttttgatgcaagccattgctacttgcttgcagcgcgcgtgtcggctagaccgtccgtctgcttgttcttcggaaccccaacttatcatttgtattaaattcctatttgcaatatcagattgcttttatcttgttcttgcttgtttcttctatttgcttgcaggtatagggttgatctgcaccggcaagatcaacaacccacagagaggtgtatcgatcgctaaggcgcaacacaacgtctcgtacggttgtagtcggattgtcaacgtttctcccaaatcgtagttatcacaactcaccaaaagatcgggccaacaacagccttgagtgtcgagaggaactcagggttcatcagcaagaccaacccctatataagggacatggccggttcattgtaaaaaatcgatctacaatcaatcagttgaatcgtttttcatattgcttttaattttctcttagtttgtccatctttgtcggtttgcgccgtaaaccgtctgccgccgctgcgagtgtgcgacacctctttgtaggtttgtcctgaaaaccttccgttttgcccacgagacgggtagttatctagaaatcggctccgctagccggtttagttaccaaaacccatctaggtttagctctttgctagatcgaggtggttagcgactctaggatcaccgcaaggctttaggtgctgcgatcgtgcttgtcaacttgtcacaaaaagttgccaacacgatttttggcgactccactgggaaggagatccgttcatcgtcaactcaacttcgacttcaccatgacgaagccgccatccaagacggaggtggagccatctaatgtgataccggtcacattggaggattccgaaggagaggaccgcaaagctatggaggagtacatcaacgagctcacacgggaggcgttgatgagggcaagcactaggactcgtcaaggcgtgattattaagcccgggccacgtcctaagctcgcccccgacttggtaagtaatgatgaggtaacacaatctatccaacaacaagtagcatctacaatagattcatctatgattgcttttaaagataagttagatgcaacttttgagggtaaatttgatgagtttttaagggttaaattcggccctcttatggccgattacatgtcaaaggataaagcctctaccactgctaaccaacctcctatagatcaaacgggtagtaaaaccgatggagcggcgcacacggccggtctgaccgggcctgacggccggtcaaaccacgacttagccgtcggtctgaccggccaaacggccgatcagaacggcacaattataccgatacaggggatcgatccgatgactaatgctagttatttgtatcatcttagaacatttgatcctcctatatctactgctgcaaataatctccaagttcccccacatgttcctaatgcttataatgatgttgctagggggtatcctcccgatactagacaaggccaatataatcatattgcggaacaaacacaacctattaggccaccaaatccaccgccaaatcaacatgggcttaataatatggaggacataattagtgagattattaggaatagattcgggattgaaactgggtattgtgctagggtttacaaaaagccgtatcctgattattatgataatgtgccgtttccccgtaattatagagttcccgaatttaccaagtttagtggtgaggatagtaagaccacatgggagcatgtaggtcaattttttggtgcaatgtggtgaggctaatagtgatacttttaatctgcgcttgttttctttatctttgtccggtaatgcttttacatggtttacttctttaccagcaaattctattcatacttgggctcaattagaagaaaaatttcatgattatttctatactggagaaactgagcttaggttatgtgatttaacatcggttaagcaaaaatataatgaatctgtcattgattatattaagagatttagagatgttagaaaccgatgttataccttgaatataactaatagagatttggctgatcttgcttttaatggtttaattgctcctcttagagaaagactagatggccaacaatttcttgatgttagtcaactcatgcaaagggctctggctcaagaaagccgagttaaggataataaaaaacttgtcagatcttatgacaaaaagcctaatgttaatgtgattgattaccctgaggctagtgatagtgaggaggagggtgatcatgatatatatgttgctgaatggtcatggactaacaaaaacaagccttttgtttgctccaacctaatgccgactcctcgcaaagatcggcaaagtgaggttaaatatagttttgatgtggccaagtgtgataagatttttgattatcttttacaagaaaaacaaattagattacctaaaggccatgtcataccatctcaagaagagtttaaacgccgagcatattgtaaatggcatgattctcattctcattctactaatgattgcaatgtgtttcgacgacaggttcaatcggccatagatgaaggacgattgaagttcactgatggctccaagatgaagcttgatcatgatcctttttcggtgaatacaattaatttcaatgataaaaaggtgttaattcggccggagcaagcagaatctactaaaggaaaaggagtggtcattggcgagccaaggcctaagatgatagtgacaaagaaaccggaagttagtgtttggaaggagaataagagtggcgcttcaacttctaaagcccctaggaagaccaaagtgacttttggtatgcttttggagaagtatgagaagcaaggtggtgagagggttcacaacaaggggaaaagaccaagatcacctcctagggagcgatttggtcattcaccaagacggtcgcattcacctccatatcatcatccacaagacatgtcatggggttcttatcgaatgtcgccgccgggttatccttatccttacttcatgccatggggggcaacgccgcaaattttcaatcatatgcctccaatgcaatttaaccaaggatggggaggaccgaggaggccaattcatgagcgtttctcttcaccaaacaataggcggttttatggtaagaatcgggctaataatgaaaagagggaaggaaagcgcgtcaaggtggaggcaaggacttcagaagtaattaccatcaaagtggggtctcatgatgtgccaataccttctggagatggagttggagtatcctcaaacaaaaaatccgaagccaaaaccaactcctcgcagtcggccggtctgaccaggccttctggccggtctgaccgcagccatgcggccggtctgaccgggtcatcaggtcagtctgaccgccgacccgacagtggtccgaccgatgcctcgggccggtctgaccgtgcgtcaagtgtcggtctgaccggcatgtctggccggtctgaccggtggtctacgtccggtctgatcaggctccagcgccggtttgacaggggaattgcaaagggcgatatgaaggcttcatcgtcttcaaacaagattaataggggacattatttacctcctagaacagagccgaatcctaggtggatgcctaaggatttgacggctactcaaaagagaaggttgcaacgtcttcgggctcaagagataagagagaaaaaagctgaagaacaaagagataaaaggttcaatgagttgcgaccgccactggtatggaggcgtaaatccatagagaaggaaaagccagttgttgtagaggagagggaggagcaatcggttgataaaggtgaatcatctccaaaagaagacatggatatcaacatggtatgtatgttgcctatggagttttgtgctatggatgaagccgaggttgctcaattctcattaggtcctaaagacgcggtttttgagaagcccgatgagtcaaaccgtcacatgaagcctctctatctcaaaggccatgttggtgggaagccggtctctacgatgctagtggatagaggtgccgccgtgaacttgatgccgtattcattgttcaagaagttggggcgtgaggatgatgagttgaagaagaccaacatgattctcaatggcttcaatggtgaaccaacagaggcaaagggtatcttttcggcgaagttcaccgtgggaaacaagacgctaccaaccgctttcttcatcgtcgatgtgcaaggtaactacaatgttattttgggtcgttgtttgattcatgccaattgttgtgtgccttctaccttgcatcaatgtttaattcaatgggacggcgatgatgttgaaattgttcaagcggatacatcggccgaggttgcaatggccgatgctacttttgagtggcgtcatgggaatatccaatgcttatcagggagggaactttctagctatgattttattagtatctccgatggcaaatttgtacctatttctgtaaagccggctagtgtagcacggctaagccatataaatttgtataatgagtaaagaggctaatttagagtggttacaaaagagggtgcaagaatatcggtctacaaagaacgatattggcgaaaccattgaagattttgatgaagtagagaagcttggacaagggtttacatcggccgatccattggaggaagtggacataggtgatggaaccaaaccaaggctgacttttgtaaacaaaaatatgagccgattataaggttaagataatcgagctacttaaagagtatgttgattgctttgcatgggaatatcatgagatgccaggtcttagccgtgagctcgttgagcatcggcttccaattaaaccaggttttaggccttataagcaaccacctcgtcgttttaatcctttgctatatgaccgagtcaaagaggagattgatcggttgttgaaggcagggtttattaggccatgtcgttatgtggagtgggtctctagcagagtcctagtggagaagaaggggagtggtaagattggagtttgcatatattttagagatctaaataaagctactcccaaagatgagtatcctatgcctatagccgacatgatgattaatgatgcctcgggtcataaggtgattagctttctagatggtaatgccggctacaatcaaatctttatggcggaagaggatatgtacaagatggcttttaggtgcccaggatttgttggtttatttgagtgggttgtcatgacttttgggttgaagaatgccggtgcaacatatcaaaggacaatgaatttaatctttcatgatttattaggtattatcctagagatctatattgatgatattgttgtcaaatcggatggtatggaaggacacatggccgatttgaggttagcttttgagaggatgcgccggtatggtttgaagatgaacccacttaaatgtgcttttggtgtgtcggcggggaagttcttaggattcatggtgtatgagagaggagttgagattgatcctaagaagatagagaagattcgtgatttcaaagcgccgacatgcaagaaggaggcccaaaagttgctaggtaaagtgaattatttgagaaggtttatttctaacctagcgggtaaaatcgatgcttttgttcctatacttcgcttgaaaaaagaagccgatgttacttgggggcaaaacaacaagaggcgtttgaagagttgaagagatatttgtctactccacccgttgtacgagcgcctaaagctggaaagccttttcggttatatattgcctccgaagacaaagttattggtgccgttttgacacaagaggaagatggcaaggaatatatcattacatatttgagccgccgtcttttagatgccaaaacgaggtatgtttttatagagagactttgtctatgcttatactatgcttgtaccaaattgaggcattatttgttatatagtacatgcatagttacttgtcaagccgatgttattaaacacatgttgcaaaggccaattctaagtgggagaattggcaagtgggcatatgttttgatagaatatgatttggcttatgaaccattgaaatctatgaaaggccaaattgtatgtggttttatagtagaccatcatacagatattgcttatgagggagaggtttgcttagttgaagttataccttggaagatttattttgatggttcttcttgcaaagaaggtcaaggcataggggtagttttcttttcacctaatggcatgtgttatgaagcatctgttcgtttggagtattattgtacaaataagcaagtcgaatacaatgctttattgtttggcttacaagttatggtgatggttggagctaaatacatggaagcttttggtgattcggaattggtggtgcaacaagtcaccggagtctacaaatgcttggacggatcactaaataggtacctcaattcatgtttagatattattgccaattttgataatttttctattagatatattgttaggcatgataattctagagcaaatgacttggcacaacaagcatctggctataatgtgaagaagggattatttctgatattagaagagccggtgcttgattttaaatctttgtgcgaaattggcaaaactggagaccagggatggtctgaccggcattgcactgccggtctgaccggtaaccaggggcggtctgaccggccgcatgctgccggtctgaccggcgacccagagcggtctgaccggccctgcgtggtcggtctgaccggttctgggcagaatgctggggggcacgtttcaatcaatttagaggctgaattaactgtgaattcagacatttgtgcccagggaacagaagaatattggagaattcctttgattcgatatttgaaagatcctacgcaaaattcgatatttgaaggttgatcgcaaaattcggcggcaagcattcaaatatacattgcttgatggagatttgtatcgccgaaatatagatggtgtcttgttgaagtgcttagatgaagatcaatctaaagtggctatgggagaggtacatgaaggaatttgtggaactcatcaatcggcccacaagatgaattggttgcttaggagagctgggttctattggccgaagatgattgataattgcttcaaatattatagaggacgcgaggcttgtcaacggttcggcaatgttcaattggcgcccgccgccgtgttgaatcccataatcaaaccatggtcattccgaggatgggctttggatttcattggtcaaatttatccttcgtcatcaaaggggcataggtttctgctagttgctacggattacttcaccaagtgggcttcgtgcctttgaagaatatgactcatacagaggtaattgactttattttgaagcatattatccatagattcggtattccacaaacattaactacggaccaaggtgcttcttctatgtctaaggaagtgaagagttttaccgaatcttatggtattaaattgttgagttcttctccttactacgctcaggctaatggacaagccgagtcgagtaataagacattgttgaagttagtgaagaagaagattgaggaacacccaaagaggtggcatgagatgctttccgaagcattgtgggcgcataggatttctaaacatggtgccactaaagtcactccttttgagttggtttatggtcaagaagccgttttaccggtggaggtaaatcttggttctcttcgttatatcaagcaagatgatttgtcaaatgaagattacaagacgttgatgggagacaatcttgatgaagtcatcgacaaccgcttgaaagcattggaataaatagagaaagagaagaagagagtggccaaggcgtaaaacaaaagggtgaaagcaaagttgtttcaagttggagacttggtttggaagacaattttgccattgggtactcgatccaaggagttcagttagtggtctcctagttgggagggtccttatcaagtatgcggcattgttcgagggaacgcatattttttggagacacttcaaggggagcgttttcagcgagcaatcaacgggaaatacttgaagaaatacttcccgagcgtttggcaagacgcttaggaggtactatggctggtaattgatttatcgtcctaagaccaaaacatgttctatgcttttagattcacgttgttcatcaaaaaggcaggggggcatatgtttacacccaaatttggcacctaggattaaaataggaaagattgccaaaatttggaagtctaccggtttcctccgagtgggccggtctgaccgccgtgtcttggccggtcagaccgccggttgagagccggtcagaccggcggtgtgtggccggtctgaccggcaggttcgagtccgactgtgtttcgtcgggtctcaaggtttccttgctcgggaaggcatgttttgggtttcctttggtttctaccccgagttggacgtggaggagggcctgtagagggcaagaccaacacctatataagggacatggccggttcattgtaaaaaatcaatctacaatcaatcaatcgaatcgtttttcatattgcttttaattttctcttagtttgtccatctttgtcggtttgcgccgtaaaccgtccaccgccgctgcgagagtgcgacacctctttgtaggtttgtcctgaaaaccttccgttttgcccacaagatgggtagttatctagaaatcggctccgctagccggtttagttatcaaaacccatctaggtttagctctttgctagatcgaggtggttggcgactctaggatcaccgcaaggctttaggtgctgcgatcgtgcttgtcaacttgtcacaaaaagttgccaacagtaggtccaccctgctgtcctggagtgaagcgcgatcgctggtggtttccttggttggaccggaactacgctgcctttctgttcctgtccattttgttgcgctgatcctcctgacggattgccttgtcaacctagttctcaaagttggcgtagtctctagagatcaactggttggtcagctcgtcatccaggcctgctaggaacttctcctgcttctctacgtcagtgcggacatcctccggtgcatatcgcgctagatgattgaactcatggagatactcagacactgtcctgttgccctggtggagggctcggaattctctcttcttttgtgccacgatctaccatgagttcagcccaatgttcaattcacaaagactagggtgacaaggaatcatgggcaatcaataattatcaaaggtaggataataataacaattaggtcacgctacccatcgatggtttataaacaaaacaatgcatgtattcaaaacaaaacatttcacaaatgggttcaatatgttcaaagagtgcacttgccttgatcctagtactgtccttgcacagcgtcttctgaagcaaactgctcttccgctccaacgtctacacgattgcaaacgaaaaacaaataaacacaaagaaaaaataactaaataacatcaaatgaaataaccaattaaatcaggaggtaaagctcgattttagaagaatttaggaggaagaatggatcgaatcggagttcaaacggaaaagttatggcctcctgaagtttgaattcggggaaaatccgaggataaaagaaaaaggaatattccaagaatattctctggatatttaatttcggaaattgaattaattttggataggaaaaaatatatgtgggcccactgtcattggcatagtgtatgggtggactcggtgtatgtggactcgatgacgtggaacgacacgtggcgacacaaggcgatgaggtggcactgacatggatggatatagggctgacgtggcgaaagaagggattatgtagatccaactgctgggatttgatctagggatttggacggcttagatttatttgaggattttggatggcaggtcccacacgtcggtgtcacaggggagaaggcaagcagcagctgctccatcacacggcctgggcgtgctctggccatggcaggaccggcggctccagcgcggcggcatcggcggctttcgtcggcgatggcgcatggcggctgcagcaaatagtggtggaggcagaggaggtggaggccaacgcggtggcgtagcaccgagctccgggacggcgtggagatggcgcacggcgatgagaggcggacgccggagttgaggtggagagagaaacggcggctcgaaagggagagagggctcagcctcggggctttaccagcggcggcggcacgggaaggagatggtgacgacgacggcgcggctcccgacggcggcacgaagcaacggtggcggcggctgctcacggtggagatggcggcggctttggaaaaagggggaaaaaggggcggtggccgatggtatttataggggagggagtagctagggttagggcgcacggtgcaagctttggaaaagcggcggctccgaatttggtggcgcggcttgcgggatttggcgtcggccgtgtgggcttgcggcgcggccggcgcgggctcggtcggcggcggcttgggccggcgacatagagaggaggaggaggccgggccgcggcggcacgtgggctcggggcttggcctccccgggcctgcagctcaagaaggagagagagagctggaggtagaagaaggtgggggaaaaagaaaaagaaagaagaataagggcagaatagagaaacagagaggaaggaaaaagggaaaaagacagggacttctctggaaaattccaaatataaagtatttgaaatttttgggaaggatttaggatttgaaaaggaatattggatttggatggaatttgaattagggattgagctccacttccgaaatacaaattaaatccaactaactccaattaagaatcacaaagcgaacaacataattaattaattaatcactttaaaaccgtttgatttaacgaaattttcattaagctattttagacgaataaaccaaatgtgaaatttcgcaaataggcgagaagaacagaaagcgaaaaatcaggacgtgacagaatttaaactgcaattgttttgatctgaattaaaacacttaaaacagcaagcaaatccttattaagacagccatatcataggcacatgatatcgactgtcgactgacccacaagcgaacaatcctaaacacacaaactaacaggcaattactaaacagtcgataaactaagggaaaatgagcctaatgctcggaacggctcctgcagtcggtggagtcgaaggcgtcctcctgctcgtcgccaggcccctctgagcggctcctggagtctggcagatacgtctcaccgctgcccagctctgagccactggaactgctgctgctatggtcgcggctgccactaggagtagtaggcaaccaacctccgttgccactggctggacccctggcggctgacgctggagcgaaggagagagcggacgcgggagctgacactggcacaggagctggggctggagctggagctacgggtgctgcgggaggagctgcgggaagaggtgggttcttgggtgcaagctgaatgcgcacgggagcagtcgtagacttgcggggcgtggtgcggatccgaactcctcctggcgctggaagacccttcaattgagcgttctccttcttcaggcgtgctatctcatcctttagagctatgatcctcacaagcttcccatcattcaaggccttggatgccttgtgcaggtcagagtgcatcctgtccattcccctcatcacggcgcacatgtggccgaaggtggtgttgttctcgccggctgtcgggcggaaggtgctggcgtcgtcgccacttgctcggcgagggtggaagcggtacgccgtgttgtagaagatgtagttgtggcgatcacgaagtctagccatcatcagatatgctgcctcctgacaagcgtgatctgcggagcctccagatgcctcaaccaccgtattagcgaggcaggtgcccacatagccatgaacctccagacgaaaatggtggggaagctcgccactgagtggaggaacggtcgagtactccggcacgttggggtagtgttgagagaaaacacgaggcctgggagatctgcttaactccagtgcaggtccaaagctcgccttcgggtgtactagcatgccagttgattttatcctgtaattaacaagaaataaaggcaaagaaaccgcggttaaatctataaatgatagccgatcggctaggtgccgatgacatatcatttatctttgagccgatgtcatatgtgaattgatcggcagttgtaaatagacaataaagaaccaaatctattcgatcggctgtagatatttccaatatatagttcttatatcgatatatacttaaatcaagtgattgggatagatcggccgccatgccaagacattataaatcacttagatcgaagtatatattaataacagggctatatatgtttatagcatagccgatcagatagatctagcatgtatcggctaatactctgatactactctatatcaggatattaaaacaggtataatatatcaaacaaaggcctaagatacttagatacagcaatatcttgacataatgggcagatttaacatgtcaatgaagcatatagagcaaatatagttaaatcagataaggtcgactgaaactccgatgctaccctaatcggcaaccagaaggcaggctagagattgatattctaagcacgacttaatagatcaaactcaactgatgcagcattaagtatgaaaagaagaacaatatctagacaatcaagccgctagaagtttcatagagtggtagataccttatacaatctaagtcaacatcgatatctaacctaatcggctgccttctacagacagatgttagccgattgtagattagatagcagtattgccggagattatgtaagatatatgataactcgacgaattacataaacgagatcagagtatcataaagatggaagcactaatcccgagaacacaagtcgtcataacaagttttacctcttgttgaagatcgaaaccgatgcagctttatgatactctgaattacaagatatgtacataacggacacgactactatctctagcaaactctaagatagcataagtctttgtggcagacttttgcccaatcgtatctctaaggagattacataaaacaccctaattaatagatacaattgccttctcaggactctatccatgtgcggcaatcaccttgaagcacctcaatccaacccgatatcatacatcaagctgcattgtcggaatcagctgtatcggcttacctagtctgactcagacccagccgatcctaatcgtagccgatttggactccagcgattcctgccctgtttccgaactcgatctccgcctccaattttgcttcgatctaatcttctttcatgatgctgatgttaccaaattcggttgttaacaggtagcccaccaccagggtcatgcgagccaactctgccacaaaatcatccatgccttctccgtggtggttgggtgggtggtcggccatctagagaagacaaaggggtaggatcaatgcatgctcaaatccaatttaaataaagtagtaaaagactcaattaaaatgaacaattgagagcagagttttgtgcatagaccatttttgcatgagggcgaataaataagacggacttacatagcgataaaataatgagaaattagatacatactaataataataataagagcattaataccttgcaacccatattcctgagttaggacctaatgcattcctcccatcaaaccctagactgacctaatttgacaaatctcacttaaacgagcgaccaagatttttcccttgaaccacaagaacagatcccaattttcccggaacaaatccaattgcaaagaacatatgcaatgaaaaggattcagagggctcttaggttttttcccatttggcttgtcctacggtcaaggttggctctgataccaagttgtcacgcccagaaattcccgaatagaattccaagcagaatgtgcattaaaatccccatccaggaccggccggggggtacacaaacgacaaagttgacatacagatccacgtcttacaaaaattataaaagtcttacataaatgtagcggaaaaataaaagataactggagctaagccttgacttggactgcagcgggaacaccagtccacaggcatcctcgacggcacgaacgaagcctattcctcggagaaaccaccatctaacgcatactcaaactctggggtttggggaaaatagagcaagactgagtataaccaccacactcagcaagtcataccggaacagggggtatgatgcaggatattaccaaaggatagctagagaggttcttttgcgtaaaacgagcatttataacagtagttgaaagcaggaaatcaggtgtaataattaatcaatattagccatccactgtccaacgctacaccacgttgcaacaggcccaaccaaccacctgaactaatcagttccatcatattaaactagggtgagactaatcacggtgaatctggttgaccgcccataaccgcgagcacggctattcaaatagttttactctgatcagaggtgtacaactgtacccacaagacacagccccacgacacgtttccgtgcgccgacatgccaccacgacataccggaaagaggccgtgacaggactcttcgcataaccccctctagccaagcacaccacacctcaggtttcacccccgtccccagcgggcaacgggcagtcccctctcgtgcctaggtgaatccggaagcgacaaaggccgtcacagggcccgccctgctccatcacgcccaccctttcctggatgcgtcaactagaggaaaactacactacaagcccagccgttgcacacgctggcttgtggtaagtatgataagttcttccagggcatcccgcgaaccggtccttaaatgccatgggcgcgaccaacaaaaccatgcacccacagcccaccatttgatatattttaattaaccaacaccggagcggtggcattaaccaacgtcattactagaatctgatatctatgcattaatgtgatttcccccattgtgtgctagttgaactaagcatggctaagcaatccctagtccaatctctagtcatgtttatatcccaagctaacaaaggagcatggtacagaaatagcatggctgtaacagtaggtaaacatcccatagtatcattatgaaacaatgcaatatttgaaggaaaacaatagaacatttgcaatataggatcaacatcttcaagtgacaagcatgacttgccttgctctgctgctggaggaacctcggcgactatttcaaagtacaccggagcgtcgggagagccggaatctaagcgacatacaaagcaaacaatacaaacaggcaataagactactgaaacagagaacaaaaccatttttaatggattctactcatttttcttgatttactgagacttgaatgggcttaaacggagctcggatgaattagatatgaattttagaagattcactgtgcttttactataaacagaaaaatccttaattgatttattgcgcaataaatagaccctaggagagaggggcggcgccaacatgtgggccccacatggcagtgactcgggtggcggtccacagtggaccgagtccacggaccggagaagggggaggcacacgacgtggcgctgacgtggcgccgacgtggcgcacacgtggcggccacatggcacgccacgcgggtggccgaaccgacggccccgatctacccgagagtagatcggacggcggcggggagcacgcggccggcacacacgggcggcccaagccggcccgatggccacggtgcacagcggcgctaccgcagggcggcggcggcagacagcggtgaccgacggcaagcggcggcggcgcgacggcgcgggtgatgctagcggcggctaagcagctaggcggcagcgcggcgactaagcggcgtgggagagagagggaggaaggggaggaggtgtctcaccgacggcgattgatgacggcgagcgacggagggcgatgacggcaacgggacgagctctggaaccacctagcgaacacgatgaaaggggttagagagagagcaagatggaagagggcgaggacgccggccgaaggcggtggccatggcggtgctcaccggcgcaaggcgcggagtgggttccggaggcggaatccgacgggagaggggcggacggggtgacctgcacgacggcgaacgtgacggcgtcgacgacgcggctcggcgcagcggctagcggcggctagcagcgaccggagcggtggcggcggcggcggaaaggagggcgacagcgctagggcgatagagggcacgggagagctcgcgaaatggagaaaaagagagaggggagagtggggatgcttaaataggggagagggagctcgaacgtggctaggagaggcgggaatcgccagccgacgtggggtagtgggagaggagagagaggcgggatttgaaaatcgaatcctggccgtctcgagcgcgggcgcgggcgggagagagagggagtgggcgcgggagacgtgggcgcacgcgcgggcaaggccgacgtggcccggaagacgcgggagtgagggtgcggcggcggctggaggttgggggaggactcgacaggtgggccccacctatcggcgaccccgggagagaggaggggctcgggcggccagcccagcgggaaggggagggaggagagaatgggccggcggaccattccgaaaagaaaagagggaaaaagaaagaaaaataaggaaaagaatttctagggaattaaatattgcttgtggtcatttttaattgattaaaattatttctagagctcttaaaattccactaaaatcttgttagcgtatttcgacatgtagaactcaggaaaaaatcccacatgccagttccgattattatttgcatcaattattttagggtttctctcttgcttttgcagcggtattttgttgagaccatttataaattcaatttaggcttgggagaaaaatctcagggtgtgacactcacccaagatactccaatatgtccaaaaatcttgttttggtgctttttgaactttttcattccggtgaaaaacatcgcacccacgtgtgccaacataggccaatattggcattaatttacaaaagttcgccgcgcgattcacggagtgatttttcgacacggacacacccaattctctacaagtatgtccaaaaacatgttttggtgctttctgaacgttttcattccggtaaaatacatcgcacccacgtatgctaatataggccaatattggcattaagtgacaaaagttcgttgcgcgaatcacggagtgaattttcgacactgatgcacctagtaaactccaataagtcctaaaatcatgttttggtgctttttgaactttttcattccgggaaaaaacagcgcacccacgtgtgcgaatataggccaatattggcattaattgacaaaacttcaccgcgcgagtcacagagtgatttttcgagacggacgcaccctgtacactccaatatgtccaaaaatcatgtttttggtgctttttgaactttttcattccggtgaaaaacaactcacccacgtctggcaatataggccaatactggcattaattgacaaaagttcgccgcgcgagttacggagttatttttcgacacggactcacccaacatactccaatatgtccaaaaatcacgttttggtgctttttcaagtttttcattccggtgaaaaacatcacacccacgtgtgccaacataggccaattttggtattaattgacaaaacttcgccgcgtgagtcacggagtaatttttcgtcacggactaacccaacatactccaatttgcccaaaaatcatattttggtgctttttgaactttttcatttcggtgaaaaacatcgcacccacgtgtgccaatatgggccagtattggcattaattgacaaaagttcgccgcgcgagtcacgaattgatttttctacacggacgcacccaatatactccaatatgtccaaaaatcattttttggtgctttttgaagtttttcattccggtgaaaaacattgcacccacgtgtgccaatagatatctatattggcaataattgacaaaagttcgccgcgcgagttacggagtgatttttcgacacggactcacccaacatactccaatatgtccaaaaatcatgttttggtgcttttggaagtttttctttccggtgaaaaacattgcacccacgtgtgccaatataggccaatatcggtattaattgacaaaagttcgccgcgcgagtcacagagtgatttttcgacacggacgcaccctgtacactccaatatgtccaaaaatcatgttttggttttttttttaactttttcattccggtgaaaaagaactcacccacgtgtgccaatataggccaatagtggcactaattgacaaaagttcgccacgcgagtcacggagtgatttttcgacacggactaacccaacatactccaatatgtccaaaaaatcacgttttcgtgctttttcaagtttttcattccggtgaaaaacatcgcacccacgtgtccaacataggccaatattggtattagttgacaaaact

SEQ ID NO: 7628 - DNA, 19615 bp, Oryza sativa
cctttggaagggcgatttttaaaatcgccctccccaaggggacgcggatcctctgactttacttgctaaagtcacggtgtgactttcgaccaatctccaccgtccgactcatccgatggaggacgtctcctgcgggctgcttttgggccattaaatgccatttgattgatgatcctaaccagcgattagtgaacctaattacctaaccaatataatactacatgagattagtcagataactggaaattacttctaatctgtgtgctaaattgctgattccatgtgaatatattactgtgtaatcagcattattgaaaaatttagtgtaagcagtacatgtgattagttttctcgccagaacgtatcgattgatatattgcacgtacgtaaatgagatccctccaaacattttattacgaagaaattgtaagcgtgttggggattgaacacgggacctcggagtcaaaatcacaaatatcaagtgcgtctctatgttccacgtatatagcaatgtatttttatacatagttatttgcttaaatttctgttgttattaaaaaaatatacgtgcgttacaattttttctcgatctttcaaaattgatcgaggactttcgatccacttgattttcattttttttcatttcccaaaaaaacgcgggaaagcagctttattatttttagtcaccaaaataaaaaataatttcatgcagttgccggcctaatctctcattgagtagtattgtttagatttattacttgttgggtagaatcagtaataaaatgacattcatctgcaacagattagaggtaactagccggtcatcccgtgccttgcacgggttattggtattggtagtataaagatcaaaattttaaccatacgtttactacgttggttatattcgaattctagcatgttagattgaaataatagttaactactccgtttgtctcagaatataagtatttttagaattagacaacggttattaagaaagttggtacaattaaataggggagtgttgtggttgaaggagaagtgaagataggtggaaaaattgaatggtggaggattgtgatttgttgagaagagaatgttggtggtaaagttgttatattttgggacaaattctaaaggctagaagttgttctattttgggacggagtgaatactacttgttaattattaatttcgaattaaacaaatgctaaatttgtgatacatccaacttatttatttgatattgtggaattctggaattaattaagtatttagttgtgtctgtggtcgagtttaaatttaagtgcacccagtaattttataattttcaaattcaaaaaaaaatagttatactcagtatggaccctagaagatataagatatatgcaattagcttttttctctcgtaataataattagtagtgatgtatggtctcttgtctatctgtataaattaaagagtccacgatattgccaattgcatgttttatttttcacaaaccctaaataaactctaatgctatgattttgcgattttgccatgatacatgctttttaacgtgaatttggtcacgtctatcagatcaagcctagattgtttactcttgctgcaagtaattctcatatgaacctacgtacatgataaatatttgtttccgtgcatgattattcgcttaataggtttctagctagttcaaatagataaaccgtgtgtaggattaattctgaatttcgttctctttacgtcgcatgatttactatcgagaagaatatttatgacatcccaaagagtcaggattgctaaaattatgggggtaaaatttttcacttaatttcacgtcatgtatcctatatgatactctagtaagtatgtttctctctctctcatttccttttccaagtagataataattaaattatttttactcctaattcttataaactgtgtactaaaaaacaaaaggtaaatattgaaatttataatgtaattatttatgttatgaaatttagcgtgtaattaactacaatgcaagtgtatgtaatatattgtagttacccttcggttttcctaaaagaaattgtatctcgaaattaggctgctaaaatatacttgtaaatggagctctatatattaactgaaatacttgttaggaaaaattgatataaggactaacccaaacgaatgaacatgaacagtaagctgcaaactacatgtacatatatatgcattgcatacgggatataccgggcatatggaaaattaaatatagttgattgcattcagaaaattataatcaatatatttttatctgcttgtactgtcattaaacaacttatcaaaatcagaattgacaacttagaacttgcaagtttaatggaatagaaacacacattcaatatgcaaaagatgatcagcaaatagttgatcattccaatcaaaaccataaattgagtgcgtcctaattaaatagactgctaaatatatattgcgaattgaacacgcaaaccatgcaaattcaaaggaatacgtatatatgtatattgtagatgcagcaatagatctgtagcagacgcagtgacggatgtgcaagcaatttttttattttgtagcaaacttttttccccagaattcatttggttaaatttcgtttcaggttaaaattaatccaatctttatggagtaaaaatagtacctgctccagacgtcaaaccagagacttaacagggatgaacgatacctctggagcgagagcgatcactgattcactgcaacttttaacttctcctcgtgattgaggcaaattatcgctgatcgggaccacagtctgggatcaaggtcgacgatcgcgttcgccgtttcttctatcgcttctaaatttccaatctgatttctcacgatggaacttggagacaaattagatgggttctgtccttccatcgataactcggtagataggatttgcaagtagcccaccgagtttaagattgattggcccacaacgttaaagtattgcatgatctacggtgtagattaaaggaattatctaattgacgcttagatctttctggttaatatgagagctccaaaaaagtgcccgattagtataggtatagatatagatttttagttatcggactaatctcacgcagtattatattttatagataattaggttcattaatcgctggttaggataagcaatcaaggcatttaatggcccgaaagcagcccacgggagacgtcctccgttggatgagtcggacggtggagatcggccgaaagtcacaccatgactttagcatgtaaagtcagaggatccgcgtcctccccaaggggcggtgggcgactagtttgtaaaattttcaaacacaaaattagttttgtaaatattttaataaaaaaattaaaaataaaaaaaatcttcggaagagctagcttctgcagctacagcgtctaacgcagctaagctagcagcggctgagatatacattcttgattgacagctgaacaactaagttttccagtgccctgcagcccaactgccctaacagtgtagcagctacaaaaacatactaccgaacaggccctgctaaacacgtttgtttgcccatattgaactgactttctactgcacggtcatcgtttcgagaacctgaagtttaactatttgataggaaaagaaacatcaaaagcaatcaagagtagataacgctggtcgaattactagtgagttcccattgtcgataattaaacagagaaaaacacacgaatgcaacgctttggtccaggatggcagcttcaggcagcctcaccatccagtgtccaggataggatttcaaaaccagttctcccttaaggaaatgtgatattcttggcgactgagttcttctctcatgcgactgtgttcttctctcatgctactgactggcttattgcgttcatgtgctttgttcagcttcacatgcatctttggcctcctttaccaagtcctccagttgtttttgtgccataggaataagttgacgggcttcaaccatctcgctgtaggcattcatgaaagatctcttacggatcttcccttcatacttatgtgcatccttcactaacttcgacagctcatcttgtgtaaacatctgaaagaaaataggtatgcttcagcgattcagcccattacaaaaatgccatgatgaaaatgttacagtttaccgcttcctcagctgtagatctttctgtggggtaacatatgatcttaatacccgtagcaagtttcatcaaatcccagtctaaacatttaatgccagaccgtttctcaatgtattcaccagtccagcgcaagtgcttggagtttttcacatcacagtattcgcaatcaagcaagaagcatgccagcttaataatagagtcagtaacctgggtacaaaagagcattctttcatcactaataaaaaaaatgtaagtaaatattgcattctttgggaaaggacagttaaggattccaagtgcacattgaacaaactatcatataaatgtgtgatggggaggcattgacattaaggaagcaacttgtgaactcaccatctctggtttgacatccaaaccatagcggttaaggagcatgtacaatccttggctcattgggaggtagtcgtccttgctcaacttcattttttcttggggtactaaaacatgcatcagattcttcaggccccacatcacttccatcacaatttcatcaaacatgcagggcacactctgaaagaaatgacagcaaaattggtgctcaaggttgtccactaagaaaagcaaacaagggagctgaacactaaccaagcttctttcaatgatttctttatattcgggttttccaacggccattttctgcccagggtgatgccacttcatgatcatctcagcaaggtcgcaactgacaccagtatcatgattaatggcactggacttgtccttgatttctcgaaattccttcagccaaatgaactgatagataaacgaaagagaagaatgttaaggggcaaaaaataaataaatccagtaaataatcatgcaatgtctcccaatcatgacgcatgcaattcagtaggtacaccgcaatcagtggttcaaaaacagtggacgctaagcagctagttccaccaagcaaacctaggcatgattaggcacatgtaaattttactacatagagtatgtactatcatattacatagagcaaacctggcatattaaatcatagaaactggcatatcatacatccatgacatcaatgatgtaaaatcttcatctctaatttgccccacttctctgtgcagacccgaaacaacactaggcaggaaaacaactagatgcaatcctaggtgctatgaaagaggggcagctgggcccagttactagttagcccagttactaattttgaattttgaaaagcggtacttctcaagatgtgctgccaagaacagctggaatatttaatcacaatcgaaagatctagcctttttcaattccttaagttcttgcaatgtgattgagaataagttgttgtgctaaggtaatatacaacgcattttaaaaacaaacaaagtgatgttctttcggttaggctgtggtgttcattatcccggtaaccctggctttcggagcatgttagagctcaatcatccctatcccacagttagaaaataaaattggttgtatagcaaaggttttagcctgcaacaatccattctttaaactataacgaacaactttcaacagagcattatggaaaaaatgcattttcaatcagttgatcagcaaacaaaaaaatgaatactgagcttgtgcttgcatttcttctctcaatgcaaataaaaaggaaaatgtaaagtaaatgtggtggtcaatacccaattcaaactggcaaccaacaacgcaaaaaaaaaaggaataacaataagaagaaatgactaactttggataccctatagtccacgccaaagtttgcccagatttcctgtagttggtagagaaaacagaaaagttaggtcgatgacaaagagagaggcaatcaagcacataagtaaacagggaaggaataaaagcatgcacctgcagggcatttggttgaatgagtctgtccccactcataccgaacattgcgaagccagagggcgtctcaaacagaactaagactattagacaatggtacgtattgtgatctgcgaacacacaagccaagcaaacttaagcaacagcaagcacgaaggactgcaagaggcaacgagaggagatcaatcgcccattcagtcagcacgcgtgaagcaaagatgtggatcttaggctgaaaagccctcatctctgcgaaataaccgctacatctgccacgcggagtcaaactgccatgaacagggtgttcacagtatgcgagatcgacaacaaacgggttccgtgcatacaggaatcgcctccccagatctatctgctcttcccatgcgatgcatgtgctaccataagttaaggatccgctaggggtttgctttctcatcctcacacgccagttttccttccgacgtgggagggatcaagagagggttggtggctcacctacaccggcgattgaccccgccgtcgccgtacgagtagcactgcatcctcgcttactcgaggtcgaggtcgaggtcgaggtcgaggtcgatctctttcctgtcatggtgtgtgagattgggaccgaaggaagacgtctcaacgttggcttcctaataccggcaacagacgccgctgccggacgagaagcacctccgccgcacagattgcgagatgtgggggttggggggagggggggagtattttaccttttaggccttgttcttttaggctgggtttgggggggaatgggccaacatccccgtgtgccatcccggccgggtcgaattttcttccgtggcccatgtatgcgttcgcctgggccggggtgggagtaattctccacccaatccacaccaatcccacggggagagaaaaatcgcctcggagacgatttttttttccaagccagccgcagcgctcggcctcctcgactcctcgttgcgctagggtttggaggcggcgtgaggtccgggaggcggcgcgaggtccgggaggcggctctagggtggagatccaggagcagcatatctccagccgctgccgctctccatcccgccctcggacgccgacgatctccatccagcttcagccgccgccggtctccatcccgtcctcagccgccgccggtctccatcccgcttcagccgccgccggtctccatcccgcttcagccgtcgccgccgctctccttcccgctctccatcccagccagtcgccggcgctcgccatctctccttcctcgcttcggattcaccggttgcgggagagggcaaggtcgagggcaacagccccggacaccaagaagcaggtctgattcttgatctcctcttttcccactcagaaaagattttgtgacttatctagtggatgaatttgttgctagttgatgtattgagtggctgtatggattgaagtatcagtcatgttctgcttagaaggaggggtgatgtggtttgtagtagtagaacctgaaaccacagaaaattccatgcacatctctgtgtgtgtgtgtgcaaatcttgcctatcagttgctctgtaatcaaggaaatatatatttgaattggcagatcctatatttctgaacatgggctctcttctttcttttctttttttttgtgagggagaaacctggtttgttgattctccaggaattattgtagatgcagtgggagcacacctaaaaaataaaaactagtgcactctgttgttgctgtctagaatgcatcactttgcttttggccaaggtcatttgagcttcagattgaacgaccaatactatatgccaattgaatgagcaagaagatacaaaaatttgagcaagaagatacaaaaatttttaaagtcatgctatgaggtggtcaggtggacactgtagtatacattctagttttggtaattttttccatggctttttgtttagcaaaatgcccttgttaaaacttgagaaatgtagctgtccatcttttgttcgaatacctattttactcttagcaatcaatttagcatatttatctattctgaactgctactatgttcacaactagtttcaggaaactgggtgatcagatatattactagaggtcataccatacaaagctatataaattgctattgaatgacaaaaatataatctgttgtgctgaattaaatttcaggagaggcacaggcgtgtggggttggcaaaagtaaagctgaaggagttgatattactcaaggtatttgagaaaaaactaaatacagttgtacttacatttgcctgatatgaagcatttaatcttgcccctgcatatttactagagtaacagaagtaatttgaagttggagagagagagagattgtaggtacaatgttatgtgatcttgctcaggtggcagatggtctcagttttttttgctagtgaacaggaggttgttattttcaagtaaacatcctaccctagaaggatatcctcactttattaaagttgctatctctgaggtttaaacaaaactaagtacacaaagtattaaaatctgaacacattattgatccccctcctcccattgcagactgtttatttgctgaaagtattaaaagtatttatgcatgtagccaccttgaatgcctctaatttcatgtttaataatcttgtaatacatatgcatattattatgttctcacacatagtttaaagtatagtaattctatatctcttttagtgataaaatcagttcgagaatggcggatgaaattaaaaggaggagagaagaggacgatgatatgatgctttttatttttcctgcgatgtatatgctgtgcggtacgacaaatagtgagaaaatacctagacatatctcaagactatccggtaaagagcggcttcaagaaatccttgaaggacatgtaatggattgtaaagttgcattccgcatggagcctcatgttttcaagacaatagcgaattatcttagagaggaaaagttgttaaaggatagtagaggcttgaggattgaggagaaacttgggatatttatgttcatgctcgctcacaatgcaagctttcaagatctacagtatgaattcaagcatagtgggtctacacttcatcggcatattaagtctattttcaagataatcccagctctcacctatagatttctcaagcttcctcatgccaaccaaacgcattggaagattagaacaaatcctcgcttctttccttacttcaaggtgaatctggcactcaaaatagaaatgaatatctattccttctccaattaaataactcatgcatattctgtccttttcttccctttttgctgcagaattgcataggggctattgatggcactcacattcctataactatagatggagagaaggcagctccttataggaacagaaaagggactttgagccaaaatgtgatggttgcttgtgatttcgacctaaatttcacttttatctcatgtggttgggaggggtctgcaaccgatgctagggtccttagatcagcaatgaatagtggctttcaagtcccaaatggtaaattttttctagtagatggtggttatgccaacacaccacagttcattgctccttatcgtggtgttcggtaccatctaaaggagtttggacgtggtcatcgtcgacctagagactacaaggagttattcaatcatcgccatgccattctgagaaaccatgtagagagagctctaggggttctaaagaagcgatttcccatcctgaaagtaggcactttccatcggataaagaaccaagtgcggattccagcagctgctgcagtgttccacaacatgatccggttgcttaatggtgatgagggctggttggacaaccaacctgataatatagaacctactaattttgtcgatctaccagaaggtgacagtgaataccaaaatgatgtgccatctcttagcaatcaaatgatcagtgggaataatattagagatatgattgctaagaagatgtgggaagattatgttcgtaactagcaagaatagtatagataatattttggttttgcatgatttgtatttatttatgcaatcaacatttatgatatggacaaattaatagtaagcaacgtagtttgtattttctcattcaataaaatattgcaatatagttatgatgtttggaagactatctccgaaagcaagcctattgcagcagcaacaaaggcatccacaaaagaaggcatcaccaaagagctgtagcatacagaagaagaaggcttctccaaaaggtagtatctaacttgtttttttgtgaagtattttcctttcatattaatgattacaaattttacttactataatctaattttgtctaatagctcaacaatcaagagcttcatggaacccgggactagaaaaggctttagttgatttacttcatgagcacaataacccacattaccggtgccaaaacgggtggacaagtgaagcatggaacaaggtcgtcaaagaatttcgtgacagacatccctatgtcgccatgaataagcaacagatccaagataaggagaaggagttaaaacgagattataggttgcttaaggaggcaaggaaacagagtggagcttcttgggataatcaacggtgcatgattgttgccgatgatgctgtttgggcaaacataattacggtatgatattttgagcataattgttttgtcctcattcaaatcactattatttgtattcatgccataattatctgtttttgtatcttgtgcagtcaaatgagaaagtaaggaagttcagcaaaaacaaatcctttcctctctttgaatccttgggtgaactttatgatggtaaatttacttgatgccataattctttgattccttgtgcttacgttcagtgcagccaaccttgttatttgttttcttctctcgttgtttggcactgctaccttctttctttggcttcttcacatatcctgcacctgtactatgttccttttgtatgctgtagtcctcttaggaaacaacaggaacatagctgattagttatgcatagtgacatttctcatatccgcatattggaaatcaatgccaaattatttggttgctcatgatgtttactaagattgaggctttaaatggctgattctgtttgctagtgaacacattcttttttggtgcagtatgatcaatgttccattagttatgcatctcccttctcggatctagtattttccctaataggtatatactgaaacttttgtatgggtagtgaattgcaacctttttttttaggccaaactgctgagggcaacatgaatttcacttctattgagccattccaacatgctactctcacacaagtgaatgaatatcttgagagaagtgactcttttcctgatgtaaattgggttgctgatgatgatgagaccactgaagttcaagatgaagataatgcagtggagcatgaaaatcagggaagccacattactatcacctcaagagctaatggagaaaagaatgtcaagaagaccaaatctactgagagagagagagtagaaaagacaccgaagaggaataagaggaatgatgttgttgatatgatgggaagttacttggagatgagaaaaagacaatctgaggaggaggaagcaaagaagagggaggaggaagcaaagaagagggaggaggcaagcaaggttgatgattgctcaataaggaactgcatcactgttgtggaatcgatggaggagctctcaaatgaagaaaaggtcaaatcttttggagtattcaaggacgcgcagaatagggagatcttcatgagtgcagggcctatgactcgtcttatatggttaagaacgatgctggtaagtttgaattactattgttactagcataatcttaatttgtgcaattctgaaattcaattcttctacacttaaataggtacatttttttagccacgttgcactttgtttatgatgcgattgtgtaacaatgcagaccatgcaagaatgacctttggaccaaaaggatattgtctttccaggtacccgttcatacttttataattttgacatgattttcatgttatatttatgtcaggtttaggctgaagttagcataattttgacataattcttgttagtatgcctctgaacttttataattttgattcttgtcagcatgccccctctcttctgtcatgcagccatgctagtgtgtgtgcgcgcgcgccactactactagtacatatctacatcgatctacatctacctatatacattcatccacttacattccttgcctaccaccttactacttcctaaaatcaatctatctatctatttatctatcgatctatcatgcgtgcttgctgtaactgattaactggcagtgtgatcatctctctctactgctgctacatatatgcagtgctatgctgcaggtataatgtgctatgtctgcctaccacaaatctaagctaattgtgacatggtaataaagcaggtgctagagtgattctctgtgtgtatgtgtgtgtgtatgtgagtgtgtttgatgtgtaattgtatcattgcttgtgctcaacaaaaacttgagtacaagtaaccatcttctgcatatttatctaatttgattcaagttcattttacctgttgtttagtttacatattagcaatcaccattgtctagtgtctaagacttgtttctttttggttgtgtagtttacagggttccatggcccatttgctagttgtgcccattggaaggaatcttttgcaagatagttcatagagaccacttgaattgtgaaatgcgatggatgaaggacaatttttcctaactgcttcttaattcatgtagctgtgatggttgcaggaaccttttttttctacaggattaacacttgcttgatcagacatagatatattatttagtttgatcggatagagatatattacgttcaaagaacctattttgtagcttgctttgcacaatggcaattggatgtttactgcttgtagaatttaatctatccaaaattataatttttaatattctcgactatttttagaatccatctgtggtaaatccatgattttctatctttacgctttttagaattattttgcacgttgaatttctgttccattttcatgatcgttttttatcttgtcatttctgaattattttgactttcgtgaccttccagctttttaaattttatccgaattttccatgatagtttctcacgctgaatttgaatggtagtaatcccttctaatctcacctgtaatcccaccttctactccaaactgctagccaacagggaaatcccagctagcaaacaggggaatagaggccaggagattgggggaacaaggggattggggggaagggattgagtgtggggagcggggacaacccaaaccccacgtgggttggttttcctttggattatttcccacagctagcgaacaaggccttacgcgtgcggctgttgtgcttctggaaccgcctacaagccaatcgatcccactgtttgggcctgattcgagataaagggccgttttgcattgctacaggaacttattagccgtaccaatattttagtagtttagatagtacatgtgcttgtttggattgtgaccaatctatatctatatctatatctatactaactagcaaaatgctcgtgcttcgctacggttaaaatgaacgtttaaatgttataaatatttcaagaacggatataaaacactgtcgcattttgatatactcatatagtcataacgtgctctctatcaactctcacatggcaagcgcatgatatcatttacaaaattgagatggtgctcggactctaatatgtcatgtcacagaaagaaaataattacttacttaaaattattgatttttgaattatctgttgtttttcgtatattgtccgcattatgcaccacacacaatatacgtggatccacatagttgccgcgtgttgcaataggtaaacactaaattaaattaaagtgttgcaacaggtaaaaattaaattaacaaacacaaacttttctcagcatttttcatgtgatcgaatattatccgtatggttaatataataaagttaatgttaggaagagcagccagccaaccacgacacgccactcctcgcccttgcctcacgtggctcctataggaacgaagctcgggtcacggcggtatcgacgaagaatctcggggcggtggggaggtttgaggttagtcatggactgtgttttgtgggtccaaagctcggggcgatgtgtcaagtcttttggaatttttttacaattattattttttttatctcaaataaatattgaagtagaagtttcgattttttttgatgtgaagaataaaagatcttaataaaataatttattttttagctgaattaaatccatggattagcacaatctagaacacagtggcacctgtccacagctaaggttttgttcagcagcctggttaggaacccatgtctacagcacgggaaaacggaacagtacattagctcgtgattaattaagtataagctattttttttttcataaaatggatcaatataattttttaagcaactttggtatataaactttttataaaaaaaggaccgttcaggagtttgaaaagcgggcgcgcagaaatcaggagcgatgagttgggaaaactggggaagaacacagccaagtgcagccagaagctcctattttttcataaaaaataaaaataaaagaagattatttcttgtacagtactactgactactgagtagataaaattgtgtggtatggtaaattggtaatccttatcctctcactctctcactgtttcgttctctctctcccattctgtctctccctgtccctctctctttactctccaagcgttgctcctcagtgctcaactgctcacgctcttgttcaaccgggagaagatgccgttcaacgcatcggcagcggcgacggctcctccggccaagcacctggtcggcgttcggctcaacgcgatggcgtcaaggttgaggagctgatccgccgtcgacggcgacgggtgctcactctgtcgttctctctctcccatccggcgcgacgccaagggcggctactgggcggcactcaactgggagaagatgcagttcaacgcgccggcggcggcgacggctcctccgaccaagctcctggtcggcgttcggctcaacggcgatggcgtcaaggttgaggagctgatccgccgtcgacagcgacgggagcagtcgatccggcgacctcttcccctccttcacggatcccatggtctctccgctccctcttgcgcggatccgtcgtcggctgcgatgggaggggttagatccggcgacctcttcctctcccgctcggatcccgtcgtctctcagcgccccgctcacgctgatccgtggccggcgacgacgggagggtccagatccggtggtgtccactgtggtcgcggcttccctgccaccgccgcttctgcacgcgcggcccatacaccgcaccctgccgtctccttcttccccgtgttagtatgcctttcatatgtttttaatgtatttgtgctgttcttataatgtagttttgcacttatgatagcatgttacttgtgcttgcaaggttgggtgggttgtcactgtggttggagctggttgttgagctgattggagtcagagatggtggccaagatggagaggagatgtcacccgaagttgtctcggaagccgcaatgaaggttcaaatctaatatgagttttgggctatcttgggttcctttataaaaaagaaaagtgatataaaaaatattgttgagattataaaaaattgaatgattgccattatggttccattttctttttgtcaccctcttttcgatctgttaacataaacttagggtaagaattaactaaatttgttcatttttaggtatcaactgaatatagtctcatttggcagtttgaagaattttgaagcagtttcaatagcaccatccatgactgattgactgatcccatgacttataacctgcaaaatggcaggattagtagagacttgggtgcacaaattagctctttgttcccttactgcctgctagttagtgatgatgtaggaaaagaatactttggtacttgtgttatgaagtagcaacttaatcaggaaaaaataacatttgaatggtcctaatctatatacacaaattgcacttttatatacacggtccgttttgtcattactgaaaggtttataaaacaccccagtgataatgctggcagccttgatatgtcctcatggacggaaaatgaaaaaaattgcagtagtttagaacccaaacctaaaatatcaattaggtgcggtcttgtagcttagccattgccctgtgatatggacatatgttaccatgaaaggaatgaagcagttcttagataaattatattgagtgttagcttcaagcatacatggcagatgcattcctatcttaaatacattagaattggcctagattatttatcttcagaattaatctcatcctatcattatgacgatcttggtcgagtggctgactcattgctggatgatggttttcttgcaggcggagatggaggcggcaaggtggggctgctggcgttggatgttgcactcgcgttcccgcaggccacgacgtcccagttcccgcccgccggtgagacctcctctcttgctttcccggtgttctcaggttctcggtttcccattattttaaataatgagatattatgattgggtgaaactgtcttggccatctaattggagtatttgagagaggtgtgtgcactgtgcagtcggcctttgttgattcgtagttatcttcagtcttgggcagcttaatctggctccaagttggcagcaagcagtccctgttctgaaaactgctctcttacttaagtttgctgaagggatactccttacatcgaagttcattagctacacttctttggttagaaattgctctgttgctgttcaatatgtaccagcaaaataaatatgagaaatcactctagtgcttctaatagggagtcatctttcagcttctattaaacacggaacatttaagaattaccttccatcgtcgtataaatgtagtaaacgcagatgtgtcatgcccaacagggaattgagtagcgtcaagcgggagattgagtatccacaccaattattaggtgtatatatgagtcttgtttgtattttcagtttttttatataggttgagaagatgtttgcatcctacttagccatgtaattcttattcttggattctgtatgtaattcctgggttgtaattattgagccatgtaattgtatatgactctatttgggattcaatcttggtgggaaaaaaccgggcccgcgtaaaaaactaatcgcgacccaccaagaaaaaatcgaacgaaaaaaagggcaaaaaaaaccaatcggacagaaattgggaaaaaaaccgtgtgcggaaaaaaaccgggcaaaagaaaaaaccaatcggacggaaaaaatccgggccaaaaaaaccgcagccttacttattttttaagtaggtatactagcaaaaatgcctgtgcgttgcaacgggtgaaaaatttctaatgataatacacactttccatgtataatgtataatggttgtatctatcgttgttgctaagacatatcataaagaaaacctcgacgtataatgtataatggttgtatctatcgttgttgctaagacatatcataaagaaaacctcgacgatggcaatctcccaatgatctttcaatctcattcttgcaactaataataggatcaatcaaattctacactatctcatgtggtcaagtctagataaaatagagtcatcatgactcttctcttaataataattaaaaatttatttatttttttatatgatacgcaatcaagaatattagctatacttatcaaagtagtctgataattatataaagtagtctgataattatatacagaatcatgcagagtcttcaataaggggcaacataagctatgtaggagatggaaaacattaagtatcctattcgactcaagccttaagaacattcacagaacgctttagaaaaaccaaaccaatgtggtagacgatggatgatacgaacctttctcgtggaatatgaaattttttctaaaattggacaatttttttgcattgcacggtgcgaaccagattttttttataaacgcagatattttctcacgttgggtcggataaacaccggcaattttttataataaacggatgctagctcccggaagcagtatttttttataataaacggagttttttctcgggaagagtcggacaatttttttcggtttgaattttctcgcgtggattcagacagtttgttccgattcgcttttttataaacaacattttttttggacggttttatttcggagtggttttttatttcgcattgagtcgaacgtttttcaaaccgttttttttataaaaagatgttttatgtttttctcggttttttatttttttactggagtcggactttttttttacgtaggtgactttgttttccctttattacgggagtcggtcgtgagaagttttatttctctttctttattaagggagtcagatttctttatttctctttctttattaagggagtcagatttcttttacggacggaatttttttccctttttatcagagtcgggcgtgggaagtttttttttgagtcggacgttttttttttgacggacgagactttttttttttatcgatctagtacgacagtagttgtttttctcgtttttgattttgagtcggacttaaagattctggcatgcgtgcatgcgccgtggaagaaggagcaatgggattaattccgcatgctatttaattaggggtgtattagtagtatctttatggatgacttataagagcagctacaatagcaggctataagtcagctacaaacatattttaaagagataaatcagaagagagaagagcagcgggctacagatttgtagccagctgtagcacggactccaagacgcagtgtgtctatgacaggtgggactagatattaatagtgtagtatgtaactattgtatgaatgagctattagattggctatagatgaattagagctagtagttggctatactattgaacttgctctcaagtacctggtttcttttaaggaaaaaaaaatgatcgcccgtgaaagcgtggactgctgaggcgagagagcggcgcccgtctcgatccttccgcccgcccttatctcttcctttttccaagcgccatttttcctcttcctctctactctcggtcttctctcctcgctcgcttgtatctcctctccaccgctgcgccatctccacagccgacgacgccctccctctccaccgctccccctccccctccccc

SEQ ID NO: 7629 - DNA, 16773 bp, Oryza sativa
gaacttttccattgcggtgaaaaacatcgcacccacgtgtgccaatataggccaatattggtattaattgacaaaagttcgtcacgcgagtcacggagtgattttttgacacgaactcacccaacatacttcaataagtccaaaaatcatgttttggtgctttctgaagtttttcattccggtgaaaaacatcgcacctacgtgtgccaatataggccaatattggcattaattgacaaaacttcgccgcggaatcacgaagttattttttgccacgaacgcacccaatacactccaatatgcaaaaatcatgttttgatgctttttgaagttttttatttcggtaaaaaacatcgcacccacgtgtgccaatataggccaactttggcattaattaagaaaagctccccgcgcgagtcacggagtgattttttccacacggacgcacccaatacactccaatatatccaaaaatcattttttcatgcttgtgaactctttcattcgggtaaaaaacatcgcacccacgtgggccaatattggccaacattggcatcaatggataaaagctcgccgcgtgagacacggggtgaattttcgacatggatgcacccaatacactccaataagtcctagaatcatgttttggtgctttttgatgttttttattccggtgaaaaacatcgcacccacgtgtgccaatataggccaatattggcattaattgacaaaaattcaccgcgaaagtcacagagtgatttttcaacacggatgcatacaatactctatagtatgtccaaaaaccatgttttggtgccttctgaagtttttcattccggtgaaaaacatcgcacccacgtgtgccaatatgggccaatattggcattaattgacaaaagttcgctgcgtgattcacggagtgattttttgacacggactcacccaatactctacagaatgtccaaaaaacatgttttggtgctttcttaactttttcattccggtgaaagacatcgcacccacgtgtgccaatacaggacaatattggcattaattgacaaaattccccacgcaagtcacgaagtaatttttcgacatggtctctcccaagatactataatatgtccaaaaatcatgttttggtgctttttgaagtttttcattccggtgaaaaacatcgcacccacgtgtgccaatatgggccaatattagcattaattgacaaaagttcaccgtgcgagtcacggagtgatttttgaatacggacgctcccaatactctacagtatgttcaaaaaccatgttttggtgcattctgagctttttggttccggtgaaaaacatcgcacccacgtgtgacaatataggccaatattcgcattaatttacaaaagttcatcgcgcgagttacggagtgatttttcaacacagacgcaccatatccactccaatatatccaaaaatcatgttttggtgctttttgaactttttcattccggtgaaaaacatatccactccaatataggccaactttggcattgattgacaaaagctcgccgcgcgagtcacggagtgaattttccatatggacgcacccaatacactccaatatatcaaaaaatcatgttttggtgcttttgaactctttcattctggtgaaaaacattgcacccacgtgggccaatattggccaactttggcatcaatggacaaaagctcgccgcgcgagacacggggtgatttttcgacacagatgcacccaacacactccaataggtcctaaaatcatgttttggtgctttttgatgttttttattctcgtgaaaaacatcgcacccacgtatgccaatataggccaatatttgcattaattgacaaaaattcaccgcgaaagtcacggagtgattttttgacacggacggatccaatactctacagtatgtccaaaaccatgtttcggtgctttctgaagcttttcattccggtgaaaaacatcgcacccacgtgtgccaatatgggccaatattggcattaattgataaaagttcgctgcgccagtcacggagtgatttttcgacacagactcacccaacagactccaatatgtccaaaaatcatgttttggtgatttttgaggtttttcattccggtgaaaaacatcgcacctacgtgcgccaacataggccaatattggaattaattgacaaaagtttgctacgcaagtcacggagttattttttgacacggacgcacccaatacactccagtatgtccaaaaatcatgttttggtgctttttgaaatttttcattccggtgaaaaacatcgcacccacgtgggccaatataagccaactttggcattaattgacaaaagctggctgcgcgagtcacggagtgatttttcgacacggacgcacccaatacacttctatatgtccaaaaatcatgtttcggtgctttttggactctttcattctagtgaaaaacatcacacccacgtgtggcaatatatgccaactttggcattaaatgacaaaagctggctgcgcgagttacggagtgttttttcgacacggactcatccaattctctacagtatgtccaaaaacatgtttcggtgctttctaaactttttcattccggtgaaatacatcgcacccacgtgtgctaatataggccaatattggcattaattgacaaaagttcgatgcgcgagtcacggagtgatttttcgacacggatgcaccgaatacactccagtttgtccaaaaatcatttttttgggtgctttttcaactttttcattccggtgaaaaatatcgcacccacttgtgccaatataggccaatattggcattaaatgacaaaagttcaccgcgcgaggcacggagtgatttttcgacacggacgcacccaatacactccaatatgttcaaaaattatgttttggtgcattttgaactttttcattcaagtgaaaaacatcgcacccacgtgtgccaatataggccaatattggcattaattgacaaaagttcaccgcgcgagtcacggtgtgagttttcgacacggattcacccaacatactccaatatgtccaaaaatcaagttttggtgatttttgaactttttcatttcggtgaaaaacatcgcacccacgtgtgccaatatttgcattaattgagaaaaataagccgcgcgaatcacggagtgatttttcgacacagactcacccaacatactccaatatgtccaaaaatcatgttttggtgatttttgaagtttttctcgcacacacgtgtaccaatataggccaatattgtcaccgcgcgagttacgtagtaatttttcgacatggacgcacccaataatctacagtatgtccaaaaaccatgttttggtgctttccgaacttttcattccggtgaaataaatcgcacccacgtgtgctaatataggccaatattggcattaattgacaaaagttcgctgcacgagtatcagagtgatttttcgacacggacgcacccaatacactccattatgtccaaaaatcattttttggtgctttttgaactttttcattctagtgaaaaacatcgcacccacgtgtgccaatatagactaatattggaattaattgacaaaactttgccgcgtgagtcacggagtgatttttcgacacggactcatccaatacactccaatatgttcaaaaattatgttttggtgctttttgaactttttcattcctatgaaaaacaacgcacccatgtgtggcaatacatgccaatattggcattaattgataaatgttcgccacgcgagtcacgcagtgacttttcgagatggacgcacccaatactctacagtatgtcgaaaaatcatgttttgatgctttttaatctttttcattctggtgaaaaacatcgcacccacgtgtgccaatataggcctggcattaattgacaaaagttcaccgcatgagtcacagagtgatttttcgacacagacgtatccaatatactccaatgtgtccaaaaatcatgttttggtggtttttgaactttttcattccggtgagaaaaattgcacccacgtgtggtaatataagccaatattggcactaattgtcaaaagttcgccgcgcgtgtcacaaactgatttttcgacacagacgcacccaatacactccaatatatctaaaaattatgttttgttgctttttggtctttttcattccggtgaataacattaaaacattatatttgtaatattttttaaagaaaagacacttactgatctctatttcatgaaccatgcagacgactgaccacacttcacctacacttttatgcaaactccgactactcactgactcactctatccttactagactcactggaccactcgacctcacaaaaggaaagagcagatgagaaaatcatagggctcttagtgtttccacttggcttatcctacgatcaaggccggctctaataccaacttgtcacgcccagaaattcgttaacccgaattttaagtagaatgtgtattaaatctccgtccaggaccagccagagtacacaaacaacaatttgatagacagatccacgtcttacaaaaataacaaaataaaactaacatacgcagcggaaaaacaaataaactagacttaatcttcacgaccaacgtgaagcttcctccatgttggcggctgttaaacaccgattctataccaccaacatctgcataaagttcagacaataaaacatccaacatagtgataggtgcttaatgtcacatattccacaagtgttggtgtatatttgtatgcaggtgtcaaaccccgaagttggagggaaatctagactaaagtgaggggaaaatttatctatacaaggatgggttgtgaacttcatcaaaatatcaaagacttagcccaaaactccgagaaatggataaaggaggacaaggggaggagatgggccgaaggccaggccaggtgggcccagcacaggtttgcccgaaccccttggttcggccgaaccaaaatctcagccattcaggctggggtttggcgtggacagtcctgatcatctcctgatgatggttgcggggcatttccgacaattcgcattgtgtaaccatcatacctacctctatataaggagcttcactccttcactctcacacacacttccaagcttgagctgaattataagaggctctattgtactatattgtatactagaataggaagagagtagagtagaagaagtcggaagaattctggagttgtcactaatcttctctcatttcttgtattctgttcattactctgatttcaatataatattcttcttgagtaacttagatttatcttataagaattaacctaaatagcatacgggattattgttcactataatcaactgaaatatagtgattgctttggtgagttataaacactgaagtagatattaattgcttagacgtggtgtttaggtaattgttatccagtaattgctgcgtatcccattgtacgtttgaggtaggtgtagaggtggtgacagccctcgagatcacttaagtcctccctgttcgggtacgtaatagagcgacatctgggaacagtgagttaccagtgcctgaagtattgctttaggattaaacttaagctttccctagacactgtttcttaccagtgaatcctctctatcctagcctatcctttgcttggtgtccttggatgaaccggaagaagaactgaccacacatgttcccttggatttgataccctttggaatactccgtaggggaagtgctacatcggtatatccgtgtgcttgcggattttatctgtgatcgtaagaattaccaacactccataaaacacaggcaatcctcgacgcccagaacaagctcggtcctcaaagaactcaccacccgaaccaatctctgcttcgaagggggtggggaggaaataaagcaagactgagtaccaaccaccataaaaatagcattggatatttgcggtaaaagcagcatttataaatcatattttgaaatagtaaaaacaatatataattaagcagtattaaatcatcactatctaacgctaaatccacggtgcaacacgcccaaccaaaaccacctaaacaactccagttctataagtcaaattattattgtgggactaatcacaatgagctggttgaccgcccaataactgcgggcatggctattccaatagttggggggcatgtgttaacgaccaaatttggtaatgccatgagccggattcaaagctagagtcaaagccgatttggcgagattccatttgagaaggtagaatacgcattggctaagaacagcatcagctgccacatgatcggctacaggcaatattggctgcgcatattggctagcgccaaatccgcggaatcaagccgatgcaaccagtctcgaaaatgatggtcccacgttggtcatcagggttagccaaagcacttcatagccattgccacacaaggattggagtcctaaaaaggggcaattgtatctattaattaggatattttttcagtttccttagagatatgtttggtaagagcccacctaggggactcattcgtattttaaattatattagagacaagaggcgtgtccggcaaggacacattatgtacttcgggtattaatatgacctgacaccatgtaatcaagggacgacagttcaataatactttggtgcatcaccacccttttctatttttattgtttcgacgagtttttgctttcaagttgggctacatcaggttcgatcttcgacgaaaaggtaaagcttgttatgacagtttgcgttgttgggattagtgcttacatcgctatgacactctaatcctgtctacgtgaatcgctgaattatcatatataccgcataatctagattgatctcgtcatctaaccccatcggccagcctctatcatcgaaaacggccgataggtttagatgtcgatgtcagcctagattatgcggtgtatctaccatcttgaatgagttttcatctatttgcttagatcttatgtttcttttcacgcttaacacggcatcggttaggttcgacctgttaagtattgtcttgaaatgtgttatctagctctttctttgaatgctaatatagatagcatcagggtttcagccgatcttacctgatttagccgtcttgttcccctacttggttctggatcgtctaaatctgccctttatatcaagatctcatccgtttaaagtatattaagcttcctatcagtctgctagtttccctgcttggtagattgatctcggttttgtatatttcacctgtgctaatatctaggtataaggtggtatcggactactagctgatacatgttaggtttgccctatcggctatgctgcgagcatacataatccctactgtggggcacatttagatactgagtgatttatactgtctcggcataatgtccgatctatcccaatcactcgatctaagcacgttccattggatggattacgtatcatctacagccgatcgagtaggcctaataatctctaagttttatctacctttgctgatctgatgcaagttatatcagcttgcctttgctgatctatcgttgatggatttaactctttgtcttttttctatcttgttggttgcaggatcaaaccagctggcacgctcagaacccaaaggcaatctctttggacctgcactagagttaagcagatctcttaggccagtgcgtgttttttgcgtcaacagaggtgtacaactttacccacaagacacgattccacacatgttaccatgccctgaagtaccgccacgatactacaaaggtggaaatcgtgacaaaacccgccgtacaaccctccctaaccaaacatacccacctcaggtttcaccccctccttgtgccaagttgggcagtcccttctcgcgcctaggtaaatccagctacagcagagaccaatatcaaggtccgaactgcaccatcgcctctacctttgccatggtatgtcagctaggttaagttatactgtagatttagcctggagtcaacatatggtaacggtcggaaaacgtcaagtgcgattttcactcggagtcgacatatggcaaatccgaaacattaccaaatatttcagaattggggggcatatgttaacaaccaaatttggtaatatcagtgttgggaaataagattagatcaaagcggaatccaagacgaagatcgttacggaaacagagcaagaatcggctatgatccaaattggctacagacaggattggcagagttcgagtcgaacagggttagccgatacagccgattctaacaatatggctcggtatacgtcatcaggttgaattaatgtgcttcatatggattgccacacgtggattgagtcctaagaaggcaattgtatctattaattaggatattttatgtaatttccttagagataagtgtgggcaaaagtctgccgcaaagacttatggtatcttagagtttgttagagatgagagtcgtgtccgacaaggacatattttgtaatctcgggtataaatagaccccgagccctatgtaatcaattaacacacgttcaaatacaatctcggcgcatcgccaccttttactttcgttttgtttcgacgagttcttgctttcgagttgagctgcatcggtttcgatcttcaactagaggtacgacttgttatggcggcttgcgttcttgggattagtgcttgcatcattatgacactctaatcctgtgcatgtaagttgtcgagttatcatatattctatataatctccggcaacattgttacctaacctctaataggctaacatctgttactgggaggcagccgatcaggttaattaccgatgttgatctagattatatagaatatccaccactctacgaaacttccaatggcttgattgtctagatattgtgtttcttttcatacttatggctgcatcagttaggtttgacctcataagtcgtgcttagaactataatctctagcctgcttcttggttgtcgattagagtagtatcggggttttagccgatcttacctgatttagccttatatttcatgtgcttaattgatatgctaaatctgccctttatattgagatcttattgctttttttagatatgttaagctttttgtttgatatattttactcgctttaatatcttaatatagagtggtatcggtgtattagccgatacgcgctagatctatctaatcggttatgctgtgaacatctataatctcattgttaatatatatttcgatctaagtgatttatactgtctcggcatggcgaccgatctatcccaatcacttgatttaagtatatatcgacataaaaattatgcattgttaacgtctatacccgatcgagtagatttagttttaattacttatttataactgccgatcgattcacatatgacatcggctcgaagataaatgatatgtcatcggcggctggctaatcggctatcattatggatttaactactgtttctttgtctttatttcttgttcagccgaactggcccctagtattattgttccaatcacattggataaattgacgactgagcaaagggatgagctcgagcagatgatgagcaatgtaaaggatcagttcatgaattctttccaagaaacccgcagaggaaccatcgtccagaagtacaagctgaaggtagttgcagccgatgaagctggttcgggttcatctcaaggtgacaaaggtgatgttcctcaagatggcactgttgaagattttggtgcagatggcaaccaagagccgttgcagtttaacaattttcaggataggatcgactatgccgtgcaacatgccttgattaaccaatctggagtgttagttaataccttaaccaacatggtgaagactgttgtcgatggttcgatagccgagcactagcctcaggaccagtttatctaccaggaggtatttttccaaattatagacctttggtcacagctaatcagctgaacgcctccaatgcactgccagctcagcccacggctccagtctcaactactgtacaagctacatcatcaccaccaagacagatggttaaccccagattgttgaccagagaacagccacaacatcctgggcaaaatgtcaatcggctgactcaggagcaagttgctgcgatgtttttgccaaatccgacaatagccgatccaacacagccccaaccgactcagcaagtacaaccgaggcagtagacagttcagccgactcagcaacagaacgtgcagcatccgtcgacaaggttgagaacacctgacaatcggctagtgcaacatacggtgcaccaagtaattcctaaacacttggttcatcacgcacaggccgatcaatcagttatgcctcagattatccctgaacatttggtgcataatatccagccgaatatctagaattatcaaggaggaaatctaggttatcaatatcagcctccgtcacctcatgttcagtatcagcagacaggatcgcctcagcctcagcacgctcctcaatttaatcagtttgagccgatgcagcaacaaatgcaaggagtaccttagcaaacgtcatgggctgatatgctcgcagatgtaatgagggaaccatttgtatcggcatccttatcctgagtggtttgagaggtttccattgcctagccgatacaaagtacccgacttctcaaaattctcagggcaggatgatgtttcaacttatgaacatgttagccgattcttggctcagtatggtgaggcatcggctgctgacgccttgagagttaggttgtttcctttgtcttcgtcaggatcagcatttacatggttttcttccttgccatataattctgttaatagttgagctgatttggagaagcaatttcatagctatttttatagtggaattcatgagatgaaaatgtttgatttaacagcaattagacaaaggcatgatgagtccgtacaagattacattcaaagattcagggagatgtgaaactgatgctatagtttatctttgacagattctcagctagccgatttagcttttcaggggttgatagcaccgatcaaagaaaagttttcggctcaagattttgagagtttatcacatctcacacaaaaggtgactcttcatgagcagaggtttgctaaggccaagaagaacttcaaaaagattaatcatgtatatccttacatgtatggttctgatgatgaagacgatgattccgaggtggcggcagccgaatgggtcaagagcaagaaagtaataccatgccaatgggtgaaaagttctggaaaagaggaaaaatttgacttcgacatcaccaaggatgacaagattttcgacctattgcttcgagaaaaacaaattcagcttccggctggtcatgtgatcccatcagccgaagagctgggcaaaagaaggtattgcaagtggcataattctagttcctattcaactaataattgcaaggtttttaggcagcaaatccaggcagccattgaagggggaaagatcaaatttgatgattcaaagaagcagatgaaggttgatggtaatcctttccctattaataaggtgcatacatctagaaggacagccgatggggggatgaatagaaattttcacatgaattcgactaggattatcaacaaataccaaagaaagtatgataaacagcatgagaaatatcatgaaaaagatgatggttttgaccctcattgggattgtgagtttttcagattttgctggaatgaaggtatgaggttgccatcgattgagaattgccctggatgcagtgaagatacagggagttcaagccgatcctataatagaggtaatcggccaaatcagaagagagtacctgttcatcaaaggctgggcctggtaaatcaagatcattatcaagataaagatgaaaataggaatacacagtggtgtacctacaggcattttcaccaagaatcaaaagagaagggttcaaaggttgaggaacagggagcaatttcagagggtgcatcaagagattaatcatcggctgaggaaaacaaagactaagcaagaatggcgtgttaaaagtacagttgtatcagccgatgaggtcgaagccgaaaaggcaaaaagggtgctcaaaggcaaggctcttgcatcggcatcagtaaatatggtttttatgctaccggccgaatttgaagctaggcaagccgatgttgatgatgttgaggaagcttcagctaagttagttttgtcaccagagcaggcggtctttgagaagccagaggggatagaaaattggcatctcaagccattgtatatcaatgggtttgtcaatgggaagccaatttctaaaatgatggtcgatggaggagctgctgtgaatttgatgccatatgccacactcaggaagttgggcagaaatccagatgatctcatcaagactaatatgattctcaaggattttggtggcaatccatcggaaaccaaaggagttttaaatgtggagctgacagtcggcagtaaaactgttcctacaacattttttgtcatcgatgggaagggtttctataacctgttgctcggaaaggattagattcatgctaattgttgtattccttcaaccatgcattagtgtttgattgaatggcaaggtgacaaaattaaaattgtaccagctgacaggtcagttaatgttgctaatgccgatttagctctttgggatatggacggtattgattgcttgtctggataagtttgggatggagattttctaaaagtgtccgattctgatatacagccgattgaagatgcagagcccaaattgttattttgagggcgtcgtggagggttcaaatgtctacaccaaggatgcagtagatgatctcgatgacaaacaagggcaaggttttatgtcggctgatgatttggaggaaattgacataggtccaggagatcgaccaaggccaacatttatcagtaagaatttatcttccggatttagaaccaagttaatagaacttttgaaagaatacagagatttctttgcttgggaatatcatgagatgccaagactcagccgatcgattgttgaacatcggctacctataaagctcggggttaggccatatcagcagccaccaaggagatgtaaagccgatatgcttgtggctgttaaggctgaagttgcacgcttgtatgatgctgggtttattcgtccatgtcgatatgctgagtggatttctaatatagttccagtcatcaagaaaaacgacaaagttagggtgtgcattgatttccgggatttaaataaagctaccccaaaggatgagtacccgatgccagtagccgatcagttggttgatgccgcttcaggacacaagattttgagttttatggatggcaatgcaggttacaatcggatcttcattaccgaagaagacattcataagacagccttccgatgtcctggtgcaatcggcttgtttgagtgggttgtgatgactttcggcttgaagagtgctggagctacgtatcagcgagctatgaattacatattccatgatctgatcggctggttagttgaggtttatattgatgacgtggttgtcaagtcacgggaagtagagaaccacatagccgatttgaggaaggtttttgagaggactagaaagtatggcttaaaaatgaacccgacaaagtgtgcctttggcatatcggctggtcagtttttgggatttcttgttcatgagagggggattgtggtgactcaaatgagtattaatgcgatcaagaatattcagcctctggaagataagacaaagttgcaggagctgatcggcaaaaataaattttgttagaaggtttatttctaacctatcagggagattagagccttttacgcctttgttgagattaaaagtcgatcagaagttcacttggggtgtagaacaacagaaagctttggatagtatcaaggaatatcttagttctccaccagttcttattcctccacaaaagggggtgcctttcagattatatctattggctggtgataagtagattggttcagttttgattcaggagtttgaagggaaagagagagttgttttttatttaagtcgacggctcttggatgcagaaacgaggtattctcctgtggaaaagttgtgcttgtgtttatatttctcttgtaccaagttaaggcactatctattgtcaaatgaatgcattgtgatatgtaaggccgatgtggtgaaatacatgctatcggctctgattttcaaaggaagggttggcaagtggatatttgctttgacagaatttgatcttcgatatgagtcaccaaaggcgattaagggacaagctatagccgattttattgtggatcatcgagatgactcaatcgactcggtagaaattgtgccatggactttattctttgatggattggtatgcactcatggttgtggtattggcttggtcataatttctcctcgaggggcaagttttgagtttgcctgcactattaaaccttatgcgactaacaatcaggctgagtatgaagctgttctcaaaggattgcaattgcttaaggaagttgaagccgacgctatcgaaatcatgggtgattccttattggtaatcagtcaattggcaggagaatatgaatccaagaatgatacattgatggtttacaatgagaagtgccgagaattaatgagtggatttcggctggtaactttgaaacatgtgtcaagagagcaaaacattgaagctaatgatttggctcaaggggcatcgggatataagccgatgttgagagatgttgagatagaggttgctacgattacagccgatgattggagatatgatgtatttcagtatttgcgaaatccgtctcaattggcttcaagaaaattacgaaataaagctttgaaatacaccctgttggatgatgagttgtattaccggatgattgatggggtgttactcaagtgtttgagtgccgatcaagccaaggctgcaatcggcgaagtacatgaaggaatctgtggaactcatcaatcagctcacaagatgaagtggttacttcggcgtgtggggtatttttggccaacaatgttggaagattatttcagatattataaaaggtgtcaagattgtcaaaagtttagggcaattcagagggcaccagcatcagctatgaatcctattattaagccatggccatttagaggatggggtatggatatgatcggccaaatcaatccaccttcaagcaaggggcataagttcatactcgttgcgaccgattatttcaccaagtgggtagaggctattccattgaagaaagttgattcaggggatgctattcagtttgttaaggaacatatcatctaccgatttggcattcctcagacgattacaactgatcaaggttcgatatttgtgtctgatgagtttgttcggtttgccgatagcatgggtatcaagttttcttctccatattatgcacaagccaatgggcaagccgaagcatctaacaaaagtttgatcaagttgattaaaagaaagatttctgattatcctcggcaatggcatactcgattggctgaagcattatggtcttatcggatggcttgtcatggatcgattcaagtttctccctataagcttgtttatgggcatgaagctgttttaccatgggaagtgagaatcggctcaagaagaacagatttacaggatggattgacagtcgatgagtattacaatctcatggtcgatgaacgggaggacctggttcaatcaagattgcgggctcttgaaaaagttacttaggataaagagagggttgctcgacattataacaagaaggtggtgcctaaatatttttcagaaggagagcttgtttggaagttgatcttgccgataggaacttgtgataataaattcggcaagtggtcgccaaattgggaaggactgtttcaaatccacaatgttgtgtccaagggagcttatatgttgcaaagacttgatggggaagtttatggacgggcccttaatggcaaatacttgaagaaatattacccaagtgtatgggttaattcatgatcggctgaatttgccgatgcatgtagagccgatgtgtttgcatcgccttgagatggccgatatagtaatatcgcccttagctgttttatcttcataatcggctgtgttttgccggtgtatgatggccgatatggttatatcgcccacagactaatttataattttatcaatgtcttcgtcattacaaaattagggggggcatatatatatacaaagttggatatttttgaaatttttgaggcaaattcagaagttatgttaatcggcataaaggattatcaaagcagttacttagttggtgaagtaccaaaatatcttagccaattacaagaattttctaagccctattacatggatagtcattgagacaaatattactgaatagccgatatagccctttgcctaatttgctttacttcttctatggcttgggcgtcttgagcatcggttccagggatgactttgagggacttagtcatatcggcaatattcctgatagccgatttcagcctcaacttctgctcttcaatagcctttggtaggtta

SEQ ID NO: 7630 - DNA, 37206 bp, Oryza sativa
  unsure (1)..(37206): unsure at all n locations
caattaatgccaatattggcatatattggcacacgtgggtgcgattttttacaccgcaatgaaaaagttcaaaaagcaccaaaacatgatttttggacatattggagtttactgggtgcgtttgtggtaaaaaatcacttcgtgattcgcgcggcgaacttttgtcaattaatgccaatattggcacaggtgggtgcgatgtttttcaccggaatgaaaaagttcaaaaaccaccaaaacatgatttttggacatatttgagtgttttgggtgcattcgtgggaaaaaattacttcgtgattcgcgcgacgaactttcatcaatttctgccaatattggcacacgtgggtgcgatgttttagaccggaatgaaaaagttcaaaaagaaccaaaacatgatttttggacatattggagtgtattaggtgcgttcgtgacaaaaaatcagttcgttattcgcacggcgaaattttgtcaattactgccaatattggcacaggtgggtgcgatatttttcaccggaattaaaaagttctaaaagtactaaaacatgatttttggacatattggagtgtgttgggtgcattcgtggcaaaaaatcacatcgtgattcgcgcggcgaacttttatcaattactgccaatattggcacatgtgggtgcgatgttttagacaagaatgaaaaagctcaaaatgcaccaaaacatgatttttggacatattggagtgtattgggtgcgttcgtggccaaaaataacttcgtgattcacgcggcgaacttttgtcaattaatgctaatattggcttatattggcacaggtttgtgcgatgttttagaccggaatgaaaatgttcaaaaagcaccaaaacatgaattttggacatatttgagtgttttgggtgcattcgtgggaaaaaataacttcgtgattcgcgcgacgaacttttatcaattactgccaatattggcacacgtgggtgcaatgttttagaccggaattaaaaagttcaaaaagcaccaaaacatgatttttggacatattggagtgtattgggtgcgttcgtggcaaaaaatcacttcgtgattcacgcggcgaacttttgtcaattactgccagtattgggatatattggcacacatgggtgcgatgtttttcaccggaatgaaaaacttcaaaaagcagcaaaacatgtttttggacatattggagtatgttgggtgagtccgtgtcgaaaaatcactccgtgactcgcacggcgaacttttgtcaattaatgccaacattggcctatattggcatacgtgggtgagttgtttttcaccggaatgaaaaatttcataaagcattgatttttggacatattggagtgtactgggtgcgtccgtgtcgaaaaatcactccgtgactcacgcggcgaagttttgtcacttaatgccaatattggcctatattagcagacgtgggtgcgatgtatttcatcggaatgaaaatgtttagaaagcaccaaaacatgtttttggacatactgaagagaattgggtgcgtctatgtcgaaaaattcctcagtgactcacgcggcgaagttttgtcaattaatgccaatattggcatatattagcacacgtgggtgcgatgtttttcaccggaatgaaaaacttcaaaaagcaccaaaacgtgatttttggacatattggagtatgttgggtcagtccgtgtcaaaaaatcactccgtgactcgcgcgacgaactgtcaaaaatgaatgccaatattggcatatattgccacacgtgggtgcgatgtatttcaccggaacgaaaaagcaccaaaacatggtttttgtacgtactgtagagcattgggagcgtccgtatccaaaaatcactctgtgactcgcacggcgaacttttgtcaattaatccaaatattggcctatattggcacacgtgggtgttttcaccgaaatgaaaatcttcacaaagcagcaaaacatgatttttggacatattggcgtatgttgggtgagttcgtgtcgaaaaatcacttcgtgactcgagaggcgaaaacttttgtcaattaatgccaaattggcctatattggcacacgtgggtgcgatgtttttcaccggaatgaaaaagttcaaaaagcaccaagacatgatttttagatatattggagtgtatgggtgcgcccgtgtcaaaaaatcactccgtgactcgcgctgcgaaattttgtcaattaataccaaagttggcctatattggccaacgtgggtgcgatgtttttcaccggaatgaaagagttcaaaaattaccaaaacacgactttggacagaaggagtgtattgggtgcgtccgtatcgaaaaatcactgcgtgacttgcgcggcgaacttttgtcttgccaaagttggcgtatattggcacacgttggtgcgatgtttttcaccgtaatgaaaatgttcaaaaagcagcaaaacatgatttttggatatattggattgtattgggtgagtccgtgtacaaaaatcgctccgtgactcgcgcgacgaactttagtcaataaacgccaatattgtcctatattggcacacatgcgtgcgatgttttcaccggaatgaaaacgttcaaaaatcaccaaaacaagatttttcgacatattggagtgtattggatgcgttcgtggcaaaaaaaaaaaacttcctgattcgcgcggcgaacttttgccaattaatgccataatttgtacacgtgggtgtgatgtttttcaccggaattaaaaagttcaaaaagcagcaaaaaatgattttttttgacatattggagtgtattgggtgcatccgtatcgaaaaatcactccatgactcgcgcggcaaacttttgtcagttaatgccaatattgtcctatatgggcacaggttggtgcgatgtttttcaccggaatgaaaatgttcaaaaagcaccaaaacatgaattttggacatatttgagtgttttgggtgcattcgtgggaaaaaatcacttcgtgattcacgcgacgaacttttatcaattactaccaatattggcacacgtgggtgcaatgttttagaccggaattaaaaagttcaaaaagcaccaaaacatgatttttggatatattggagtgtgttgggtgcattcgtggcaaaacatcacttcgtgattcacgcggcgaacttttatcaattactgccaatattggctcacgtgggtccgatgttttagaccgcaatgaaaaagttcaaaaagcaccaaaacatgatttttgaacatattggagtgtgttgggtgcattcgtggctaaaaatcatttcgtgattcgcgcggcgaacttttgtcaattaatgccaatattggcatatattggcacacgtgggtgctatgttttacaccggaatgataaagttcaaaaagcaccaaaacaagatttttggatatattggagtgtgttgggtgcattcgtggcaaaaaatcacttcgtgattcgcgcggcgatactttgtaaattaatgccaatattggcactggtgggtgcgatgtttttcaccgtaatcaaaaagttctaaaagcaccacaacatgattgttggacatatttgagtgtttttggtgttttcgtggcaaaaaatcacttcgtgattcgtgcggcgaacttttgtcaactaatgccactattggcatataattgcacagatgggtgcgatgtttttgacaagaatgaaaaagttcaaaaatcaccaaaacatgatttttgaacatattggagtgtgttgggtgcattcgcagctaaaaatcacttcgtgattcgcgcggcgaacttttgtcaattgatgccaacattggcatatattggcacacgtgggtgcgatgttttacaccgcaatgaatgccaatattggcacacgtgggtgcaatgttttagaccggaattaaaaagttcaaaaagcagcaaaacatgatttttggacatattggagtgtgttgggtgcattcgtggcaaaacttcacttcgtgattcacgcggcgaacttttatcaattactgccaatattggcacacgtgggtgcaatgttttagaccggaattaaaaagttcaaaaagcaccaaaacatgatttttggacatattggagtgtgttgggtgcattcgtggctaaacatcacttcgtgattcacgcggcgaacttttatcaattactgccaatattggctcacgtgggtccgatgttttagaccagaatgaaaaagttcaaaaagcaccaaaacatgatttttgaacatattggagtgtgttgggtgcattcgcggctaaaaatcatttcgtgattcgcgtggcgaacttttgtcaattaatgccaatattggcacaggtgggtgcgatatttttcaccgtaatcaaaaagttcaaaaagcaccaaaacatgatttttggacatatttgagtgttttgggtgttttcgtggcaaaaaataacttcgtgattcacgctacgaacttttatcaattactgctaatattggcacacgtgggtgcaatgttttagaccggaattaaaaagttcaaaaagcaccaaaacatgatttttggacatattggagtgtgttgggtgcattcgtggcaaaacttcacttcgtgattcacgcggcgaacttttatcaattactgccaatattggcacacgtgggtgcaatgttttagaccggaattaaaaagttcaaaaagcaccaaaacatgatttttggacatattggagtgtgttgggtgcattcgtggcaaaacatcacttcgtgattcacgcggcaaacttttatcaattactgccaatattggctcacgtgggtccgatgttttagaccggaatgaaaaagttcaaaaagcaccaaaacatgatttttgaacatattggagtgtgttgggtgcattcgctgctaaaaatcatttcgtgattcgtgcggcgaacttttgtcaattaatgccactattggcatataattgcacagatgtgtgcgatgtttttgacaagaatgaaaaagttcaaaaatcaccaaaacatgatttttggacgtattggagtgtgttggtagtgttcgtgggaaaaaatgacttcgtgattcacgcggcgaacttttgtcaatttctgccaatattggcacaggtgggtgcgatgttttagaccagaatgaaaaagttcaaaaagcacgaaaaaaatgatttttggacatattggactgtgttgggtttattcgtggctaaaaatcacttcgtgatttccgcggcgaacttttgtcatttaatgccaatatttgcatatattggcacacgtgggtgtgatgtattacaccggaatgaaaaagttcaaaaagcaccaaaacatgatttttggacatagtggagtgtgttgggtgcattcgtggcaaataatcacttcgtgatttgcgcggcgaacttttgtcaattaatgtcaatattggcacaggtgggtgcgatgtttttcaccgaaattaaaaagttgaaaaagcaccaaaacatgatttttggacatatttgagtgttttgggtgctttcgtggcaaaaagtcacttcgtgattcgtttggcacttttgtcaattaatgccagtattggcgtatatttgcacaggtgggtgcgatgtttttgacaaaaatgaaaaagttcaaaaatcaccaaaacatgatttttgaacatattggagtgtgttgggtgcattcgcggctaaaaatcacttcgtgattcgcgcggcgaacttttgtcaattgatgccaatattggcatatattggcacacgtggatgcgatgttttacaccgcaatgaaaaagttcaaaaagcaccaaaacatgatttttggacatattggagtgtgttgggtgcattcgtggcaaaaaatcacttcgtgtttcgcgcggcgaactattgtaaattaatgccaatattggcacaggtgggtgcgatgtttttcaccggaatgaaaaagctcaaaaagcaccaaaacatgatttttggacatatttgagtgttttgggtgctttcgtggcaaaaaatcttttcgtgattcgtgcggcgaacttttgtcaactaatgccactattggcatataattgcacagatgtgtgcgatgtttttcaccggaatgaaaaagttcaaaaatcaccaaaacatgatatttggacgtattggagtgtgttgggagtgttcgtgggaaaaaatcacttcgtgattcgcgcagcgaacttttgtcaatttctgccaatattggcacaggtgggtgcgatgttttagaccagattgaaaaagtttaaaaagcaccaaaacatgatttttggacatattggagtgtgttgggtgcattcgtggctaaaaatcacttcatgatttgcgcggcgaacttttgtcatttaatgccaatatttgcatatattggcacacgtgggtgcgatgttttagaccggaacgaaaaagttcaaaaagcaccaaaacatgatttttggacatagtgtagtgtgttgggtgcattcgtggcaaaaaatcacttcgtgattcgcgcggcgaagttttgtcaattaatgtcaatattggcacaggtgggtgcgatgtttttcaccggaatgaaaaagttcaaaaagcaccaaaacatgatttttggacatatctgagtgttttgggtgctttcgtggcaaaaaatcacttcgtgattcgcgcggcgaacttttgtcaattaatgctagtattggcatatattggcacatgtcggtgcgatgtttcagactggaatgaaaatgttcaaaaagcaccaaaacatgatttttggacatatttgagtgttttgggtgcattcgtggcaaaaaatcacttcgtgattcgtgcggcgaacttttgtcaattaatggattcttttgtcaattcgaaaaatctctcaattcatcttcctctactcatgttaatggattcttttgctgtgtccttcggttcggccaatgagtacgaaccatggaatcatgttcttgccatgttcctaggcttggccatcatgagtacaagccaaaggaatttttcctctttgttgtgtcctttgtctcagccagcgcgtatgagacaaggaagttcgtttcatttgatggcttttaacatgatttcacacttttttctatggtccggccagatgagtacgggcctaggagtggtttccatgcaaactcttttcatgtcatcctaccataccctctgatttggtcccgttagcggatacaagcccaggcgagattctcgctctcaggttcagtcctctacgagcggatacaaatcacggatacaaacacaaattttgcataattcaccataaattaaacaagcacttgctttggtcacgcttcatggcttcaagccgtgctagtagtgataaaggcatagtgataaataaaattaattgagcatactaattagcacacttatttgctagttttgacatatgttcagccatatttctctaacaagaattaaaataaaatggcgttcattttctttccgtggtcagagctaggaaatagatgtacgcatgcatatattttctccttccatctgttcatctacaaaatgatggataaatcatgaactgcgccgagttatgatggtcggccataaaattaaccaacactcacttcggttacgcttcacggcttcgagccatgctagtagtaatacaagtggagtgaaaattataatctcaaaatcatccgcatacatatatttgcttaaaacaatgtatactcgctacaccatatataaagtgcagtataaaaaaatctgatatacgcacatgcatgcatccatatactctggctgtgcattcgctatcacgtatagtttcttcccaatagcaaattaatccatatatgcatagcaagcgacaacatcatgataatcgaccataaatcaaacaaatgcccacttcgattacacttgatggtatagtgccgcgctagtagtaatacaggtggggtggaaattaaaataggcaatgcaaattcgccgtaccaaaatcccatgccgcgtcgataatattggcgctaaagcaaatactcgcctggctatgcctcgcgaatgctcaagaaaattctgcaatttctatatgtgcgctacgtataaaaaaataaagtcacaatgccaaaaaaagaagctatgtataaatttgctaccatacacgcagtgatattaaaaccaacaaattagtgggcatctataatacgcccaaaatgaaataaacatataaatggaaatctacagaagattctacggctgcgacatctggagctttaggatagatttttctttttagccttttagcagtcatgtaattttattttctttcatgttggaatccctaatcaggggttttctctacggagatgtaattaacagaatttctatataaatgtatgaattctggaagtaatggactcgcaatttctgatttttatttatttattgcatttaaattaaattgtctctaacgatttgcggataacgaacctactattacaaccatcccggttttcccggcgtcagattctggcacgcccagtgggacctacttctcccctcctctctgagttccaacatgtagaccgcgaatatgaaaaaaaaaggagataaatgcacatatccttagtggaaaaattcacgtattcaagtgcttcatccaaagcgctctatgaaattaatatatgcatgctatggtcttacaggaccagatgaaacgtctgtttatatatatggtcgagaaaactaacatatggttttctttattttgcaaggatgtctaaacaagttcaaccattcgtcacgctgcgctttggctcactgtgggtggacgttcccataggtccattccaggtcgccaacagtggcagctcccttcagaccactgctgcatcgccagctccggcggactatgaacaggaagtgagctcggcgccacagggcgggtacattcctgttctatccaaagctgccaagaggaggagggcagcagttaaggcaagacaggctgcctcacaagagcacttcatcaaggtgcgtgaggccgcttccaacgactcgatgcctcctgggtttaccagggctgcaccagccatgaccagggtggcacccgtcaagaccaggagctacgaagcatatccaaggttccgtcgcacaacactcgggcgagtggactgttcgtgagatacggacgggtccgtccaaggcagcgccgcgtcgccgagcgtcccctgagccaaaagggattgcttcttctatgccaaagaagagtgcactgggggctaatgcatccccggcctgcgtggcggggtcttcatcgactcccgtggcagtgccactcaacattgcccctgagatgctaggggtagtgtctcccaagaattccctaagcatattaggggctgcaccttcaatgtccacagcagcggcaccatcatctgcatcaacaggtgtcgcgctgaaccgccctcaccgcctgcacccacttgataaagggacggctgtgatggaggatgaaacgcaccatgagctgccctcaagcaagaagaagggtgtagtagttctgcaaagtgtccctacacaacagcaaagctcgtcgccgtcatcaagcaagctccgagctgatgccccagagttcatcccatcatcaatcaaaaaatcaagggcatcccggcgcagggcgaagaagaagcgtacgctccaatgggaaggagtgtacgtttcacttggtgacgtcaggatgggtcatgtcgacccaaccgtggtgccttctgacacggtatcgactgttactcccactcaacgcccttccatgcaaggatctttttcaccatccaagaaccgacgtcggcgacgcaatgcttgtcgcacttgggttgacttcccagttgcaactgaagccaaggagacaaggcatcagcgtgagaaagtgtacaatgacatgatgaacaaaaggatcagagaaagccgcagaggtcaagctgaaaggtttgaagattgggctacatttatggaagcaaccatctgccataccatgaaagaaatgttgccgggcgtttcaacgtccgacaatggcatgggcggcgccattatgaggcgcgccgaggcactggccagatggccagagtatcaaaggcttgttgatcaagagctgtggcgacaaacctatgtcaaccatgctaagcgcgtgtgtgctaagcgagcagcgcataagcagggagaattggcagcatgtcacgcccggaaattcactagtaatttccgaacttatttatgcataaaaccctcatccaggaatcagccgaggtacacaaactgacaatttaatatataaatccatcataaacatacttacagaagaaaagaaaacagcagcggaattaacggtctagcgatggcttcagctccactcccataggcagctcaactggggtataagccaaacgtcttctccttctggatcttttttcttcaactgaggttgattgattattgtaaggtgagcatatgacatactccgcaagccacacagcaaatgtgcaattgcacaaggataccaaaggatggcataatataggctcatttgcaaaagcagcatttagcaaacatttaagagaagtaaaacagtagagtaattaatcagaaattttaatcaacactgaatagcacacccatgctgctcaggcccaaccatcctgaacaaccatacccggctgtacagatctaactccaaactacgagctaaacaaattattaccagttatagcatcaataattattgtgagaggtgtgagactaatcacgaaaaacattgctcaacccgcccataaccgcgggcacggctattcgaatagttttactctggccagaggtgtaccattgtacccacaagacacgattccacacatattgccatgccccgaagtaccaccacggcactgctaaggggaaaatcgtgacaatacccttcgcacaacacaactcaccacagtgcaccattcctggatcataatctcccccctcaaaaccagaggcaatggactccccagcgacccccacggacttctcaccgcttctcagtctggcaccccgtaatgaaccatgctatacaaaaggtaaagccgttgcccacgctggctagtggttggcatggttaatgtctcacaacagtagctcgcaaatcggtccttaattgtcatgagcacaaccatcaaaaccatatgctcacaacccacctttaatcaggttttaattatcaattaattatcttaacacgattaaccatcgtgagctaccattgaatataatcataaataataatgtagtgtgattcatccccttaatgagctaatgtttctaagcatggctaagcaattatacatatagcatctagctgaaccaatccaataataaggtccacgctaatcaaattataacccataggaaaataaagtcatcttcggccattaattaattgggaaaggctcaccacccgatgacattcgaaaataatgcataagttgaaataaaacattagctttaaaagggttcaacatgctcaaagggttgtttgggatctgtgtgacttgccttgagcttccgcaaaggcttccgaacgtttctcaacgaaaacgctctcctccggaacgtcgaaaactaaagtaaaagaacaaaatcaacaaaacagtacaaaaacaagcataaacagtacatgtggatatttttaacatgtatatcttgattttagaaaaatttagcaacttgaaccactcgaatccgagttacgatgatttagttatgaatttccgaagtttaatcgattttcaactaatagagaaaactaagaaaaaaggattaatgacgtcatcgctgacatcatcgccggccatggcacggcttccacgcgaccaccggcaaaagagggctcgattgggctaaccgaggacaccaacgcgaagaggacgacaacgcgaactcaccggtgcaaagaacaacgacggacgacgacgaacgacggccggcgacgaggttcgacggcggctcggctctgctcaacgacggcgacggtgctccagtggtcttcggcggctgcgaaggggcggccgaggtactcctcctccgcgcgcacccgacggcggcgacggacggcaacggcgacggctaccgcggcggcgcgacgcggctggaacgtcgacgcgacagcggcggctagggcgacgcggcggcggcgcgacgggccacgagggagctcgggacttggggcaaacggaagaggacgtcaaggggatgctttatataggcttggactagagagatccgactccatacgagaggatttgagccggaaaatccgagggttagtttggagagataaactcgaaaacgaatttgattcggtttatccgggcaaaattaatctccgagaatttaagggaaagggagaggataaggtggagatgatttcccctcaactaattttgcaaacggagcacgggatgcggtggatttggtggaggaagcggcgtcggctaaagggcacaggacggcagctcgggctctgtccaagtttgaagacgacactgtagcagggacgcgaattagactttgactgcgcttcttttctctagcccgattgaaagagggtcatgaaatggactttgggaaagagagggagatgggctgacgatgacagatagacttttccagtttcagcccgaaaagcaaaaggggaattttaattacttttccaattaaattaatcactgaaatgatctttgatttgttaaaaatacttccaatgctcaaataatttcaagaaaaatcctgaaaatacttggacactataagtatttaacaagattataataagaccatttaatgattaatttaatatgtggataattactgaaatattctttgtatgattaaaattaagaattgagctcctaattcccgagagtataattaaccacggagaatttaataaaaattaaatccttccatgctttatattaaggaaattttatttcccacatttaacttctcttgtaaattaatgaacatttaatataaattctaataataatttattaaataatttataaatcctgaaacgaaaatcaggatgtgacacatcacgagcaagctccacgtgcagcaagatacagtgggtacctatgtcctcatcaagccatggtcaatgagtgtatgaggtgggatcgacatcacgcacaccgaagaaaggttgtagccgacttatagtctattattgtacatgctattagctttttatatttgaacttggaatgtagtatccaaaataactttgggggtgtgtagatccaggagtgtaaagtttttgcgttccacatcgggtattatatagggtgtcgcatggggtgttcgggcactaataaaaaaactaattgtagtatccgtcagtaaaccgcgagactaatttattaaacctaattaatccgtcattaacagatgtttattgtagcaccacattatcaaaatcatggagcaattaggcttaaaagattcgtctcgcaaattagtcgcaatctgtgcaattagttatttttttagcttatatttaatacttcaaacgttcgatgttgtcgagggaagaccctcgatcgcgcggagtcgcgtgacccccctttcgtgagttcggccgggggcagagactcgtctctccgaagtcgcgtgtccgtccctccgatccccggttagctagcacacaaatggattacccaggttcaggctgctctggagcgtaataccctatatcagtgaattttaaaaggtttccctcgctccccctctttttggtgggcaaggtcctccttttatagcttaaggggataccacatacgccgtctctaccctccccctccatcggagggaggggagggggcccttctccctactgcgaccgggtttcaacccgtgccttttgctggaagctaagcatcggtcggtccttgagtggggcccagcgccgtctcccgcctgacacggggggcagccctgtcattccctcataaacgagggaggacttgcggcagccctgcatcgaacgccgtccggatgtgatggggcgtacctaccgccactccgcggagacagaggcgacgtgggggcacgaccgcccgtccaatcggccgtgaccggcaatagactggtcacagaccggtcgcatccgactgataggggtcggtcgggcgcgccgcacgtctgcccccgccgcattgaatgcagcgagggacggttggggcgctgcacatttatggccggccagcctggactcccctctcacacttccccccgaagggagggcctcggggtaaaacgacgggagagcccgagggggtgacggttcaccccccgagggggatgttcggtcgcacccgccgagngctcttcccccttcgccctagtgactcacgaggtatgtgggtgggaccagctcgcggagccgcgtggctggaaagggaagtagctctcctttactccacatacccccaggcccatatctccgacagtagcccccggcgccatgtcagacgcgggcttcctgggaccggtctgacatggtgcctcacgacctccccagctgggattgtggacccggcggggagtttaaaggagtattgccgagcggccagattggcgggctagccatagcggcggttcggtcgcctttgatcgcgctaaagacgaggatgcttgggacgcgataatcggggaattggttagaccacgcctcgattacttcgcccgctattcctacggcggttgtggtgacggttcactcagcttgtgctcataaccgttgcgcattccacctcgagtgcgctgctgataggcgcactaaaggtgggacgcggacacgacgggcgacatggtgaacgggcgcgggaaacggagagacaactgcggacgtgggggcaattttgagggcacgaaacgaggaggcgagcgcggatgaggcgaggattaaaagggagtggaggcagggacctctcctccttcctttcgccaaccgccgactcgtcctctcgcttctcgaaccctaacactctcgccactccacgcagctttgcgcgccacgccttccgccactgccccgccggccaccatggctcaagacaaaagcgacacagtgctgccttcttcccgcatctcggcagacagacaccttagcctcccccgcaaaatcatgccggacggcgccgtcgtgagggcgggggagtcatggccgcggccgcgatatccggagcggtccgtgcacctcttgtccttcgccatggcgggattgattccgcctttctcccgatttttccacgaggttctggatttctacgaaatccatgccttgcatctcgcgcccaacgccgtgatgacactgagcatctttgcgcacctgtgcgagatgttcatcggggtgcgatcgacaatgcggttgttccaggccttcttcgtcccgcagctgctacagggtgcggtggtggggggatgttacttccagccccgaccaggcacggcggggcagtacatcgagagccacctccgcaagaaatgggaggactggaagaaagactggttctacaccgcgctgccggatcacccacgacttcgagttcccgccggtcctcccgagagatccgccgcatggctggcggcttcggagctgggcgaggaatatgacgcggtgtgggatcgtctcaggggcctgcgaagctggggcctcacaggggcaatggtcttcggcgactactttcgccgccgtatcgcccctctccaggaacgatcccgtggcgcgtgggagtacaccggccccaacgaccccatgcgcacgcatgcgggcgagcgctgggactggggcgaggaggacgccaagatggtgattcggcgggtgctgggcctggactccgccgagcaaacactgatcccggatgggatcctccccctctgctgcgaccgcgaccgggagagcatcttggccgtaatgtcggtcgtcggcgccggcaggggccggcctggccgagggggcgctagcggtggtggcgactcacgggcgcccggctcgggccgcaaacccggagacgacccggcaagtgacccgaaggggaagcggaaggcggccgaatcttggccgccctctcccccgcgtggaggaggcgccgagcgcgcgacagaccttccaccggcgggtcacaagcgacctgccgggcccgaggccggtcggaagaagaaacggctccggaagatagggcaaacggagccgtgccgagggagctacatcgagcccccgaagtggaccttcaaccgtcctccccgcaggtacaaacgctggcgcccacttcggtgctcttacctagctcggcctcttgttccctccctttctttttcttttgttaacgcgatctgggttcccttgtagcgatattccttctcaggggacctcggggtcggacccctcgcggaggacgaaatccgcacaaccggagcagtccgggcctggccaatccaaggccgcggggtcttcgcaacctcgcggtggggtccacaggacacgtaccgggcctgatcccgagcgacccttagccgggactcgacctaccgtgggtggcggtggcgtcgacgcccctcccgggggcagctccgagactggggtccgtgcggagcgccgcccaggatcggttggtgcggacggtcgcgagcccgaggttgaggtcgaggctgggggcggtcctgagctcgaggccgaggccgaatccacccgaggactggaagcgggggacgaaaagaacagccgctcccccttgcgtttggggcgccctcggggctggcctcgcagaaggggggccgagagcagccccccgtctcgcggggggtccagcagcactccgtcgtcccgggggcgaaccgcgggcttttcttccccatccctggtgagcatggagccacttctgcaggtgctcgccgccaccgactccactgtccgggaggggctcaatacccaagttcaagccctggcggaagaacggacggccctggatgccgaatgggctcagcttgtggcggaccgcgcgcgagtcgatgaggggtgccgtgccgtggaggacatggtgagggtggggcgcaaaaagcaccaagcccacctagccaaaatccaggcgcgcgaggaggtgctggactctgtcatgcgggagacggaggaggagcggcatgcggcgctgatcgcctcgagcgccctggacgaagcgctgggcgatatccgccttcagtacgaggcccatgtcgaggacctggcggagagggtcaggaatgcacgtggcaccctcgacgcagccgctgcccacgagcggcgagcagcggaggccgacgcctcgttgccggcccggactgcggcactcgaggctgaacgcaaggccttggacgaagaaagcgggagcgggggtgacgatagcgatgaagactgggacaacatcgtcagcggcgccggcctcggagggccgggcaccccgtgactatccgcgccttcaattccctcttgttgtgcgcccgtagcgggcacttcttgtatttaagccgtcgcgccatcctgccttgttttgcaattgaaacttccttagctccttttcccctttcgcttcttctattcattgctccttccactgaatgtctttgaaacagagagaacaaaaaaccaggggaaaacgggataatcagtccgtgatcgagatgccgctttgaccccatccccccctcgggcttgttctagcgagatggtgaatccgcgtttggtccagggcacctaagtggtgatgggcaaacccactgctccgagggagccgcctagcgggactggccagaccgaggccgcgtcgaccgggggtcggggacggccgtgtgtaggcccttccgatcctccggggttcgacgcaacccggggcatggcccgcgttcgtgctccctttcggggtttccaggccgcctcacagcacttaggattcagagcaaacgcagattaccccttaaaccaggacaagccagaggaagggaaaaaaacggtctttgggtaaaagtacacaagaattcattgcttgtaagaggaaaaaaggatacacagtggtagcccccggccaggcgcgcacaaaccgaggggttgtgcgggggctggcccgagctccaagaaagcaaaaaagtctcgatattatggatagaagcgacggaggtgttcgatattccaggggttaggcaattctgtgccgtcctccatggttaaccgaacggagcctggccggggcacgcagatcactttgtatggtccttcccacgttggcgagagcttgctcagccctaggcgcgactgaacgcggcgtaggacgaggtcgccaacttgcagtgatcgggcccggacgtggcgctgatggtagcgtcgcaggctctgctggtagcgggcggcacgcaaggccgctcgccttctccgttcttcgagataatcgagatcatcgcggcgaaggtcatcctggttggtctcgctgtacagtgtgacgcgaggcgaccccagggagagctcggagggtaggaccgcttcggcgccgtacaccagaaaaaacggcgtttccccggtggcgcggcttggggtggtccgatttgcccacaacacggcgggcaactcctcgagccatgagtccccgtgcctcttcaagacgttgtatgtcttggtttttaggcctttgaggatttcggcattggctcgctcgacttggccgttgctcttggggtgggcgggcgaggcaaagcataacttgatgcccatgtcgtcacagtaatcgccgaacagctcactggtgaactgggtgccgttgtctgtgataatgcggttgggcactccgaaccgagaggtgatgcccctgatgaatttgagggcagaatgcttgtcgatcttgacgacagggtaagcctcgggccacttggtgaacttgtcgatggcgacgtacaggtgctgatacccgcctcgagccgctttgaaaggtccaaggatgtctagcccccagaccgcaaaaggccaagagagggggatgacctgcaaggcttgggccggctggtggttctgcttggcgtggaactggcacgctttacaccgccggacccattcttgggcatcttgtaatgcagtcggccaataaaagccttgccgaaaggctttcccgactaaagttcgcgaggccgaatgggccccgcactcgccctgatgggtgtcggctatgagctcgatgccctgctctcgagaaacacacttcaagagtatcccgttggcggcacgccggtagagggtcccttctacaaggacgtaccgcttagagatgcgcgcaagcttttcagcttctgcgcggtcctcaggaagagtattgtcgtcgagatacgcccggacattagtcatccatgcgacttggcgaggggggtcggggtcgaccccctcgggccccgggggcgcggaggggggtcggggtcgaccccctcgggctccaaggggcgcgagttggaaggaatcggggcggagggcatgtcgttggagcccctcgaggggttcggtcgtgctgatggttggacaagcctttcttcaaaggtccccgggggaagtggggctcgcgccgacgcaacacgcggcagctcatcagcgagtgtgttgtcgcgccggggcacgtgccggagctcgattccgtcgaagtggcgttccatgcgccgtacttcgcggacatatgcatccatttgagggtcggtgcattggtactctttggatacttgatttacgaccagctgggagtcacctaggaccaggagacggcggatgcccattccggctgccgccctcaatcctgcgaggagcccttcgtattctgccatgttgttcgtggctcggaagtcgagccgaacgacgtatttgaggacgtctccgcttggcgaggttagtgtgactccagcacccgcgccttgaagggtgagggagccgtcgagatgcataatccagtgtccgccacgaatgtcggcgtttgggtcctctttctcttcgggggagggagggggttcggacggaacagggtcgtccactggggcccattccgcgatgaagtcagccaggacttgacttttgatcgcgtgccgcggttcgaagtgcaggtcgaactcagccagctcgatggcccattttaccacccgtccggtgccctctcggttgtgcaagatttggccgagagggtacgatgttaccacggaaacccgatgtgcttggaagtaatggcgcaacttcctcgaggccatcaatacggcgtaaagcattttctgggcctgcgggtaccgggttttcacatcccgaagcgcctcgctgacaaagtagatgggccgctgcaccgttcgggcgggccggttcgtgttgtcaggggcggatgatccggagcgcgcctgctcgggggcccccgggggattccggattatcttgggatcacagggctcggggcctcctgccaaagcctcgccttctcctccgggggcctcagggtcctcccgggggctgggggctttgggggacgaggggccatcacgagccggagggacctcctgctcggtctcctcgcgttcaactactagggtggcactcaccacgtggggggtcgcagccaagtagagtagcaatggctcctccggccccggggccaccaggatagggggagaagtgaggtaagctttcagctgattgagggcttgctcagcttcctccgtccatacaaacggcctggggcgcttgaggagcttgaataggggcagcgctctctcgcccaatcttgatataaatcgactcagggcggccatgcatccagcgacacattgcacatccctgagcttgctggggggcgcatcctctctatcacgcgtattttctcgggatttgcttctatgcctcgggaagagactagaaaaccgagaagcttgcccgccggcacgccgaacacacacttatcggggttcagctttacacgtgtggacctaagactatcgaaagtctcggccaggtgttgcagcaacgtgtcctggcggcgcgtttttaccactaggtcatcgacatacgcctctacattgcgccctatctgattacttaaagtaattcgagtcatgcgctgaaaggtagggccggcattttttaacccaaaaggcatagttgtataacaaaaggtgcctacaggagtaatgaaggcagttttttcttcatcttccctagccatgcgaatctgatggtacccagagtatgcatctaggaaacacaaaaggtcgcaccccgcagtggagtcgactatctgatctatacgtggtagagggaagggatctttagggcataccttattgaggtctgtgtagtcgatgcacatccgcagcttgctgttggccttcgggacgaccaccgggttcgccagccactccggatgaatcacctcgcggatgaaatcagcctccaggagccgcgccacctcctccctgatgaaggtttgtcgctccggggcttgacgccgcactttttgccggacaggtcgcgcatccggtcgcacggcaaggcggtgctcaatcacctccctagggaccccgggcatatccgacggcttccatgcgaaaacgtcagaattcgcccgcaggaaggagatgagcgcgccttcctatttggcgtccaaggtttcgccaatcttagcggttttggacggatcgtcgccaaggggaatctccttgacgggcacctcgtcggccaaggtgaggcgcttcttgggggcgcgggacgcgggggcctccggggcctgcggccccgtggccgccgccaggttgtccgcgcgctgttctgcacaggcgagggcgactttgacatcactaaagatggtgatgggaccggcaggacccggcatcttcatctggaggtaggcgtaatgggtggcggccatgaactttaccaacgcgggtctgcccaggaccgcgttgtagggcagattgagatccgccacatcgaagtcgatccgctcggtgcggaaattggtggagtcgccgaaggttactaggagctcgacgtgaccaagcggccacgtgtgtcccggagtaacgccaatgattggcagcgacggttggagcttcatccccggggccttgagcgcgtcaaaggcagccggggagatgatgttcagactggccccgccgtccaccagcacacgcttcatcttgacgttgtggatagtcggggagaccaccagggccaacttccctccccgagcgagtaccgtcggatggtcgctctggtcaaaggtgagctttacctccgaccagcacgccttccggatcgcctcatgggtgggaacagcggccagaagttcccgcctcatagccttgaaccctcgacgagaagtgcgagcgcaagcccccccatcgaatgtggcgacggtcccttggggtatctagaaatccagatcctcaccacctccgccatcgtcagcgggggccttgttcttggcctcctctcgctggtcactggttgaggtcatgggagccttgccctcccgtcgaccctgccgcttttcctcatcggcctttcggaaccactcggccaagttcttgaccgagcggcagtcggtgagactgtggcggtaagtgttgtgccccgaacaccacttgtccgccgaccggcctccgccggagggggtggtggagctcggcttatcgccggtaatctttcctttgcgcggggcccacgtgggccctctgccgcaaggacatggccctcgtcatcggaacgggccggtttcctcttgcctctcctatctcgccgcttagagcgaggggcagactcgggggcagccgcagccgccgcaccggtgccaggagagttccaggcccacgcctcctccttccgggccaccttgtccgccagctcgaagagctcggcggtggtcttgggctccttggaggcgatcttctccagcatgcggttatgccgcacgccgttccggaatgcatacactactgcgtgggctggaatgcacggtatggtgtggcggacctggcagaagcgctgtatatacgaacggagggactcgtcgtccttccgccgcacagcatgcaggtccgcttcttcccccgggcagggatatgtcccctagaggtttgtgacgaactgctggcatagatcctcccaggagtgaatggagtcggggagctgggccatcaaccagccacgcgcctgacccttaagggccatgggaaagtagttcgccataacccggtcgtcaccccctgccgccacgatgatcgtggtgtagatttggaggaactcggaggggttgatgctgccatcatacttctccgtgagattggggcgaaacttcgggggccaccagacattctggagactcgcaacgaaagccctacaacctgcccctcccaggggtgagcgtggggggagggccgcctcgcgaagaagagcgcggcactccagatgaggaggcaccttcccccatgcgggtagcccggcgctcgtccaggcgtcgctcgatgttgacccgagcatcctgcgccccgtagaggtcatcatgacgcctccgccttcccgagacctccgatgtcgttggagccgtggatcgcctcaaggttgtggccgatcgacgggcccttctcctcgccgacgaggaaagggtagccggggtactcgatgtacctgtggcggtggattggccacccgtggccaactgccgctgggcagcggtgaccaagttggccacgtcgtccagccagcgccgcacgggggtctccggctccgggttcacctggggatgccgcagaagggcgcccaccacctgaagcgcgccttggggcgaaccaccgtctccgtagtcgagacggcgacgtgctccgacgcgtcgcgacctccctcctcctgggggcggggagagggccgtaccgcttgaacgggttggatcctccctccgcgaaggctcgcggcggggaggactttgagagccatggcgatggtgacgagggtcacggttttcgcccgaatccccactcccagacggggtgggggtaggcgccaccgcttcctctgcttccaggacctcgaccatggcggtctagggcctggtccgacctgggacggaaggaagcgacttcttctcaaacgcgcaactgccccctacttggcgtgccagctgtcgagggaagacccccgatcgcggggagtcgcgtgacccccctttcgtgagttcggccgggggcagagactcgtctctccgaagtcgcgtgttcgtccctccgatccccgattagctagcacacaaatggattacctaggttcaggccgctctggagcgtaataccctactcctacgtttgggattatcagtgaattttaaaaggtttccctcgctccccctctttttggtgggcaaggtcctccttttatagcttaaggggataccatatgcgccgtctctaccctccccctccatcggagggaggggagggggcccttctccctactgcgaccgggtttcaacccgtgccttttgttggaagctaagcatcggtcggtccttgagtggggcccagcgccgtctcccgcctgacacggggggcagccctgtcattccctcataaacgagggaagacttgcggcagccctgcatcaaacgccgtccggatgtgatggggcgtacctaccgccactccgcggagacagaggcgacgtgggggcacgaccgcccgtccaatcggccgtgaccggcaatagactggtcacagaccggtcgcatccgactgacaggggtcggtcgggcgcgccgcacgtctgcccccgccgcattgaatgcagcgagggacggttggggcgctgcacatttatggccgcccagcctggactcccctctcacacttccccccgagggagggcctcggggtaaaacgacgggagagcccgagggggtgacgtcacccccgaggggatgtcgtcgacccccgaggctctccccttcgccctagtgactcacgaggtatgtgggtgggaccagctcgcggagccgtgtggctggaaagggaagtagctctcctttactccacatacccccgggcctatatctccgacagatgtgatagggtgtaacatttttgtgcaggaaacatgacctttgtttttaagaccggatggagcactttgttaggcggtttgggagtttggaacttgtgcaaaacggtgtgttttaaaaattaaaaccattgctctcgtacataccagatatttataactaacggtcgagaagttcaaaatgtgtccaaaggttgagaagtttaaaatgtatccaaatcaacatattttcaatatttgagggagtaacgtgatataagaccatatatttataactaatggccgataagtttaaaatgtgtccaacggtcgaaaagtttaaaacaggtccgaagtccgaacctcgtgtttcaggatatctacaacgaatgcttgggtcgggacgtaaggttaagggcttgtttggttggtgccctcagctgcatgcctgaagaaaaagtgctgcttgaaatctccctgagatcttgatgtgttcggcctgatcaggcaagcctgagattactctgtttggttgcaggtctgaggtcaagcgtgcctgagctgaaaacacaaccattgaatgacgtttattatgtgaacaaagcgtaaaaatataatacgtattcattttacaaaagtaatctctcatctatatacactagcagtccatctaattgcacgatgatcacaagtatcgcttgcatctagttgacattgaagcttcgagcagcaacaattgaacggaggattgggcaaggggttggtgcggcatctggggtgtcggctactcggctgcgcaggccagcaggatggattacagcgctaattatcggtggctgttgcggcctggagttctggcgaccaaaatgggtcacctggctcaggctaaccgcaagtcagaaggaatcaggccaggcaaggggtagttgatctcaggatagcaaccaaaacaaggttcaaactaacctcaggcttgtcttcactcaggcaagttcttctcagggcatcaaccaaacagcccctaaacctctcttagttgtgccaaaggaaattatggaaatttttaacacggctataatggcacaatattgacaatgaaaaatacccatataaacacaattttgcctaattgtgttacctactatagaaaacttgcgactgtagtttcacacgaataacgttctcgtgcaggtgggtgggccaccggtccatgcaacagtagccgtgccggcccgacacggcccaacacttccttgggccgttctgcccaagacctggcacggcacggcccggcccattacagttgccgtgccatcagcgggcccgagctatgctgggccgggccgcccatttggcctgctacacataatgggtaacatagtaaatctgagctaaaggtggagtactcgagtatctcttcccccttcccttcgcgtaaaagagaaaaaaaaatctcccgtctcgtcgtctcatccgcttctttcgccattcgcggctgaacaggggaggggagggggagggtcgccgatctccatccggcgagcaaggggatcctggtgagcatccgcatcctctttctgatgattcatctctctctctctcaccggggatgcttctgtcttggaatttgcttgcgtaaaccctagcttctcttgtagatctggaagaagctcttctcttagttccagagcctttaaccttaatacaagtaacagtttgagtttgtttgttgttcccccaaaagtttggggggttcaactgaacccccatgtcccaagttggatccgccccctgttatttcactcatttcactaatttgtttacatacagtggaataatgtagcatttatttttgttatgcaccgttgtagatctgatgagaattcctaatgcttaaaattgcctgaatagatataacgattaattcttgttttcaaggaagtttcaccatctatggtgataatgtcattctgttattacagaggtcaatgtgttgtagataataagtgacataggttgtatcatttatttcttctatgctcaaggtcctgaactgttgtgcatgtttcatttgttgccccccgagtcatattatttggcgcgggatacttcagtactttggatcaaataatcgtgatgggaaggagtacatagccaaatgctcttttcccattgtaatgcacgggcaactaactagggtatggacattatctcatgtttgtggtcatgatcaaatcgctcataaaacatgtgcatcttagattataggcagaaatgtattccaataatgttatttggagtgaaattcatccctcaacagaaaaaaattctgctaaatactctattaaccttttctgtgtgatactcatgggtatgtatgcattgattgctaaacattttcacatgtgcatttgacagctcaggtggcagcaaacaggaagctttctccattagaaggaatcaaaccgatcgagaaggatcaaaccaagaagagaaaggatcctacatagtatcttgatactggttaccttggctaagaggaccgatcggactattggagaggaggggctaagtcgtctccacaacagtgaactgtctccgagccaaaacagaacgaacgcccaaacaggcaaaccacgaactcgaaccctagaaaccctgaccatggactcgggaggcggaggaggggcattgcacaaggcagcgtcgggctccgcaccctcgggggcggcggccgcgaaccccacggcgatgctctccgccctgatgagcaagcgcgccaagctccaggaggagctccgctccatagagcgccaggttaggtcttacacactgttccctgtctcttttgcgcctctctctctctctctctcttggaattagggttttgtataggagaccatggatttgttgcatatatgtacagatggcaagggcttgccattgctcaacatgcgaatgagtggtgcgaatttacatcgctgcggatggttgtaaaattggagttgtggatacctgtagtagcctgaatttattgttcaatatttcttaatgccttgggaatgatagaaatatgaacctatttggaaccaatatgctggaccagtgaccactgattgtcatttcacagagaggatcagttgtgacgaacaatttggatagaattaggaggaagggaagaaagtatcaatttgatattcttgtcgaatatgaccattctatttcttgtatgttgttctttgtgcctgagaacactttgttattctaaggtaaaaaagaaaatcagttagctacaacctgaaaattccatctgttcttctatcctcgagttaaaatgtggagtttctactgtgtcttagtcagaaattattcgcagcaagtatcaaatgagctacttctattcatagtatttcaaagttacactatgtggtccaaattccaatatatgtttgtgatggtgaatcttggtgtgtcatccaaaatcattaaataagaggagcgtttggtttagtagaaaccataatcctaaaaagggaggaaagtgctattgctctcatatcaagtattttaatggcactaatatgtgtgttttttttagaaagaacaaaacagtcgctctttaataccaggaacaacacatgatctataatgtcaaccatctttgcttgactttaaggggaagttttgtatatgatattaaacactcataatttaacaaaatatctattcatgcttttaacagaattgttcttatacaacctgcaaatgatgtttatgtccatatgttgcaggtttatgaaatggagacaacctacctacaagagtctaatcaattcggaagtgtgctaaagggttttgaatcattcttatcatcgtcaaagaacacttccaagtaagaaatctttattttcttagactgctacgccctttactatttggaggtcttcattcattttcttttgacatcccactgtatacttaccagttcgaaaccttcagaattcatgccacattctttgcttactttcaactgttgattgaatgacctactgtccttcccttgaactttctaccagcctctgatcacatataatttagctaatattcggatgaataatttatagttatagatattgaacaaaagatcctctgatcacatataatttactaatgatcagatgaatgatgttgaacaaaagatcctctgatcacatataatttactaatgatcagatgaacaaaagatcctctgatcactatagtggcagtggcaggtattatacaacagattcataacccaaaatatgctatgatagtgttatgtcagtttattggccaattgcaggggtgctctatatgcactatctagcatcaccaagggagggttggatttatgattaccattggcataatgttgcgtgttcattattctgcacaagcaaatgttttatcatttctgttctgctaatagatcacacagaattagttatgacagtttctatcttattattttcagtctcaagcgctccaggaagttccaggctgatgagaggctgttctccctgtcatcggttacatctccagcggtatgactaatgatcctaaatcctaatgcactgaaaagcccgtgccccttttttaatcttttggtttgctttgattgatgattgttattccccctgtgctatactgatatttgtgagtttgctaatacataccattattttctattcattccaggtcgatgaacatatggctggacgagatggtaagttctctttcttgttttcattaagctgaaaccaggaacaattgagactctgggctcaatactagctgcatcctggcagatggaagagaatatggatcaggtcgttcgaaaggtgcaaccactcctgcaaacgggcagtaagtgctcagattacctttgtggcaaaaaatgtgctatccttatcagctttacatacatccttgcaaggggcagtgtttgtctaacacttctttatattaaaaaaaacagtgtttctaggaacaacccttttagcccttgtttagttccaaactttttcttcaaacttccaacttttccatcacatcaaaactttcctacacgcacaaacttccaacttttccgtcacattgttccaatttcaaccaaacttccaattttagcgtgaactaaacacacccttagtagaattgcctagttctgacccctcgtgtgtttggacagaggaaaaccaaagaagggaggtcgccctggagggagagacggcaagagaatacggccatcaaatgatccagatctggacgacgaagaggacttctaactcgacatgttgtaggcctagctcagtgatgatttaaccttgctagactcatgcttcgaatcattctttctgtattgtaatttttttttaatcttgtgttgcaatccatggcaagcaaagccttttccccagggagtagccttgctcatctagtcatcttatcgtcggcatttgcctgtgcttgcattttcttccttttcaacccaccccggcgttgtctgattgtctcccgttttgtaaagcagtagcaagttaattagacggtgataatttctgttaactctactgtaaacaacgttgctatagattccagactccagtgagacgaggatgagactccagcgagacgagaatctggattggccgattcttagtaccagaaaaaaatgtctcatccgattataggtttttatattttggaacgtgtagttgctagcacaccgccgcgtttgccagggccaaggtggagttgaatctgtgagttcacctgttgcattgcaagacaagctggaacttgtaatctcaacaattagattgcagggtgcctgaggttaatttgtgtacacttttttttagtgtagctagcaaagactacaagtaatgctttttatattagtataggtgattaattagctctaagtacaatatgatgatgcaacacgcaggcatgcatgtctaaacagctgtgcttagcttcaagtatggaaatagcttgagcatcacttcttcaacaggttgcattgacaaatactccctccgtcccaaaataagtgcagttttgcactatttatcttcaatgtttgattatgtttgatttttcgtcttatttaaaaaaaattatgattactatttttattgttattagatgataaaacatgaatagtactttatgtgtgactacttttaaaaaataattcataaatttttcaaataaaacggacggtcaaacattggacactttaggatggacgtagtatttttcattttcagaatcttaaatgcatttgtccatgaaaacatctttcgtggaaaagatgtcagaagcttttatctaagaatctcgctgaatcatcatgtttaagtcgatcacatcagctgcatatatctgtcaacagaagaacagaacaggttgaaaaaaaaaaagctgaagttgatactacctccgtttctaaatatttgacaccgttaacgttttagcatatgtttgaccgttcgtcttattcaaaaacttttatgaaatatttaaaactatatatatacatataagtatatttaacaatgaatgaaaaaaactaataattacttaaattttttgaataagacgaacggtcaaacatatttaaaaaagtcaacagcgtcaaatatttagaatcggagagagtattttttactagaaacatcaagaacactagtagcacttattcagaatgagcactgttgaaaatgtggtgctcttattgagaatttcacaagagcaacacgaacagagactctatcatacatcaacctaggagacgcccaggttggcagctaatatcaaacaagatgtttaaagctttgctgcaggactccgatgtacaaagtactgaaaaccatggatcatctaggtacagggaaaagaagatagaagaaagcacatcagtaccataaaagttaccacacacagcagaagcatcgatctatctacactcagccaaaccacctgaaagaacagggggggcaagcagcatgccttgcatcaagcttatctgaacggtctacggcacaacctggcataggtgcctctggaggaagaattcagtcagcaactgtaactaatccttggtttatttttctagttcagcatgttgagtcgcgaaagaattcggtcggtattgagggtgggcagggcttcttcgccacaaatttgtactgcagaaacaaaggtacaggaggcagcattaggaacagtacagataactgaagaaatggggaggatatgcagtttataccttatgttgggtatacttctccctgattgcaggaaggttactcccaggaccaacacagaaaaggcggtgcaatgccttaacgcagtcgcttaactctgacgacttgtattgtgtgtagtgagcaagggtggaattctgcttccaatttacaatgagaagcatatgttagctcttgtatttttttatttgaatgttgatataaaagatgtatggaaagttcaatatgatgatgccaccacgtacccaagggtgctttgctggctgcagtatgaatttggccaggaaaatagctgatgccgctactagtgaaggagggtaagaaagtagattgtactccagcagtgatagctcagcaacataattggctaggaactcaagatgcaatgctggatcctgcacgatgaaaagctgttaatgcaatgcagcatataaatagtatgaaattgcagcaagcaggagatgattaagagagcagcacctcatcagatacttgtgcaacacggacaaatctcctgttgtaggcaagaagatagttattagagttcgattcattccagcattatagacatcgatgagatgaaagagaatagaacctcaaaaagcattttgctgtaggtgcagtcatttcaaacttcaggtaattcaggacagaagcttccatttccaaaacctgacaatctatgtgttagtcatggagataaacatagaaatgttcacagatatgcaaaacaaacctcatctctgaagtatgtgttgtcagttatatagcagaattcttctacttgaggtgcacatatctccttgtattttctgatataggaacaagccaaaatcagtacacaaaactcagatgcaaactgagaaacacatttaaaaaaattgctaatcagatcttacgcagcaataagcatacaagcaactccaagtaattgcagtctttgacgattgatctcattgccagaaagataacggtcaatgtagttaactgtcaggtataatgtatcaggaacaagacgatattcttcagcgacctgcacaaaggaaaagcacaaatagagtggtaagtaacgattgtggtctttaggctccaatcaactaaaaaaatttgttcggtataaaagcttacttccacaagccagtctatcaggatcgctctcatgcttgggtttacatccttttggagtgtttccataaaatcggttgatggatgtttcctggtctgcttcaagtcaaatagaaaatcacaatgtaaatatgaaattcaacctagatttgaaaccactgtgctcaggtcagattaattgtcatttgatcaaactgactgcagtagtgcagtccatgtcacagcaaaaataatgagcaattgaaaaatacttcaagagcattgattacaacaattgaaatgtatcaattcatcggttcagtcaatgctttaagaagataactccattacaatttctccatattatactgtgcttctactggttctatagggaatttcaatatgatggccattaaatggaacccactattcagaaaaaaaaaagtattcaagaatgttttatgtaaggtgtttacataatatgcagaacaaaactactgaaaattgatggtcacaaagcatgtctggtagatgataaggtgcaccaacaaagcgaaaagcagaaaagaacggattgtggtgaaatgtgaaaaatatcctgataaattacattggaataatgccttatatcagtgatgtgcacttattctcttcttaatttatggtctcatcaaagtaaactttttttacttgtgtttcatatggatgcaatcaagtctcaaatcatgaggaagcaaaacaaagccttcctatgaaaacatactacaataaggtgctcaagggaaatgttttcagagaaataaggtttagtcaagaatgtattacctcggcctcgcgcaagtgcatgtagatatcagaagcaagagtagcacacaactgcggatcctcgtagttattgtcaacatcacaaatttggtcgatttccattggggaaggagcatccttcttccacttagtttctgcgaaacaaacaagggaaaagatcaatcaaccattccaatagaatgcaccatatagcacaaatttttctagctataactgtgcatttcagcaaccaaaacacaccttcaacatctctatcctctgagatacgcaggttctcgtttgctcttcgctgcaaggaacctagaactgaggaggaatccccattatcaatatactcaaagtctgggcttttcattgagtcgcacgtcgacatcgtctcatcaaccgaaactgaggccctgtttagatgggactaaaacttttaagtccctatcacatcggatgtttgaaaattaattataaatattaaacgtagactattaataaaacccatccataatcttggactaatttgcgagacgaatctaatgagcctaattaatccatgattagcctatgtgatgctacagtaaacattctctaattatagattaattaggcttaaaaaatttgtctcgtgaattagcttttatttatgtaattagttttgtaagtagtctatatttaatactctaaattagtgtctaaagacagggacttaagttaagtccctggaagtaaacaccacctgaatctcctgaatgcataggggagacgaagctgctgcagggtacagtgacaggtgcaggtgcagcagttggaacaattctaagcactttaggaggaagaactgactccttctgtggggcgctctcatggcgggatatggccgaagctggcttggtggaagctgatttcaccgccgagacccgattcgtgcccacattgcggccactggccaaagatcccttcttcacaggtgcagcccaggtagctgaattaaatttctgcaggaggattgaagacaagaaatcaatttagaacttatatttcaatctgttcatttgggattccagaccacaagcatgaaaaggaacaaatatttattagaaacattagcagcacgcaagtatcatattaccaatagaagattccaaagcaagcaaacatacaaaacacttagcgaataccaagaaagcttttattttgaacttctgaaggtgccaataaaccctcaagtgaatttagcctgttgacctggatgctccccaagaaatcaatcaatcaattaaccatgaaaagaaaccagaaaatcagcaagaaaaatcttgtggattggaataggagaatcctcaaaatcagcaaggaagaatgtggcagaggtccaaatttgaatgtgaagagcactgaaaaaccaaaaggcaagaatatattggggatggaagaggagaatcgtttgtaggctaaccaaggagaaattgaagaaatgaaaatcttgttgttggctgaaagaaagaactcaagaagacgaattcaagaaacactatttatatttgcttgaaaccaacagatcgaggagtatgtcctccacaaacaagatggaaaaaaaccaaaaaagaaaaaaatcatcacagatcgcttcggccatttccgcatcaacagcgactcacttgtgccccaagaggaaccaagaagcaaaaaaaaaaaaaaaaaaagccacccccaaaccattccaaccacctcacacaccaaaagatctccacccaaaccgcgcaaagcaaagaacaaatcttggagagaaaaaaaaaggaaaaaagaagaagaagaagcagcagcaagcgatccttcacgtaccgcattgttggcggcggcggcaacgttggtgatgttaccgagcgcgacgcgcttcttggccgccgcggcgcccgcggccgccttccctcctccctcccccgccgcgggccgcttcgccgccgacgacgacgacgagcggcgggaggctaggctgctcgacatcggccgacggcaaccaccacctgaaccctcctcctcctgctgctgctgcgagggttgcgagggcggcggcggccggcggggatcagaggcggagcagggcgagggcttggatccttcccttcccgacagaggaggggagagccggagaggagaggactcagaggagcggaggaggagaagagagaaaatggcgacgactctttcgattatttccagtttttggggaaaatattctaatccctcgaggatgttccctcgtttgctcaaaaaccatctaaacggttatgaaaaatactgaaaaaatttgacaacattcatacaacacatatatacaactctacaaaatcttaattccaaactcaactcacacgtcgagatataaaaagacaaattcagcgtatgaatagtagcgtactgtttatatctaaatttgtcttcttttgtttctcgatgtgtagatcgaatttgaacatgaattttggtggactagtaggtatcattatactctacattgttaatttttttcagaatttttcataactatttgtatcgaatttggaagaaaaaggtatacgaggggatatccctcgagggattagaatccactccccagtttttgggccgttacagttgttcaaatttcaaatagtagtaacaagttgttttagttattcgaccgttttatctgtctttctttttttcatgtcgtcgtggttgggttattacgttttc

SEQ ID NO: 7631 - DNA, 50327 bp, Oryza sativa
ggcacccctccctttccgcccccttcctcctcaaccacggcccacggcggcgagcagcaccctcgctcggcggcggcgccctccctctgcaggcgacgccctcccctcagccggcggcgccctctcctcggcagcatcattgtcttctccggcacagtggaggcaaccccttcccgttagtgcctcggcgataacatcctccttgcggcgcacggtggggcgctcgccaagccgccacgacctcggggcagcggcgtgcttgcctctgatgtgagcagtggcgccggtttttttgtgattttgtgattctcttgtttctttgcgtaattcttggatcggatcggatttgatctcttgttcaataatctgtattgcccgtacgggacgggtgcgagctggtcggagtgagatgcaatcttgcagactaatacggatgaaaaaattcctaggaaaataaaaaaaatggatggaagcggactttcctccttttgttttaattttttcgtcctttttggttattattacggacgaatttttttggaatccgacagatcttttttttttccacccgattgaatcggatcgatttttttcccttttgttaccgcgtcgactttttttttcgcccccgattttttttcacacggacgacggaaacatctcatactttttaagtagtagtatagtaagtatatatttttaattttcgaattaaaaactaattcattataagataagatttcataataaataaaaatctgttgaaaaaagagaaaaaaaatcgaaggcaaatataatttgacatgagggaagcaaactgtgcaagtaataaaaggtgtacaaatgagagaaaagtgggagtcgaacccgggtggccgaaatgaaaactttcatacctcaccaagtgggaagactactacatgtgggaagtgattacatggaaagtacatataccgtatcaaacgtgattttggagtagataaaaaaatatccgatcgggctgttaaccggattaaatccggatttagcgaagcgcgtggtaatgacggacgaaaaaaacatccggaaaatatatatatatatatatatatatatatatatatatatatatatatagagagagagagagagagttggacccatccaatcctactggtgaaatcaggtcagatgtaatccgaaccgtccacccatctccaccgcacgatttcaccctctccacgcgtgaagaccgagcgaagattacgggtctgtttggttgttgcctaacattgccataactcagtttgccataggtgtggcatggcaaacaaagtgtggccaacaatttgttggccacaagtgtggcaatgtttggctagaaaatgagtatatgacatgtagacccatgaaataagaaagtgtggcttgccacaactgaaacaagcaaccaaacgctaagctaacaatctgtagcatgcctaacatgtggtgtggcaatgtgtggcaccaaaccaaacagcccctacgcctcatcagtcatcaccctctcaacgcgcgactcactcctggcgttgtcgtccccttccgccgccggcgcgcactgaacgagaggcgaggtcttcccaccgctggagcttccccatccaccgcggccggccgcaggtccccatccgtcgcccggagccgacgtcgtccccaaccgccgccgccggagacaaggtcttcccgatgcgccgccgccgccgcagtccaccgctgcccatgaggtcgttcccttccgccgccgctgccgccgtcaccgcgcactgaaccggaggcgaggtcttccccagcccctgtcttcatcgtgcgcatccttgccgtgcgccatgtttagttgtcttcaccctcgacgcctcggagccggacgcccgctgcccaccaccacaccaccggacaacctctatccctgccgccctcctctccatcgtgtgcttgccttctttagcccgaggagagaggattcctaccacgtctttctgttgtgccagtatcctcatcgatgaatgattttaccacagcagcaaagcggttgccatctgctggtattatcccaggtttgcttttccgtctcctctccttctcaattcctttatgtgcccttgttcagattgcatttactttctctttctcctttctgctatcaaataggatcaatgaattgttccgtgaatgctaattatattatgagaatttttccccggcaaaaaaaaaaaacaaatgaaatctgtagcaatatgctatatattaatcttgaatttgtgagaatgtcaacattcaacctttcgactatgaccctatgtcacactgattcattgtcatatctgttgatttccaaatttgcttaatcgatacatgttaaaatgcaattccaatatatatgaaaaataacaaaattgataaaatgtttgattatgctctggaaattatacaaaatgaaaagctcaatctatatgtaaatcattgattctgggtacttattcaactacaaaaggcattgccccagatcccaactttcataactttattagtttgtcatttttgtttttgatccttgcacatgatgacagtacctctgaggtattgtttcactttcaccctaaatttacatgaaaaatcctaaatgcaatttgttttacctatgtaaatgatgcaagatgcaagtgtaggagctgaaaatttctctttcagggaccaagaagaatacaaacttaacagttaggtataatcataagattatatattgtgtttcattttgttatcattaaactgatccacatgatgttcaagtgattacacaagtgcatagattgttttaaaagttgggttcgatagatatgtagaattccatgccgccatcagtgatacctcgcaagcaagccacaatgtctgcacctaggccttcagcggctccagctactgcgtgctgcagatggtacccttccattacggtgagggggtcttctagattagctatcacggttttttttttcatgtttgtgcatgattggagtatctcttttttttcggctgtactgaaatttggtttgtgattaacctgtgaaagtatctgtttgcactgctcgatatcctttattttgaaagcgacatcccgaggaggaaggctcttgtgctaaagaaaatctttagttcctctccttccaattttttcggttcttctttttgttttgattaatgaaaccagaaattcttgaactgaaggaaaaacaggtagctctactgtgtttatggtctttcctgttgaagtaggaattcataggtgtgtggcaatgctcagcgattgcacaaggttgattctccacttctctgcatcagatcggatatatttcaattggttcgattttgatctatactgactcccttttagctaaaaccctgattactgataatatatatgttctactcagtgaaggggatgcaattagacttggaaatggagttagaaggcttaaaggttgctaatgtgatctgcatgatattatctcatgaaaaccaaacattgttttgccccttttatatattttgcccttaggattgaatcaatatttcagaatggacgaaggcatatatcctcttcaaagaatgaggtctcaagggatttggttgtcaatgtaaaatcacagatgaaacaatctttgttggtaagtaaatgcactttttgctgcattgactgggataatctcgatgaacaatgatgttgtttgctactttgattttaatgtagatcactgaattgccattctactatatatgaagcaatatttttaatgtgtaaaataccctaggtcatgtgcatgtttttttcctaagttcatgaataaaatctcacttctatgttagggtggctactagatccaatcctttggttttgtgtttcttatacacccaatgatattttttattttttttaggcttgggtacatgtacatgtttaatttttcttaatgtcaattagatatcatttgccaattaaaattcatgtagaaatacacctacctgaaccaacatattcaatcttccaatgcatgttacttcacaattttcggagctaggaatcttttagagctggacaaatccatttacattgagtgtttattataaaagaaatatattttcaatcactaagataatgataaaattctattatgtgtttgccgataagcccaggtggctgcccggggttgccaagcggtgtctccacctctgactccattcatgtaatcatgttcatggtctgctccattgagtttatttttactggatgcacatccttccattagtagttcttgcaagaaactgaaataagtaacagtcgtatagcattatgctgctagtatcttcagtaaagaatgtattgtcatttgcttacctcttttgtgttttcttcttctgatgcttagagacacaaaaacaagcgtgtacaaacgatggaaagagaataaactgtaattagtgatcaagattgcaccactcatcttttgccacaaacactgcaagagagattgatttacatatagtgaatgaatcaattctacagtcttgaagatttagctctaggttttctttagatggaatgtgcctcagatttagatttatgtacattttaagttgccaaaataaacaactaaatgaatctttacgcaaccacgccaaaggattcacctagatgcttcagtcaacatactatgacaagcagaacaacgtttattcttatcttttttatatagtaatatgcccttgctatataaaaataaaagcagaactacaatgtcttaaaagaaaaaaaaaaccatgttttttagccttggtctattgtcaatcatttgaatatgctttgcttataaatagatgattcatattcatacaatatttgctaatacgtgcattgcacgtgcacgattactagaacttattagccgtaccaatattttggtagtttagatagtacatgtgcttgtttggattgtgaccaatttattggtactgtccatgttagatttagcatcaatctagagcaacttcactataattcatatgttgactttatattggtagcaaaccaaatacaatcttgtcctacaaagaaattggtagtactaaaatttatctaagttttagcactaccaaaaaattggcatgtagcaatccaaataggcccctagttacttaaaaaattcattttagagtaaaatacactagcgttgcttaaacttgtaacgaggtctcacttaggtccacgaacttacaaaacgcgcattgaaatatctaaacttggtttaatatatcatcccagtccaaaaccttgtttgatcgtggtcttgcttacgtggcatgccgcgtggatgatgacatgatttttttttctcccttcttcctttttttttgtgggtagataaggagaacctacaaaacgacggaacacgtccatattcacatagtgaaacacgatcagactatcttaggcggaaggatgagtatgaacgctgaattgatgcagaagctttagaatgcaaggtaaatcctctgggactcgtgtcgtgaacatccagagtgtcattgtggtgaccgttgtcaggtaataaggtatgtaaggcaacgaacttgaggacaaagatgcttcgtgtgtcctaacattgtcgatgatgatttcatcataagtatcaattctttcggtaccactaatcactactatcatgcacttacccgtccctataaaattgtaccaataggaggatgtaaggaattgtcaattcatacaatggatcgatacggtcagagttacttccaatggtcaaaccataacgcaacatgagacgaccactgttggtaattcttacggttacagataaaatccgcaagcgcacggatataccgatgtagcacttcccctacggagtattccaaagggtatcgaatccaagagaacgtgtgtggtcagatcttcctccggttcatccaaggacaccaagctaaagataggccaggatagagaggatatactggtgagaaacagtgtctagggaaagcttaagtttattcctaatgcaatacttcaggcactggcaacccgctcttcccaaatgtcgctctactacatacccggatagggaggacttaagtgatctcgagggctgtcaccacctctacacctacctcaaacgtattgtgggatacgcaacaattattggataataattacctaaacaccacgtctaagaaattaatatctacttcagtgtttataactcactaaagcaatcactatattttagttgattatagtgaacaataatcccgtatgctatttaggaactaaccaagaaataattctcacaagataaatctaaattactcaggaagaatattatattaaaatcagagtaataaatagaataaaagaaatgagagaagattaccaacaactccggaattcttccgacttcttctactctactctcttcctattctagtatacaatatagtacaatggagcctcttataattcagctcaagcttggaagtgtgtgtgaaagtgaaggagtgaagctccttttatagggcagttatgacggttgtgagaaggggaaatgtccgaactgccccgcaaccgtcatgaggagagcatctggagcgtccacgccaaaccctaggatcaacggtgatcagaggagtttggccgaaccagggagtttagccgaaccagatcaacggtgatcagaggagcgaacctgggctgggccatccggggctggccttcggcttgtggactcccctgactctccatttctcggagttttggggtgagtctttgatattttgatgaagttcacaacccatcctcgtatggatacatgtttcttttcacttctagatttcctcccaacttcggggtttaacacctgcatacaaatatacactaacacttgtgaaatatgtgagattaaacacctatctctatgttggatgttttattatctggtagatgttggtggtatagaatcgacatttaatagccgccaacaaccacacatttcatttaggcttggatagagtacgaacatcgggtacaaattgcaagcttagactgtaggaacaatccattagatttacctaaatggtatgagtatccaaagtgtggttgtagagatcgctgctaggtggctaccgcctttgatattgtggatccacaaagtgaatccgcacctccttgtattgccctgagcaataaatatagttgtcatggcgaaaagataattgattttgaaatagaagtagagtaccaacgattgaaggagaatgaaaatgcaatatggactgacgaacgatggtgaggaccttcttttgcggaggcgattgtgaggcggcctaatggcgatctggcctccatgggggatctctccttcgcggacaagtgggatttctcactgggattggattttgcctcccagatttggtctcgtctccgatcaccggttaatttttcccgctctccctcatccgctttccatttggtggtttgtttttcacatttctccttccggctttctatggattctatggctattgccctcaattgctgtcttcggggaaatccaatgattttcgggttcgacatctccaaaattcctgttatagtttttggtgtcagataggaaggtaggtctctggatgtactccttgaaatctttccaaaataagttcttcaagcttcattttcacttatggaggaatggaggtcctgattggtaccgtgagtacacactatgggttcttgaagaggaaaattcttggactaaagttggtagaaaatcaaaacccatctcaaatggtgtcattcgacctggggtctcgtttgctaatgtgttttcctctgaacctactcggtctagagcagctgtactgattaaaaaagtttttgacaccatcaaggattccattcttgatcctaatcggccttccgttcttcctgtgaggaaattagtttttgactgtctggattttcctagacgaaatgttgttcaagtttctggcagtaatttgcttcacgatggatcttcgtccaaggcgggatctttgggctctttcaaatgttcaaagtgtcttgctaccggtcattctaggtctgattgtcacttccgtgtttgtttcaaagcctgctttgcttatgggcataaggcccgttactgtttggcccagagtaagaagaaggccttgacgaagtgggtagttaaggggagcaccgggaataaaacaagtcacttccgtcgtttcatctcttgctccatctctaccacaagcaaagcgacctctccttatccaatctgcaaaacccacttcgccgaagggccgcattgatcagagttccgctcccatggcagatgtgcagttcaacctggcacgctttactcctctaggtctgcatctccaggaaggtagccctttccgtctgcctagagcggacttgtcggtcaaaccccctactaggcgacatgaatgctataagctagcagaggttgagccagcgattcatgaggatattttcgatgtccataggattcagattagaaatcatctttagaatgagttgggcattgttgttggtcattgttctccccatctgttggcagtgggcttgtttgcagttcgttctcctctggttagggataccttggtcgaggcttttggtttccaatacagtaagttccacactgttcacttccgccatcatggtaggggttctaactggcgggcggctcatacaaaccgaagaggttgggtgatgtttttgggttatccgcttgatttccgtaatcagcattacatcaataaagaggtgagcctttttggtcgattggtggattggcaggagagggatcccattccaggtagtgttatgctcagagctgtgtttgatgacattgacgcagtaccgagagtatttttgctcaaggagttgcccctgagaggtggcctaggacagtcatggacctttggggtctttgttctcaacactgaatttgctgacattcatcttggtgatgaagacctccctcctttgatggttcaccttcaagaacctacgcaacagcataacgatcacatggatatgcagccagatgctccaccacaacatgatcagccctgggggaattgggatcagcaaggggagaataaccctgaaaatactggaaactcaggaataagtgctggccccaaccaaaatttggccatgtctattttggagaatgaagcttcccctgtgttctttgtgctagattctgttcagggcaaaatccaagaagtagtccttaggaatcaggttctaaggcaactgtcaaattgaattcaggggcctccaactgttctgttggttcatgcccctttcattagcttggtgctcccaagaagaaatgttgcttttgattctttgccgctagtttatcactcttcacagttgcccctggtggtcgttcaacctttgggccatgatgaggatatggaccatgacatgggctctcccctgggccatgatgagatctttgatgttcaacccttggcaatttcagagccactagaccaggcccagcccaagagcccaccaagaatcggaccagtgcctctcctgttagaacccccaagagcatcagttaagaagagagatggcaagactgtcatgtttgatcctgacaggaggcagagttctcggttgagatcttcaagtcaagagctcactcaacctgaccctagaatgggcatagggaagccgaggggaaagtctgccaaaaaactgaaagagctggtaggtatctcaaacattttaactggcaatagttctttatcggcttctgattttcattctgatttagatgaagaatgtttctctacatctgattcctctccttctgactgttcaatatctttactcgtgtcattagtaccatttccctggatcaagtagtctggtactcacgattacattgctgaaatatcaagtgcgcatacaaagattgtctagcacgaattattacatcataggcccgcaggcatagtctagaacataggaccgaacggtccggaatacattcaaaagcagaaatagataaggcagcggaatttaggcagcggccacaccattgccacaagcaatgaccgtaactaagacctacggagcgttgtcatcctccgcatcctcctgaagataagcatagggatcctcctcgacttcattgccatccactgattaaattttgtaacagcaagagtgagtaccaaccgtacccagcaagccaccacaacaacaatgcatatgatagaggtattcaaagtatggctattggtttatttgcgtaaagctaatttctcaatccttttcacaagtctaagacctagcattgactagtcaagttttaattccagtatttattacacagcaacggttctgttcaccatccattgtcttccgaaagatggcttcccgctactggccgtcatggttttctgggttttatcccttctcgcctctcgagaagttgctccaccagtataaaatcatcatgcatcatctcacccaatcagtttaagaatttagagtctagccaagtgtagtacatgtcccggtgctcaataaccgcgagcacggctattctaatagatttggtttactcacactaagtggatgtacactttatccatacttcgtgacttgcccaacacatgagccgaagtcccaacgaatgagacgcgtcacggcaaagcatttcaataacctcactttggcagtacccactccatgaactttagtccttattcactctaggcgtccaaagtttcaagcagtgagaggagttctggcgctcccgagggggaaggactcacacattcattaagttatagttaagtttagatttgcacatggcagtcctaccgatggcgacaccactgtaggcccccgcccctcgtggtcctaccaatggctgcctcaccgtaggcccctgcctcctatacacatcaagaactccactacagcttgggtaccgcctccgctcggttatttactccgctaggtctatacccaaacgagaagtacagttgtacttgggtcgtttcatgcttaacttcatggcactagcctttatcggactccacccaagtcatccagccgccctagtcgaaaacatttattcattataatttttctttcacaaatcatttcatccatgtcatggtaatgtggcgcgcatgtctccacataccgaatctcaactaccttccctaaggtagttgcccaagcatataacatttgataaatatgagaatgcatgattctgatttagcatgactaagcatttgtcaaatattgactaaagacacacgatagcatggtttacaatggtcatacaattattcaatatcaaggcatggcatatagcaaataggacattcttattcatacatagcatgcaaattttattatttaaatcaacataattttcgcaataggttcaacatgctcaaagattagtgatgacttgcctggatcacagtcttgttgtccctgctcctcaatcgactcaacacaattccctcggaatctaaatttacgtgcgaaagatcggatttgaattcaattagaattcaaataaaatcaacaaaaattcaaacagtacaaagtaaattgagaaagtggtcccatcagatagatcttgattttagatgaatttaggttcaagtttcattcaaatccgagttaaaatgagtgagttatgagggtttaaagattcaaatttgaattaattcaagaaattatgaaaagttactgttcctaattcatttatttttattctaactcaaatcaataagccacagaggctgacacgtaggccattcaccaatttctttgctcggttttattttcctaaagaaaatgcggtgtcactgataggagggtccgaccccttgtaaacaaaggtgtagccctgccctttaatcaccggtgtgacccgcatgtcattgagacaatcactaaaaactccatttaattagatttctaagcatccgggcccacatgtcattgattcataataataccattagttagggattactgtgcactaatgaagtgggttccacatgtcataatctctctgtctcgttctttctccctcccccatcgtcttcttcctctcgctcgcgacggagcagaggagcggcgcccgtgctgcgcgacggcccgagccgggacgactcggcacgcggtgggcgagcggcgacgcaccaccggatacccgcttgcggcggcgcaccaccggatacccgcttgcggcggcggcgaagcgcggcgatcgcccgacacgcgacacgatggcgcgcggcggcgccaagatcccaaaaatggcggcggcacaatggggaccgattcgagcgctggcgacctcgatttaaccatctaggggtcacatggagtatataaaagcaaaattctagcctatgctacattggaacgaggtccctccatggcgagctcgatcatggcgcgatggcggccggagtcggcacggctatgacggcgagggcttaccacggagtggcgggatggcgaagttcgatggcgcgcggcgcggtgtggccgaaacaggggcagccggcggttggtgactgtcgcaggtgttcaactcccggtcttccttgttcagcggctcccggctcccaccaacagcagcaacggcaatgcgagcacctcctctgcacaccccgccacccacaccggccgagaggccccgcggcggcggcgcagccccgcccaccaggtgtttgacacccggcagcgacgcgatttcgtttctctgagatggagcaagagttttaggggagagggaagcaaatgggagattggttttggatgaggatgagctaggggtgagcttataacagcgggagggagggcgattccttaatggataaggataatcgatcacgtagctttgtttcgatctcttccaggtttcggttcaatgcactggcgcggcctgattacctattcggtagggtcgcaggagaggggggaagctaactgtgggatatggcgccacattacccagtagtctcatccgggggtgacagaatggcaacgcaacagtgatacgatggcgacaagagcgacggcgacggccagtggtaacggccgcggtagggaggcgcagggctacgccttatggtgacgcgggggtgtcgtggcggccgttaaccctcaattcccgatggcgactcgcgaggagacgttatgacgcgggcgttcgtggcggcgcagccttggcgcgagttttcagcggctcggtcggcggcgggcccacgcggcgtggcgcgacgcggtgcggcacacgggcacgaccagtgcagtgcacgagtcggaaaggcaggtgcgcggcatggcagtggttggagagggcgacgtcgggtgttcggtcgggttaggcccagatcgagcacctggcgcgcaatgaacagtgtcgacccaagaaaaatcaaaattagggctttccttagactttttgtgtgattaatttttagatgattcaatctgtatacttcttttgggtatttaccttatttcaacacttccaattttgtgatttattgcatcctatgttaataattaatattctaatttcaacatatgtttcttttgtcccgcattttctaggttttagtatttgtctttccatatcaacatattttttcttctcatattcatcaatggaaacaatatgttttgcaacagagaaacgaataacaccagcatgatgcaaaagttttaaaatgttcgaaattttagtgatttttattatcagagattttcaggatgttacactggtctcttttgttcaatccaggtttaaatggagaatagttatattttatagtaaaaagtacgaattaccccgctgatctattgtgtgagtatgaattacccccctaaacccgaaaaccagttattttgcaccctcaactatcgataccgtatgaaaaaccccccccgaacagctttgcaagcggttttggtgtacgtggcagtccagtcagcaagtttttattaaaaaaatatagggcccacctgtcagatatcgaagtagccgataaatgatatgttcttcaatcttgtggaaagttgaatccttgtatggttgtatgaaatgatcgatttttgatgcccagtgcacaatcaatttgatgtaattattttccgttaaagaaaagttagtagtttgctgtaacagagtgtcaccgtcaccgcctctgccgacttcgccgccgccaccgctaccgccattgccgactttgccgccgctactgccgccatcgccgactccgctagcgccgccactgctgcgaccatagccacacgatataagcaattatgtggacatcgatgtcgaaacaagatttcggcaattctaaaaaggggtggctatcaagctggaaaagtggatgggtttggagacaagaaatttttatacaggttcaggccttcttattcaagaagtaataccctactcctgtccggggatgattccgccgagtgtattattgatcgtatgatctgggagaaaatcgtgtcccaagaaagacccggacccctccttatataggggaaggggtccgtattacaaaatacagtccatatccctaacagaatacgggattacagataaaatacaatcgtaaccgactaagaccccgggtactttcttgacgtacaagttaagaaacaaacccgagttcccataaagatattctatctatattcgataccttgtatcctacctaactataactgtcatgtagatatggggtatccataatctccacagtagcccccgagacctttgcagtcgacgaaattgtcttcttaaagcaaaaaacaataatccgagtgttttaattcttcctgctccagcctgccgagttttaaaatcaaagactgtaaagggcgaaaataaaacatggtgcatcgaatagatgcacctaattaggtgtagcccccgactatgtggttagttaaaaaactaaacatgtagtcaagaaccaagtggtttcacaaccaaacatcatatagcaaagcatacgcggcgttcaataaaatatccagccgactgctttttagctttaatatatcaagaatgataatatgaaaaagcccgagtgataaacactcaaaaggttcatgaataaacatatttgacgagaatccgagtaaaaacgcttaagatcatccatcaaatatgataagaatcatggcagttaacaagtctaatagcctaggctatgaccctcaccataaaaatgagcatataacatgccaagagaatgaccattagaaaactagtcatctcgaatcaacccaaacagcttttgcagcttaaaaaagcttacaaaaatagtataacacttttctgtcgggtgcctttttatttgcatcgtagtaattccaaagaattaaaaggattttaacagcatcgggtcactccattgtgagcacaaattgccaaagcaataatgcccaagtccctagggatcacaacgggccacgctgataataatattgggctgaagtactatgtaggcccaggcccattagcactcccgataccctagcgaaataaacgccgaagtcaaagcgtcgtttcgtcttccccgccgagaccctcgccactttccccatttcttgctacagtgcagaacttcaccggcgaaactagggttcaccaatccgcttcaatccatcctcaaaaactccacgaaatccttctacgcaaccaccacaccgattccccacccccttccagccatatcccgaactaaattaagccatccagttcatatccatggcggaagagagagaaagcttcgagagccaatgggcgccttccgatgtaacggaggaaaatctgatggagatggtggcgcacggcgttcttccagcaaaagagatcattgggtggcgaccggcatttggcgaagcattcccgacccccaacacgcatgaagtcgtggtattttctcatttcttctatggcggattttctcttccaacctcaagattctttcggggaattctgaatttctatgggattagcctgcatcacttgaacccaaactccatagtcgacattgccaactttattcatgcatgtgaagcttttttgggcattagaccacattttgccttgttccgccgcatcttcttactcaagccccaaccgaacaagagtaaaccatgtgttgttgggggcgccggtttccaactcaggggaactttgagccaaaaatacttttccatgcccttcaagacttcaaacaaaggctggcatgcaaattggttctatgttcaaaatcctgagcctgcactccccgagtactcctgtcttccttcggtctaccaggacacatggaattcattgcctatgggagatgaagctgctcaggccgtggaactgatggaacgtatgctgaagctcaaggagcaaggtttgcagggtgaacagatcactcgacacttcatcaaaagtcggttagctccaatcaaagagagatcccgcacggcttatgagtttgatggcaaacatgatccaaatcgcgaagatccggactccctggactttaaggtcatgaaagaaaggatgtacaagatcttctcaaatgccatcgtcgtcagttattcacatctactgccagttgtgccatataatgcattcaaccctcctccaccggtatgtgttaaaattcttcaactttcctcaaaatataattttgtcttcttgttgaatcagttaacagttgaagatattacgtctaggaattcgctttgatgaagtcagacccgccaatcgtccagcgccgatcacctcaccgtcaaactgttcaggggagcgggggaccaaagatctggtccgaatcccagcccaacacttctaatctagctggccagtcagattcccgcaagaggaagctagtgctgagtgacgacgaaggcgacgacggcaaaaaatctggagataaagaaacacccagaaaactgccgaagcaggctattccgaagaagaaaacatccagtcgccctatgccaaagatcagaaaatcttccaggtacaaatcatataacaatctcccctgttttgatgcgctcccagtatggaaataatactgataacaaaaacttgtaggaaaccgtctgatatagatccatctggaaaggactctgatccggctaacatggaaatgagttcttccaaagaaaccgggccgactgccaaaggtcatccgagtgacagccagccggcaaccgacaatgtagactctggtgatcaacctccgactggaaaccagtcagctgaagctgaaaccggagccagtcaggagcccccgactggaaaccagtcggaaacagggccaagccaagagattccagaggttgatgccagccctcgcagacaagatgccagcaatgactcgaagcctggatctccggctaaagcacaaggatcgactcgccctcgcccgggaatcatcacaggtaaacaccttgcctgagatcatgttgatccaaatgtccttaattgattggctgatctttatccatggatgcatcaggaccaatgattggtgacaaagaagaaattctctggatacgagcggctgaaaactcacgccctcccattctggtcaaatggtgggacgatgacttgcaacctcagggcattgtaataaaccgacaaaaggaggacgaagaggtgtgccaactgaaaaaggcactcggtcaagcaactcgtatcgtaaacgtaagttatttgactcaggacctctgctatcttgttcgcttcttagtgtgagcgctaataaagccattatgtagaggatccatcttaggaacgaggcgaagaccgcaaccctggagaagctagttcctcatcttggaacccttgaagctgtcagggatcaactgtacgaggcgaaagaacacgccaagaaaaccgagcacgatctaagagatcggatcgcccagctccaggaatctaacttcgaactgagtggctcgtcaaaaggtaaatacaaagtctgtccaactaactggtgcagtcatctccgtaatcttcaattaaccggagtcaatatagtgcaagccgccaagatgtctcaattggagaaacaaattcaaactctggagagcgataaagcagagctggcaagacagagggactcggccttgaaggacgttgaaggtaccatcaattgactcatttgagctatttaagctatccccttaaatgtttgcgtgttccaatggagaaagcagatcctgaacgtatagagcttcaagaagtttaacctatgtcgagaagccagtcagaatcttggaagtgagcgagaggaatacaggaaatcacgttatacggttctgtaaggttcagtggagcaatcattcagaagaagaagccacttgggagcgagaagatgaattgaagtcagctcatcctcatctcttcgccagttcttctgaatctcgaggacgagattccgtttaaggggggtaggtttgtcacgccctaaaaatcgcctaaattaaaaatgcatattttaaatcatttttagaaattattttaaaagcctacaagttaaactctaataatctaggaaaattttcaacataaaatcgagctagataaaattttattaaatactttgcttgttcctctattttctagatttttctgggaattatttgagcaagggaaatatttttaataaatgaaacaacatttcacaaattattttaattgaaaaagtataaaaaaaccctcccttaggttgttgggccgaattcggcccaacatcttctctctccgcgtgggcgagccggcccaagccggcccagccgacgccgcccgccccgtcctcctccagtcgctgacaggtggggcccacctgtcgggcccttcttcaacctccggccgagccggccgagctcgtccgagccgccgccttcctccaccaattccgccccaattcggtctccccgtgtccgattgattgaggggttttgatcccctcattctcctctatctttacccccaagattcggagcaaatcgttgtgtattttaaccgaatcgaattcgttttcaagtttatccccaaaaccaaccctagtttttcccggctcgattcctcgcggtaggagtccaatctctccaattcaaggctataaatagcatcccctagtcgccctctttcgtttgccccctttcccgagctctctagtgctccatagagtcgccgccgcgccgccctagccgccgccgtcgccggccgaccaccagccgcgccgtgccgtcgccttagccgtcgccgctgcctcctcgcgccgccgtcgggtgcgcgagactgaggggaagcccagccgccccttcgccgtcgtcgccgatcgccgtagcgccatcgccgccgtcaaccgatccaccgccgccgcacaagctcgccgccggctgtcatccgtcgtcgtttgtcgcttcggtgagcaccgttgagatcgcatcgttgccctctacgcgtaggtaccctgcaaaggcctggccgagcctcctagcgccggcgaggtcgtcgcctttgccaaggccggcatagatgacgtcagcatgacgtcataaccttttctttttagttttttttaatagatgaaatagattaaaacttcggaaaatcataactaattcagtagctccgattcgagtggttcaagttgctaaatttttctaaaattgagatctatatgttaaaaatatccacatgtactgtttatgcttgttttttattgttctgttgattttgtctttttgctctagtttccgatgttccggaggagagcgtttccattgaggaaggttcggaagtttttgtggaagctcaaggcaagtcacacaaatcctaaacaaccctgagcatgttgaacctgtttaaagctattgtcttatttcaacttatgcattattttttaatgtcatcgggtggtgaacctttcctagttaattaatggccgaagatgactttataaacctatgggttataatttgattagcttgggccttatatattggattggttcagctaaatgccatatgtatgtttgcttagtcatgcctagaaacattagctaattaatggtgacggagcgtggggctcctcaccgggagaccgcgcaggcccccctttgccggttcggccgggggcgctaagtgaggttcttcaccctcgatctgtgggatgttcgcgagagagcaaatgcacaagacacgggcgatgtagacaggttcgggccgctgagaagcgtaataccctactcctgtgttctggtggatctgtgtatgaagcagttacaaagaaacggagagcaagagagtttaaactctagaacccctctcctctcgttttggatgccctaccagttcaggtatcctctattctctgagttctctcctcatttctttcggtgggcaaggtcctccttttatatctcaaggggatcctacatgcaccacttctacctaatcttcttttgggtggggacccaccctatcttgaccaaaacttggctcgcgccttcgcctggaaactaaatcacagcttgtccttgagtgaggcccagcgccgacactcgcctgacacaggggatcactctgtcattccttcattaatgggcggagatttgcaatggctgctgtccgaatgacccttcgatgggatgggtcatacctacctccactccgccggatgcagacgcaacgtgggagcacagtttgtctgccgatgacgtgaccggcgtcagaccagtcatagaccggtcattcttgtccaccacgtgtcagtttagcatgccgcacgtctgcccttcttcatacagttacttccttgtaatggttgcgatgaagcctagcatgaatctagccgggactgacgtgctaactccaggagttaccacgccggccccggctagggacgagtgccaacaggctctcatcattccgacgggacggggcgaggcgtgcgacaggccgcctgtcgccccctaacccgcgatctgaccggcctgtgaccagtcacacactgcgaccggtcacggaccggataagcctgcgctgcgctgcattaaatgcggcgcggcgcactcctccaacccgcaataaatgcggttaggtgagccccgctgtgctcacctaacccatacaagtggcaccaaatcacaaggggtcagggcaccccagccctcggggccaaaacgggagcggcccgacccctcggggagacagagggaggggtggccacgtcaccctcgggcccgacccccccgagggggtcaggccacgtgggtgaccgcggctgcccaaacctctagtcacgatacccccggtcccatgtcaccgacaaatgggattatacataaaactatattatattattattaattatggttatatttaatggtagctcacgatggttaatcgtgttatgttatgttaattaattaataattaaaacctgcataaggtgggttgtgagcatatggttttgatggttgtgctcatgacaattaaggaccggttcgcgagctactgttgtgaaacatttaccgtgccaaccacaagccagcgtgggcaacggctttatcttttgtatagcatgactcattatagtgtgctagactgtgaagcggtgagaagtccattggggtcgctggggagtccattgcctctggttttgagggggagattataatccaggaacggtgcactgtggtgagttgtgttgtgcgaggggtattgtcacagttcctttccaaggtaccgtggtggtactgaggcgcatggtgacatgttgtgggattgtgtcttgtgggtacagtggtacacctctgattagagtaaaactattcgaatagctgtgcccgcggttatgggtgagttgagcaatgttttttgtgattagtcccacattattcattaatggtaattgtgctaatcaatttgactcctggtttggaatggtatattcctggtatggaggttggattagtacaaccggggttggttgttcagatgaggttgggcctatgcaacacgggtgtgttgtatggtgtttatctaatactgattaattattcaactgttgaactattctcttaaatatttattaaatgctgtttacacaaatgagctttattatgccatcctttgttattctgtgcacttgcatatttgctgtgtggcttgttaaatatgtcatatgctcattcttgcaatattcattcatcagaagaggagttcttcagtgaaggtgatgatctggaggactaggcttggtccgggttaagttgcctgtggagtggaatcgccatagctgttccgtagtttgctttagtttatttttccgctgcgtagaatgttattgtttgagaggaactatctacctctgtaatgatttattaattgcgaatattaaatagttgtttatttgtactctattatcaatttgttattgtgtgcctcggctgattcctggacgagggtttaacacacatgtaagcgtttggaattttggatagaaattccgggcgtgacaattctgttgatgtagaccgcaagatcaaatcacaagctctgttcgacgtcctggtcggcaaaatcaaaatgcttgaaggggccagggacgaagttgccaacgccgctactccactcgtccaagcaatgttctttaataacaacggtccgagtagattcgacgcttccgagatcttcgacaagctaagagtcgctccggatacatacttcaagaacatcaaggaagccgggagtatgtgagcaagtctggcgctggcgatgaccaaatccctgtacccaaagatcgatattgacgccattgatggctttgcagacgggacgagcaaagaagccactctcgatctcatcaacgatgcgcagaaagccgctgacaaaatagcagttgatgtagtagagagattccaggacaccgatcttcgaccgactggtcctgacagttctgatgatgaaaagactgacactgattgatgtatcaatgattttgatgatgagtgatggaggcacaatttgtacaatactgataaatttatgccgtgctcagtgtttcatacttagcttctgatttcttaaaagcctttgtcaagccttattgagcctaaaacccacaaaagctattaaaaactttcagtcctcatggactaagtcaaaaaatcaagcaaggcaataataaaccaaataagcaaattgaattgataaaaatcacactccattattattatagtagcccccgactgataacttcaaggggaagcttgatgttgtcagtaaacaaacttaagcataaaaacaacgaagatgttcgatattccaagagttgtcgataggtgtaccgtcttcgcgcttgagccgataggaacctggccgagtgacttcagatattataaatggcccttcccataaaggggataatttgtgccgatcccgtgtagttcgaattttcctcaaaaccaggtcgccgactaagaaagctcgcgatcggacgttacgattatgacaacgacgcaacccttgcaagtatcgggccgactgaattaaggctgcttcgcgggtctcttccagtcggtgtaggtcatccactcggtcttctccgtagcgctcttcacgaaaattgcgaaaacgcaaagattcaaactctacctcactaggcaacattgcttctgctccataaactaggaagaatggcgattggcccgtagcccgactgggggtggtgcgcaaggaccaaagtacggatggaagctgttccacccatttgccggcatagggatttagtcggtcaaaaactcgtgcctttattccttggagtaccatgccgttggcttgttcaacttgcccattgctcgtgggatgcgctacggaggcatagcagattttgataccgaagtcttcacaaaaatctttaaatactccgtcggtgagttgagtgccattatcagtgatgatctgattaggtaccccaaaccgatgcacaatattgatgaaaaagtctctggctttatctgccgtgattgtgatgaccggtttagcttcaatccacttggagaatttgtcgatagccacaaagaggtgtgtgtaaccgccgactgcctttttgaacgggccgaccatgtcaagcccccaaaccgcgaacggccaggacaacgggatggtttgtaactcttgggctggtagatgagtttgtctggcgaaaaattgacaaccttcgcatgtccgcacgatcttgtcggcatcggacacagcagtgggccagaaaaaaccttgccggtaagccttgccaccaatggtgcgtgtggcagcgtggttgccacagataccagaatgtatgtctttcagtaattgtctcccttcctctagggatactgttgacagaaaacacgaggcctgggagatctgcttaactccagtgcaggtccaaaactcaccttcggatgtgtgagcgtgccagttgatttgatcctgtaatcatcaagaaataaagacaaaggaaccgtggttaaatctataaatgatagccgatcggccagatgccgatgacatatcatttatattcgagccgatgtcatctgtgtatcgatcggcaatcgtagataagtaaggaaaaactaaatttacttgatcggctgtaaatattaacggtatataatccttatattgatgtttacttaaatcaagtgattgggatagatcggttatcacaccgagacagtataaatcacttagatcgaaatatacatccataacaggactatatatgtttatagcatagccgatcagatagatctagcatgtatcggctaatactccgatactactttgtattaagacgttgcaacaataatgatatgttgaacaatagtttaacacatttgaatatagcaataaagggcatatttaacatatcagcgaagcaaatagaataagtatggttaaatcagatacgatcggctgaaactccgatgctattctaattgacaactagatggcaggctagagatcaatattctaagcacgacttaatagatcaaactcaattgatgcagcattaagtatgaaaagaagaacaatatctagacaatcaagccgctagaagattcatagaatggtacatatcttatataatctaaatcaacgtcgagatctaacctaatcagctgtcttttgcatacaaatattagccgataatagattagataaagatattgttgaagattatgtaagatatatgataactcagcgaattatataaacgagattagagtgtcatgaagatgtaagcactaatccctaagaacataattcgtcataacgaattttacctcttgttgaagattgaaaccgatgcagctcaacccgaaagcaagaactcgtcgaaataaaacaaaagcaaaaggtggcgatgcgccggaattgtattgaatgtgtgtcttaaaattacatagggctcggggtctatttatactcgaggattacaagatatgcccataccggacataaccattatctctaacaaactctaaaatatcacaagtctctgcggcagacttttgcccatacttatctataaggaatttacataaatcatcctaattaatagatacaattgccttcccaggactctatccatgcgtggcaatcatcttgaagcacatcaacctgagcccgacgtcgcgcacaagttgtattgtcagaatcagctatatcagcttatttagcttaactcaaccttagccgatcctagccgtagccgatcctagccgtagccgatcctaactatagccgatctagactccagccgattcttgctctgttccagaactcgatctccgcctccaactcttctttgaccaaatcccctttcctgatacgaatacttaccaaattcggttgttaacagatacgcagcgttgcagaattcttgatggacttttcttgtacaaattggcctcatgaatgatgtaaagcctgctgcgcctggaaatccgctcagcttcgtctttatcttgagggagttcttgggaggtctgaaaccgtatgaggggctctctccagtcagcttcgaccatagctatgtcttgagtgtccgcggcttcagctgtttctctcttgggtacggttggctcataaagatgttcgacgaatacatcagaaggggccgcttcgtgtttggatccaaaattcgctagtctgtcggttgcttcgttattgtgccgaaaaacatgggtgagttcgagtccatcgaatttgtcctccaatttgcgtacctcttgtcgataagccatcatgttgtcatcgaggcaggaccactctttcataacttggttaacaaactaactgtgaatctccgcgaactatcagacgtctgatgcccaaagagattgcgatccgtagcccgtggaggagcgcctcgtactccgcgacattgtgagatgcagaaaaatgtatccatagcacatagctcaatctttctccagttggggaaattaaaacaactccggccccagtgcccgaaagtctctttgacccgtcaaaatgcatagtccagtactccatcttttcctcgggggtgtcctcttggcactcggtccacttggcaacaaagtcggctaaagcttgggacttcatcgaagttcgtggcttgaacgatatgtccaaggacatcagttctaaggcccattttgcaatccgtccgtttgcttcgcggttgataaaattcttattgattattatatatatattgtacgcactatatttgagataatacatcaatttataatttaacaaattatatttaggacacgagcgaaaatccgtgtaaacaaatgccccttcgagctgcggttgccaaaattttgcttttgcatccggagctcgaagcataattttggatctgcagggacgtggtgtgagctttatgctcacaactatgtgcccgctatttgaaagattgttgagaaaattaaggagcatctccccgattatttggtcacgttccctatcaccaggagcagtgaggcagttcgtttgctcttttaatcactaacccatccactactccagtctccagaggctagactccttcctcttcctcttcttctgtgtgaaggctttgaggaaagacatcaccggtggcagaatcaagggtaagaccctgctttgatcttgtgaactgaactggcgacccctttttcttactattttttttatttttcttattggctttcgtccctctgttctatttaggtttgtgctatgcacacacacctgaagatcctcgagttgatttcattgggtgcttggtgattcaggtgtggcaagtgaaaggtacgcatgaatcttcttaccatccttcaatccattcatttttttaatagatatgtcgatctctctgcacaacgttcatatttgatacgcctctgccaatataacttcctttaaccacattgtattgaattagttgttcgtatgatcggggttcccggacattttgtaatgttacacagccaatccacgttgttagatttgcatgtactccttcccatcacgattatttgatccaaagtactgaagtatcccgcgccaaataatatgactcggggggcaacaaatgaaacatgcacaacagttcaggaccttgagcatagaagaaataaatgatacaacctatgtcacttattatctacaacacattgacctctgtaataacagaatgacattatcaccatagatggtgaaacttccttgaaaacaagaattaatcgttatatctattcaggcaattttaagcattacgaattctcatcagatctacaacggtgcataacaaaaataaatgctacattattccactgtatgtaaacaaattagtgaaatgagtgaaataacagggggcagatccaacttgggacatgggggttcagttgaacccccccaaacttttgggggaacaacaaacaaactcaaactgttacttttattaaggttaaaggctctggaactaagagaagagcttcctccagatctacaagagaagctagggtttaggcaagcaaattccaagacagaagcatccccggtgagagagagagagagagagatgaatcatcagaaagaggatgcggatgctcaccaggatccccttgctcgccggatggagatcggcgaccctccccctcccctcccctgttcagccgcgaatggcgcaagaagcggatgagacgacgagacgggagattttttttctcttttacgcgaagggaagggggaagagatactcgagtactccacctttagctcagatttactatgttacccattatgagtagcaggccaaatgggcggcccggcccagcatagctcggacccgctgatggcacggcaactgtaatgggccgggccgtgccgtgccaggtcttgggcagaacggcccaaggaagtgttgggccgtgtcgggccggcacggctactgttgcatggaccggtggcccacccacctgcaagagaacgttattcgtgtgaaactacagtcgcaagttttctatagtaggtaacacaattaggcaaaattgtgtttatatgggtatttttcattgtcaatattgtgccattatagccgtgttaaaaatttccataatttcctttggcacaactaagagaggtttaaccttacgtcccgacccaagcattcgttgtagatatcctgaaacacgaggttcggacttcggacctgttttaaacttttcgaccgttggacacattttaaacttatcggccattagttataaatatatggtcttatatcacgttactccctcaaatattgaaaatatgttgatttggatacattttaaacttctcaacctttggacacattttgaacttctcgaccgttagttataaatatctggtatgtacgagagcaatggttttaatttttaaaacacaccgttttgcacaagttccaaactcccaaacggcctatcaaagtgctccatccggtcttaaaaacaaaggtcatgtttcctgcacaaaaatgttacaccctatcacatcgaacgtttgaagtattaaatataagctaaaaaaataactaattacacagattgcgactaatttgcgagacgaatcttttaagcctaattgctccatgattttgacaatgtggtgatataataaacatctgttaatgacggattaattaggtttaataaattagtctcgcggtttactgacggatactacaattagtttttttattagtgcccgaacaccccatgcgacaccctatataatacccgatgtgaaacgcaaaaactttacactcctggatctaaacacccccaaagttattttggatactacattccaagttcaaatataaaaatctaatagcatgtacaataatagactataagtcggctacaagcttatgtggtgaacataaagagaggagatagaaaagaagcaggctgcagatttgtagctagctgtagcacggactcctaaatgctacgtgtgtatgacaagtgggagcagtaattaatgatgtagtatatatttgtagttaactattgtataatttggctattagattatctataaataatttggagctagtagttggctatatactattaaaattcctctaagcggcaaaggccgtgttcgattattagtgttagaaactaaccctttgagcacgtaaaacgaaacggttcattaatgcataattaattaagtattagttatttcttaaaaatgagttaacatgattattcaaataactttcatacatacatacgttttaaaaaaaacgcaccgtttaaccgtttgaaaagcacacatgtgaaaaatgagatagataagtaggaaaatacgataaagaatacttcctccatatcaaaatataagccttttttttttgtttttgacttcgacacggttttaaagatgctacattgataaacgatattcataaaagtaaaatattttaaataaaaagagttacatactgtgatagtttgtttaatgctaaatctagtaatatcattttttttagattgatcttttttaatttattttttcttattaataatcaaaggacttgacactatacttaaaaaatacttatattttttatattttagtacggagggaatacaaagttaaaatccgtcatcttctatgacagaagtagtaacacgaaattaatttagctctacatccgttctgtttatgaataacggtcgaaaacgtaataacccaaccacgacgacatgaaaaaaagaaagacagataaaacggtcgaataactaaaacaagttgctactactatttgaaatttgaacaactgtaacggcccaaaaactggggagtggattctaatccctcgagggatatcccctcgtatacctttttcttccaaattcgatacaaatagttatgaaaaattctgaaaaaaattaacaatgtagagtataatgatacctactagtccaccaaaattcatgttcaaattcgatctacacatcgagaaacaaaagaagacaaatttagatataaacagtacgctactattcatacgctgaatttgtctttttatatctcgacgtgtgagttgagtttggaattaagattttgtagagttgtatatatgtgttgtatgaatgttgtcaaattttttcagtatttttcataaccgtttagatggtttttgagcaaacgagggaacatcctcgagggattagaatattttccccaaaaactggaaataatcgaaagagtcgtcgccattttctctcttctcctcctccgctcctctgagtcctctcctctccggctctcccctcctctgtcgggaagggaaggatccaagccctcgccctgctccgcctctgatccccgccggccgccgccgccctcgcaaccctcgcagcagcagcaggaggaggagggttcaggtggtggttgccgtcggccgatgtcgagcagcctagcctcccgccgctcgtcgtcgtcgtcggcggcgaagcggcccgcggcgggggagggaggagggaaggcggccgcgggcgccgcggcggccaagaagcgcgtcgcgctcggtaacatcaccaacgttgccgccgccgccaacaatgcggtacgtgaaggatcgcttgctgctgcttcttcttcttcttttttcctttttttttctctccaagatttgttctttgctttgcgcggtttgggtggagatcttttggtgtgtgaggtggttggaatggtttgggggtggctttttttttttttttttttgcttcttggttcctcttggggcacaagtgagtcgctgttgatgcggaaatggccgaagcgatctgtgtatgatttttttcttttttggtttttttccatcttgtttgtggaggacatacgcctcgatctgttggtttcaagcaaatataaatagtgtttcttgaattcgtcttcttgagttctttctttcagccaacaacaagattttcatttcttcaatttctccttggttagcctacaaacgattctcctcttccaatccccaatatattcttgccttttggtttttcagtgctcttcacattcaaatttggacctctgccacattcttccttgctgattttgaggattctcctattccaatccacaagatttttcttgctgattttctggtttcttttcatggttaattgattgattgatttcttggggagcatccaggtcaacaggctaaattcacttgagggtttattggcaccttcagaagttcaaaataaaagctttcttggtattcgctaagtgttttgtatgtttgcttgctttggaatcttctattggtaatatgatacttgcgtgctgctaatgtttctaataaatatttgttccttttcatgcttgtggtctggaatcccaaatgaacagattgaaatataagttctaaattgatttcttgtcttcaatcctcctgcagaaatttaattcagctacctgggctgcacctgtgaagaagggatctttggccagtggccgcaatgtgggcacgaatcgggtctcggcggtgaaatcagcttccaccaagccagcttcggccatatcccgccatgagagcgccccacagaaggagtcagttcttcctcctaaagtgcttagaattgttccaactgctgcacctgcacctgtcactgtaccctgcagcagcttcgtctcccctatgcattcaggagattcaggtggtgtttacttccagggacttaacttaagtccctgtctttagacactaatttagagtattaaatatagactacttacaaaactaattacataaataaaagctaattcacgagacaaattttttaagcctaattaatctataattagagaatgtttactgtagcatcacataggctaatcatggattaattaggctcattagattcgtctcgcaaattagtccaagattatggatgggttttattaatagtctacgtttaatatttataattaattttcaaacatccgatgtgatagggacttaaaagttttagtcccatctaaacagggcctcagtttcggttgatgagacgatgtcgacgtgcgactcaatgaaaagcccagactttgagtatattgataatggggattcctcctcagttctaggttccttgcagcgaagagcaaacgagaacctgcgtatctcagaggatagagatgttgaaggtgtgttttggttgctgaaatgcacagttatagctagaaaaatttgtgctatatggtgcattctattggaatggttgattgatcttttcccttgtttgtttcgcagaaactaagtggaagaaggatgctccttccccaatggaaatcgaccaaatttgtgatgttgacaataactacgaggatccgcagttgtgtgctactcttgcttctgatatctacatgcacttgcgcgaggccgaggtaatacattcttgactaaaccttatttctctgaaaacatttcccttgagcaccttattgtagtatgttttcataggaaggctttgttttgcttcctcatgatttgagacttgattgcatccatatgaaacacaagtaaaaaaagtttactttgatgagaccataaattaagaagagaataagtgcacatcactgatataaggcattattccaatgtaatttatcaggatatttttcacatttcaccacaatccgttcttttctgcttttcgctttgttggtgcaccttatcatctaccagacatgctttgtgaccatcaattttcagtagttttgttctgcatattatgtaaacaccttacataaaacattcttgaatacttttttttttctgaatagtgggttccatttaatggccatcatattgaaattccctatagaaccagtagaagcacagtataatatggagaaattgtaatggagttatcttcttaaagcattgactgaaccgatgaattgatacatttcaattgttgtaatcaatgctcttgaagtatttttcaattgctcattatttttgctgtgacatggactgcactactgcagtcagtttgatcaaatgacaattaatctgacctgagcacagtggtttcaaatctaggttgaatttcatatttacattgtgattttctatttgacttgaagcagaccaggaaacatccatcaaccgattttatggaaacactccaaaaggatgtaaacccaagcatgagagcgatcctgatagactggcttgtggaagtaagcttttataccgaacaaatttttttagttgattggagcctaaagaccacaatcgttacttaccactctatttgtgcttttcctttgtgcaggtcgctgaagaatatcgtcttgttcctgatacattatacctgacagttaactacattgaccgttatctttctggcaatgagatcaatcgtcaaagactgcaattacttggagttgcttgtatgcttattgctgcgtaagatctgattagcaatttttttaaatgtgtttctcagtttgcatctgagttttgtgtactgattttggcttgttcctatatcagaaaatacaaggagatatgtgcacctcaagtagaagaattctgctatataactgacaacacatacttcagagatgaggtttgttttgcatatctgtgaacatttctatgtttatctccatgactaacacatagattgtcaggttttggaaatggaagcttctgtcctgaattacctgaagtttgaaatgactgcacctacagcaaaatgctttttgaggttctattctctttcatctcatcgatgtctataatgctggaatgaatcgaactctaataactatcttcttgcctacaacaggagatttgtccgtgttgcacaagtatctgatgaggtgctgctctcttaatcatctcctgcttgctgcaatttcatactatttatatgctgcattgcattaacagcttttcatcgtgcaggatccagcattgcatcttgagttcctagccaattatgttgctgagctatcactgctggagtacaatctactttcttaccctccttcactagtagcggcatcagctattttcctggccaaattcatactgcagccagcaaagcacccttgggtacgtggtggcatcatcatattgaactttccatacatcttttatatcaacattcaaataaaaaaattacaagagctaacatatgcttctcattgtaaattggaagcagaattccacccttgctcactacacacaatacaagtcgtcagagttaagcgactgcgttaaggcattgcaccgccttttctgtgttggtcctgggagtaaccttcctgcaatcagggagaagtatacccaacataaggtataaactgcatatcctccccatttcttcagttatctgtactgttcctaatgctgcctcctgtacctttgtttctgcagtacaaatttgtggcgaagaagccctgcccaccctcaataccgaccgaattctttcgcgactcaacatgctgaactagaaaaataaaccaaggattagttacagttgctgactgaattcttcctccagaggcacctatgccaggttgtgccgtagaccgttcagataagcttgatgcaaggcatgctgcttgccccccctgttctttcaggtggtttggctgagtgtagatagatcgatgcttctgctgtgtgtggtaacttttatggtactgatgtgctttcttctatcttcttttccctgtacctagatgatccatggttttcagtactttgtacatcggagtcctgcagcaaagctttaaacatcttgtttgatattagctgccaacctgggcgtctcctaggttgatgtatgatagagtctctgttcgtgttgctcttgtgaaattctcaataagagcaccacattttcaacagtgctcattctgaataagtgctactagtgttcttgatgtttctagtaaaaaatactctctccgattctaaatatttgacgctgttgacttttttaaatatgtttgaccgttcgtcttattcaaaaaatttaagtaattattagtttttttcattcattgttaaatatacttatatgtatatatatagttttaaatatttcataaaagtttttgaataagacgaacggtcaaacatatgctaaaacgttaacggtgtcaaatatttagaaacggaggtagtatcaacttcagctttttttttttcaacctgttctgttcttctgttgacagatatatgcagctgatgtgatcgacttaaacatgatgattcagcgagattcttagataaaagcttctgacatcttttccacgaaagatgttttcatggacaaatgcatttaagattctgaaaatgaaaaatactacgtccatcctaaagtgtccaatgtttgaccgtccgttttatttgaaaaatttatgaattattttttaaaagtagtcacacataaagtactattcatgttttatcatctaataacaataaaaatagtaatcataattttttttaaataagacgaaaaatcaaacataatcaaacattgaagataaatagtgcaaaactgcacttattttgggacggagggagtatttgtcaatgcaacctgttgaagaagtgatgctcaagctatttccatacttgaagctaagcacagctgtttagacatgcatgcctgcgtgttgcatcatcatattgtacttagagctaattaatcacctatactaatataaaaagcattacttgtagtctttgctagctacactaaaaaaaagtgtacacaaattaacctcaggcaccctgcaatctaattgttgagattacaagttccagcttgtcttgcaatgcaacaggtgaactcacagattcaactccaccttggccctggcaaacgcggcggtgtgctagcaactacacgttccaaaatataaaaacctataatcggatgagacatttttttctggtactaagaatcggccaatccagattctcgtctcgctggagtctcatcctcgtctcactggagtctggaatctatagcaacgttgtttacagtagagttaacagaaattatcaccgtctaattaacttgctactgctttacaaaacgggagacaatcagacaacgccggggtgggttgaaaaggaagaaaatgcaagcacaggcaaatgccgacgataagatgactagatgagcaaggctactccctggggaaaaggctttgcttgccatggattgcaacacaagattaaaaaaaaattacaatacagaaagaatgattcgaagcatgagtctagcaaggttaaatcatcactgagctaggcctacaacatgtcgagttagaagtcctcttcgtcgtccagatctggatcatttgatggccgtattctcttgccgtctctccctccagggcgacctcccttctttggttttcctctgtccaaacacacgaggggtcagaactaggcaattctactaagggtgtgtttagttcacgctaaaattggaagtttggttgaaattggaacaatgtgacggaaaagttggaagtttgtgcgtgtaggaaagttttgatgtgatggaaaagttggaagtttgaagaaaaagtttggaactaaacaagggctaaaagggttgttcctagaaacactgttttttttaatataaagaagtgttagacaaacactgccccttgcaaggatgtatgtaaagctgataaggatagcacattttttgccacaaaggtaatctgagcacttactgcccgtttgcaggagtggttgcacctttcgaacgacctgatccatattctcttccatctgccaggatgcagctagtattgagcccagagtctcaattgttcctggtttcagcttaatgaaaacaagaaagagaacttaccatctcgtccagccatatgttcatcgacctggaatgaatagaaaataatggtatgtattagcaaactcacaaatatcagtatagcacagggggaataacaatcatcaatcaaagcaaaccaaaagattaaaaaaggggcacgggcttttcagtgcattaggatttaggatcattagtcataccgctggagatgtaaccgatgacagggagaacagcctctcatcagcctggaacttcctggagcgcttgagactgaaaataataagatagaaactgtcataactaattctgtgtgatctattagcagaacagaaatgataaaacatttgcttgtgcagaataatgaacacgcaacattatgccaatggtaatcataaatccaaccctcccttggtgatgctagatagtgcatatagagcacccctgcaattggccaataaactgacataacactatcatagcatattttgggttatgaatctgttgtataatacctgccactgccactatagtgatcagaggatcttttgttcatctgatcattagtaaattatatgtgatcagaggatcttttgttcaacatcattcatctgatcattagtaaattatatgtgatcagaggatcttttgttcaatatctataactataaattattcatccgaatattagctaaattatatgtgatcagaggctggtagaaagttcaagggaaggacagtaggtcattcaatcaacagttgaaagtaagcaaagaatgtggcatgaattctgaaggtttcgaactggtaagtatacagtgggatgtcaaaagaaaatgaatgaagacctccaaatagtaaagggcgtagcagtctaagaaaataaagatttcttacttggaagtgttctttgacgatgataagaatgattcaaaaccctttagcacacttccgaattgattagactcttgtaggtaggttgtctccatttcataaacctgcaacatatggacataaacatcatttgcaggttgtataagaacaattctgttaaaagcatgaatagatattttgttaaattatgagtgtttaatatcatatacaaaacttccccttaaagtcaagcaaagatggttgacattatagatcatgtgttgttcctggtattaaagagcgactgttttgttctttctaaaaaaaacacacatatcagtgccattaaaatacttgatatgagagcaatagcactttcctccctttttaggattatggtttctactaaaccaaacgctcctcttatttaatgattttggatgacacaccaagattcaccatcacaaacatatattggaatttggaccacatagtgtaactttgaaatactatgaatagaagtagctcatttgatacttgctgcgaataatttctgactaagacacagtagaaactccacattttaactcgaggatagaagaacagatggaattttcaggttgtagctaactgattttcttttttaccttagaataacaaagtgttctcaggcacaaagaacaacatacaagaaatagaatggtcatattcgacaagaatatcaaattgatactttcttcccttcctcctaattctatccaaattgttcgtcacaactgatcctctctgtgaaatgacaatcagtggtcactggtccagcatattggttccaaataggttcatatttctatcattcccaaggcattaagaaagattgaacaataaattcaggctactacaggtatccacaactccaattttacaaccatccgcagcaatgtaaattcgcaccactcattcgcatgttgagcaatggcaagcccttgccatctgaacatatatgcaacaaatccatggtctcctatacaaaaccctaattccaagagagagagagagagaggcgcaaaagagacagggaacagtgtgtaagacctaacctggcgctctatggagcggagctcctcctggagcttggcgcgcttgctcatcagggcggagagcatcgccgtggggttcgcggccgccgcccccgagggtgcagagcccgacgctgccttgtgcgatgcccctcctccgcctcccgagtccatggtcagggtttctagggttcgagttcgtggtttgcctgtttgggcgttcgttctgttttggctcggagacagttcactgttgtggagacgacttagcccctcctctccaatagtacgatcggtcctcttagccaaggtaaccagtatcaagatactatgtaggatcctttctcttcttggtttgatccttctcgatcggtttgattccttctaatggagaaagcttcctgtttgctgccacctgagctgtcaaatgcacatgtgaaaatgtttagcaatcaatgcatacatacccatgagtatcacacagaaaaggttaatagagtatttagcagaatttttttctgttgagggatgaatttcactccaaataacattattggaatacatttctgcctataatctaagatgcacatgttttatgagcgatttgatcatgaccacaaacatgagataatgtccataccctagttagttgcccgtgcattacaatgggaaaagagcatttggctatgtactccttcccatcacgattatttgatccaaagtactgaagtatcccgcgccaaataatatgactcggggggcaacaaatgaaacatgcacaacagttcaggaccttgagcatagaagaaataaatgatacaacctatgtcacttattatctacaacacattgacctctgtaataacagaatgacattatcaccatagatggtgaaacttccttgaaaacaagaattaatcgttatatctattcaggcaattttaagcattacgaattctcatcagatctacaacggtgcataacaaaaataaatgctacattattccactgtatgtaaacaaattagtgaaatgagtgaaataacagggggcagatccaacttgggacatgggggttcagttgaaccccccaaacttttgggggaacaacaaacaaactcaaactgttacttgtattaaggttaaaggctctggaactaagagaagagcttcttccagatctacaagagaagctagggtttaggcaagcaaattccaagacagaagcatccactctagtgttgtagtcattccaatcggcagagtctataggcattttaacacccttcgaagacatattttgagccatgcctgtcatccactcactcacaccaatacttttttcaatgccaacatatatcataggttgaaaatttgagatgcttcattttgactagagtttacaagcttgacatttatatgtacagaaactaactacttccacccagccatagcgaaccatgcttgtgctactagtgatacacagggacttatataataatgactagtttttacaaagcaaatgcgaaacatacagcctgttggaagggaatgtgtcatgagaacatttacatctgcagtaaactatatctaaagaacaataatacagtgagaatatggtttgctcaagtacagagagaacatacaagtagtttgctcaatttcactgaccaattttttctagaaatctaagtacagtgagaatatggttgaaatatatacactaaaaatcaagcaataatagacacacagatcgggagaaattttaaccaacatctaggcaatcaatccccaaaaaatgaaccagatttgagggagaaagtctagggtttgagggagagagtctagggtttagggttaccttcctccttgcaccagatctgctatgccgccgccgttgtctagctcctgccgtgcgcctcctcgccgtggggagccgctcccgccgccaactgccgccgtgagctctcagcggctaagctcaaccaccgtgcgccgcccaaacttctgcccagcgccgcccaaacctcagcccgacgccctagccgcgagagaggaggcagtcgccgccgccgtgcgccgtcaccggcaccgcctcctcctcctcagtcctccctccgaccctccccttctatcttcgccccctctctcttcgcggaggagagcgatgcgagacccgactcggggatgcgcgattcgcctcggtgcggatgggggaacgaaggggtagggcggtggcattctgattgtaatttcttcgaaaagtaatgggtagcgctgtaattaagatgggagtggagctgtggagtggcattttcctcgctccaccgcgctagtacattttcgtggagcgattcaccccgctccgctccaagttttggtgaatctggaccgtttggcacaactctagctctaggtaagttggagttgggagctggagctgtgccaaacgggacctatgtaggatcctttctcttcttggtttgatccttctcgatcggtttgattccttctaatggagaaagcttcctgtttgctgccacctgagctgtcaaatgcacatgtgaaaatgtttagcaatcaatgcatacatacccatgagtatcacacagaaaaggttaatagagtatttagcagaaatttgtgtttcacaatttttttatgttgagggatgaatttcactccaaataacattattggaatacatttctgcctataatctaagatgcacatgttttatgagcgatttgatcatgaccacaaacatgagataatgtccataccctagttaggtgcccgtgcattacaatgggaaaagagcatttggctatgtactccttcccatcacgattatttgatccaaagtactgaagtatcccgcgccaaataatatgactcggggggcaacaaatgaaacatgcacaacagttcaggaccttgagcatagaagaaataaatgatacaacctatgtcacttattatctacaacacattgacctctgtaataacataatgacattatcaccatagatggtgaaacttccttgaaaacaagaattaatcgttatatctattcaggcaattttaagcattacgaattctcatcagatctacaacggtgcataacaaaaataaatgctacattattccactgtatgtaaacaaattagtgaaatgagtgaaataacagggggcagatccaacttgggacatgggggttcagttgaaccccccaaacttttgggggaacaacaaacaaactcaaactgttacttgtattaaggttaaaggctctggaactaagagaagagcttcttccagatctacaagagaagctagggtttaggcaagcaaattccaagacagaagcatccccggtgagagagagagatgaatcatcagaaagaggatgcggatgctcaccaggatccccttgctcgccggatggagatcggcgaccctccccctcccctccccagttcagccgcaaatggcgcaagaagcggatgagacgacgagacgggagattttttttttctcttttacgcgaagggaagggggaagagatactcgagtactccacctttagctcagatttactatgttacccattatgtgtagcaggccaaatgggcggcccggcccagcatagctcgggcccgctgatggcacggcaactgtaatgggccgggccgtgccgtgccaggtcttgggcagaacggcccaaggaagtgttgggccgtgtcgggccggcacggctactgttgcatggaccggtggcccacccacctgcacgagaacgttattcgtgtgaaactacagtcgcaagttttctatagtaggtaacacaattaggcaaaattgtgtttatatgggtatttttcattgtcaatattgtgccattatagccgtgttaaaaatttccataatttcctttggcacaactaagagaggtttaggggctgtttggttgatgccctgagaagaacttgcctgagtgaagacaagcctgaggttagtttgaaccttgttttggttgctatcctgagatcaactaccccttgcctggcctgattccttctgacttgcggttagcctgagccaggtgacccattttggtcgccagaactccaggccgcaacagccaccgataattagcgctgctaatccatcctgctggcctgcgcagccgagtagccgacaccccagatgccgcaccaaccccttgcccaatcctccgttcaattgttgctgctcgaagcttcaatgtcaactagatgcaagcgatacttgtgatcatcgtgcaattagatggactgctagtgtatatagatgagagattacttttgtaaaatgaatacgtattatatttttacgctttgttcacataataaacgtcattcaatggttgtgttttcagctcaggcacgcttgacctcagacctgcaaccaaacagagtaatctcaggcttgcctgatcaggccgaacacatcaagatctcagggagatttcaagcagcactttttcttcaggcatgcagctgagggcaccaaccaaacaagcccttaaccttacgtcccgacccaagcattcgttgtagatatcctgaaacacgaggttcggacttcggacctgttttaaacttttcgaccgttggacacattttaaacttatcggccattagttataaatatatggtcttatatcacgttactccctcaaatattgaaaatatgttgatttggatacattttaaacttctcaacctttggacacattttgaacttctcgaccgttagttataaatatctggtatgtacgagagcaatggttttaatttttaaaacacaccgttttgcacaagttccaaactcccaaaccgcctaacaaagtgctccatccggtcttaaaaacaaaggtcatgtttcctgcacaaaaatgttacaccctatcacatctgtcggagatataggcccgggggtatgtggagtaaaggagagctacttccctttccagccacacggctccgcgagctggtcccacccacatacctcgtgagtcactaaggcgaaggggagagcctcgggggtcgacgacatcccctcgggggtgacgtcaccccctcgggctctcccgtcgttttaccccgaggccctctctcggggggaagtgtgagaggggagtccaggctgggcggccataaatgtgcagcgccccaaccgtccctcgctgcattcaatgcggcgggggcagacgtgcggtgcgcccgaccgacccctgtcagtcggatgcgaccggtctgtgaccagtctattgccggtcacggccgattggacgggcggtcgtgcccccacgtcgcctctgtctccgcggagtggcggtaggtacgccccatcacatccggacggcgtttgatgcagggctgccgcaagtcttccctcgtttatgagggaatgacagggctgccccccgtgtcaggcgggagacggcgctgggccccactcaaggaccgaccgatgcttagcttccaacaaaaggcacgggttgaaacccggtcgcagtagggagaagggccccctcccctccctccgatggagggggagggtagagacggcgcatatggtatccccttaagctataaaaggaggaccttgcccaccaaaaagagggggagcgagggaaaccttttaaaattcactgataatcccaaacgtaggagtagggtattacgctccagagcggcctgaacctaggtaatccatttgtgtgctagctaatcggggatcggagggacgaacacgcgacttcggagagacgagtctctgcccccggccgaactcacgaaaggggggtcacgcgactccccgcgatcgggggtcttccctcgacagctggcacgccaagtagggggcagttgcgcgtttgagaagaagtcgcttccttccgtcccaggtcggaccaggccctagaccgccatggtcgaggtcctggaagcagaggaagcggtggcgcctacccccaccccgtctgggagtggggattcgggcgaaaaccgtgaccctcgtcaccatcgccatggctctcaaagtcctccccgccgcgagccttcgcggagggaggatccaacccgttcaagcggtacggccctctccccgcccccaggaggagggaggtcgcgacgcgtcggagcacgtcgccgtctcgactacggagacggtggttcgccccaaggcgcgcttcaggtggtgggcgcccttctgcggcatccccaggtgaacccggagccggagacccccgtgcggcgctggctggacgacgtggccaacttggtcaccgctgcccagcggcagttggccacgggtggccaatccaccgccacaggtacatcgagtaccccggctaccctttcctcgtcggcgaggagaagggcccgtcgatcggccacaaccttgaggcgatccacggctccaacgacatcggaggtctcgggaaggcggaggcgtcatgatgacctctacggggcgcaggatgctcgggtcaacatcgagcgacgcctggacgagcgccgggctacccgcatgggggaaggtgcctcctcatctggagtgccgcgctcttcttcgcgaggcggccctccccccacgctcacccctgggaggggcaggttgtagggctttcgttgcgagtctccagaatgtctggtggcccccgaagtttcgccccaatctcacggagaagtatgatggcagcatcaacccctccgagttcctccaaatctacaccacgatcatcgtggcggcagggggtgacgaccgggttatggcgaactactttcccatggcccttaagggtcaggcgcgtggctggttgatggcccagctccccgactccattcactcctgggaggatctatgccagcagttcgtcacaaacctctaggggacatatccctgcccgggggaagaagcggacctgcatgctgtgcggcggaaggacgacgagtccctccgttcgtatatacagcgcttctgccaggtccgccacaccataccgtgcattccagcccacgcagtagtgtatgcattccggaacggcgtgcggcataaccgcatgctggagaagatcgcctccaaggagcccaagaccaccgccgagctcttcgagctggcggacaaggtggcccggaaggaggaggcgtgggcctggaactctcctggcaccggtgcggcggctgcggctgcccccgagtctgcccctcgctctaagcggcgagataggagaggcaagaggaaaccggcccgttccgatgacgagggccatgtccttgcggcagagggcccacgtgggccccgcgcaaaggaaagattaccggcgataagccgagctccaccaccccctccggcggaggccggtcggcggacaagtggtgttcggggcacaacacttaccgccacagtctcaccgactgccgctcgtcaagaacttggccgagtggttccgaaaggccgatgaggaaaagcggcagggtcgacgggagggcaaggctcccatgacctcaaccagtgaccagcgagaggaggccaagaacaaggcccccgctgacgatggcggaggtggtgaggatctggatttctagataccccaagggaccgtcgccacattcgatgggggggcttgcgctcgcacttctcgtcgagggttcaaggctatgaggcgggaacttctggccgctgttcccacccatgaggcgatccggaaggcgtgctggtcggaggtaaagctcacctttgaccagagcgaccatccgacggtactcgctcggggagggaagttggccctggtggtctccccgactatccacaacgtcaagatgaagcgtgtgctggtggacggcggggccagtctgaacatcatctccccggctgcctttgacgcgctcaaggccccggggatgaagctccaaccgtcgctgccaatcattggcgttactccgggacacacgtggccgcttggtcacgtcgagctcctagtaaccttcggcgactccaccaatttccgcaccgagcggatcgacttcgatgtggcggatctcaatctgccctacaacgcggtcctgggcagacccgcgttggtaaagttcatggccgccacccattacgcctacctccagatgaagatgccgggtcctgccggtcccatcaccatctttagtgatgtcaaagtcgccctcgcctgtgcagaacagcgcgcggacaacctggcggcggccacggggccgcaggccccggaggcccccgcgtcccgcgcccccaagaagcgcctcaccttggccgacgaggtgcccgtcaaggagattccccttggcgacgatccgtccaaaaccgctaagattggcgaaaccttggacgccaaataggaaggcgcgctcatctccttcctgcgggcgaattctgacgttttcgcatggaagccgtcggatatgcccggggtccctagggaggtgattgagcaccgccttgccgtgcgaccggatgcgcgacctgtccggcaaaaagtgcggcgtcaagccccggagcgacaaaccttcatcagggaggaggtggcgcggctcctggaggctgatttcatccgcgaggtgattcatccggagtggctggcgaacccggtggtcgtcccgaaggccaacagcaagctgcggatgtgcatcgactacacagacctcaataaggtatgccctaaagatcccttccctctaccacgtatagatcagatagtcgactccactgcggggtgcgaccttttgtgtttcctagatgcatactctgggtaccatcagattcgcatggctagggaagatgaagaaaaaactgccttcattactcctgtaggcaccttttgttatacaactatgccttttgggttaaaaaatgccggccctacctttcagcgcatgactcgaattactttaagtaatcagatagggcgcaatgtagaggcgtatgtcgatgacctagtggtaaaaacgcgccgccaggacacgttgctgcaacacctggccgagactttcgatagtcttaggtccacacgtgtaaagctgaaccccgataagtgtgtgttcggcgtgccggcgggcaagcttctcggttttctagtctcttcccgaggcatagaagcaaatcccgagaaaatacgcgtgatagagaggatgcgccccccagcaagctcagggatgtgcaatgtgtcgctggatgcatggccgccctgagtcgatttatatcaagattgggcgagagagcgctgcccctattcaagctcctcaagcgccccaggccgtttgtatggacggaggaagctgagcaagccctcaatcagctgaaagcttacctcacttctccccctatcctggtggccccggggccggaggagccattgctactctacttggctgcgaccccccacgtggtgagtgccaccctagtagttgaacgcgaggagaccgagcaggaggtccctccggctcgtgatggcccctcgtcccccaaagcccccagcccccgggaggaccccgaggcccccggaggagaaggcgaggctttggcaggaggccccgagccctgtgatcccaagataatccggaatcccccgggggcccccgagcaggcgcgctccggatcatccgcccctgacaacacgaaccggcccgcccgaacggtgcagcggcccatctactttgtcagcgaggcgcttcgggatgtgaaaacccggtacccgcaggcccagaaaatgctttacgccgtattgatggcctcgaggaagttgcgccattacttccaagcacatcgggtttccgtggtaacatcgtaccctctcggccaaatcttgcacaaccgagagggcaccggacgggtggtaaaatgggccatcgagctggctgagttcgacctgcacttcgaaccgcggcacgcgatcaaaagtcaagtcctggctgacttcatcgcggaatgggccccagtggacgaccctgttccgtccgaaccccctccctcccccgaagagaaagaggacccaaacgccgacattcgtggcggacactggattatgcatctcgacggctccctcacccttcaaggcgcgggtgctggagtcacactaacctcgccaagcggagacgtcctcaaatacgtcgttcggctcgacttccgagccacgaacaacatggcagaatacgaagggctcctcgcaggattgagggcggcagccggaatgggcatccgccgtctcctggtcctaggtgactcccagctggtcgtaaatcaagtatccaaagagtaccaatgcaccgaccctcaaatggatgcatatgtccgcgaagtacggcgcatggaacgccacttcgacggaatcgagctccggcacgtgccccggcgcgacaacacactcgctgatgagctgccgcgtgttgcgtcggcgcgagccccacttcccccggggacctttgaagaaaggcttgtccaaccatcagcacgaccgaacccctcgaggggctccaacgacatgccctccgccccgattccttccaactcgcgccccttggagcccgagggggtcgaccccgacccccctccgcgcccccggggcccgagggggtcgaccccgacccccctcgccaagtcgcatggatgactaatgtccgggcgtatctcgacgacaatactcttcctgaggaccgcgcagaagctg

SEQ ID NO: 7632 - DNA, 41801 bp, Oryza sativa
  unsure (1)..(41801): unsure at all n locations
cactaatgcacccagtactttcatgagattaatgaatgaagttttatgtgctttcattggcagatttgtggtggtatattttgatgacattctcacatatagcagatcaatagaggatcatcatggtcatttgcgtgctgtttttgatgctctacgagatgcacgtttatttggtaaccttgagaagtgcacattttgcatagatcgagtctcttttcttggctatgttgtgactccgcagggaattgaagtagatcaagccaaggttgaagccatacatagctggccggttccaacaacgatcacacaagtgagaagctttctaggagttgctgggttctaccgccgctttgtgaaggattttagcaccattgcagccccactacatgagcttaccaagagaaatgtgacattcacttgggctgtagcacaaaggaatacattcgacactttgaaagataagttaacacacgctcctttattccaacttcctgatttcaacaaaacttttgagcttgaatgtgatgctagtgggattggattaggtggtgtattgttacaagaaggcaaacctgtagcatatttcagcgagaaattgagtgggcctagtttgaattattctacttatgataagaaattgtttgctctagtgcaaacattggaaacatggcagcattatttatggcccaaagaatttgttatacgctctgatcatgaatctttaaaacacattcgaagtcaagcaaaacttaaccataggcatgctaaatgggttgaatttattgaatcttttccatatgtcatcaaacataagaagggaaaagaaaatgtcattgctgatgctttgtctagacgttacacaatgctatcccaacttgacttcaaaatttttggcttggaaacaataaaagagcaatatgcgcacgatgatgattttaaagatgtgttgttgaattgcaaggagggaaggacttggaacaaattcgttctcaccaatgggtttgtgtttagagctaataagttatgcattccagctagctctgtgcgtatgctattattgcaagaagcgcatggtggagggctgatgggacactttggtgtgaagaagacggaggatatccttgctgataatttcttttggcccaagatgaggagagacgtggagaggttcgttgctcgctgcacaacatgccaaaaagctaagtcacgccttaaccctcatggtttgtatatgcctttgcctgttcctagtgtgccttgggaggatatttctatggactttgttttagggctgcctagaacaaagaaggggagggacaatatctttgttgttgtagatagattttctaagatggcgcatttcataccttgtcataagagtcatgatgctacacatgttgctgatttgttctttcgtgagattgttcgcttgcatggagtgccaaacaccatagtttttgatcgcgatacaaaataccttagtcatttttggagaaccttgtgggctaagttggggactaaacttttattttctactacatgtcacccccaaactgatggacaaactaaggtggtgaatagaacattatctacaattcttagggctgttttgaaaaagaatactaaaaatgtgggaagaatgtttgcctcatgttgagtttgcttataatcgttcgcaacattctactactaagaagtgcccttttgagattgtttatggccttctgccccgtgctccaattgatcttttgccccacccaacttcagagagagtgaactttgatgcaaaacagcgcgctgatttgatgttaaaacggcatgagaccactaaggagaacatagagcgcatgaatattaagtataaacttgctgggagcaaaggaaagaaacatgttacttttgaacctggtgatttggtttggttgcatttgagaaagaataggttccctaatttgagaaaatctaagttgctacctagagctgatggtcctttcaaagtaatacaaaagattaatgataacgcatacaagcttgagctacctgccgattttggggttagccccacgtttaacattgcagatttaaagccatatttaggagaagaagatgagttagagttgaggacaactcaaatgcaagaaggggaggatgatgaggacatacgttccaacgatacaaccatgcctattgcacagcaaggaccaatgactagagctcgagctcgtgaacttaattatcaggtaaagtgattcctagctaatcatacaagttcttcttagaattgggtgctactaaatggttgttgtgatctacttgttgttaggaatatgggagaggaaccagatcgcaagtagcactagcagcgctgatttgatgaagtcaatgctcttcactccggagggcaaacgaggcaaatgagtacttgttggaaagatctcgtcgtctactttcagctatgtgtggcctcaaatttgacccaggctgctcagaatgacgaaaatagttcttcacatcagaaagggcttgggccttgtatctttatagcccattaggggtccacaaaacctagggtttgctcccacctcctctcctggtcattcctccacctatataaactcctagcagccaccattttgcactttgggttttgtttagatgtaagtttagctgcagctacttccttgtactcgcgtgtgtcggctagaccacccggatacttgtattcagaaccccattttggtttgtttcagtttcatcacttgacaagtgccgtgagctgtttccttgtcaacttgttcttgcttgttcttcgattgcttgcaggttcaaggttgttcatggcacggcaagaacagcaacaacgtggagtcggtgtaccggttgctaaggcacagcacccctgtggtagttgtagtcggaccgccaacgtcgtgtcctcccctaaatcgaagtttatcctcctctcatcgaaagatcgggatcccccgttgctgcatcaagcacgaccacaatggcagtggtgacgaggacgacgagttcgtgcgctggtaatagggtgcgcaaggatagaaattgacaggaatgatagaaaagtgtggatggaaaacacgacaaagtgacacggttttaatttccccattctagtggcacgttaccgatatcgtgaatagtagttgtatttttttaatttgtcatatctgtagtagcataaatccaaataaccctaaaataaattgcacaacctgatttcccaattaacttatccctctggttttccgcacgcgcgcttttcaaactattaacggtgtttcttttgtaagaattttctatacgaaagttgttttcaaaattatattaatccatttttttaaaaaaattaactaatacttaattaatcatgcgttaatacacacaccgttttgcgtatcggagaggaggggttcccaactcctcctcccgaacacagcctttagtgattaggatctccgtaggggagacggagggatctggcagcctataggctctttggcaggaaacaatctggaaataggtggtaatcctatcccagattcaatcgggtctccagtctttgcactctagggtgtcgagacggacggcagtagcgacctccgggtgtctgtgcagcaccagcaagagttgaggcagacagcagcgcgcagcaacctcccagggaagtggctgacaagcttgcgttggtgcgaaagcaacatgctccctccactatcagcgtccacatctggacgcgactcctaggagcatccatgtttggacgctatttgtagtagcgtccttattactttggttcatctttcctcttaattactaataatttaatttaagggattttaattattataaataaaaaagctggtgctccaccactgcttcctcctgctcctgggatggagccccatatccgatgcgaaaacccgctcccctgcttcctcctcctcgtccttcctgtcacgggctcgtggcgtgggatgcaacgtggtgctagtgtgctactaattgagacgactgagtaagtgtgttcctagcaagggagcgtggtaagtcttccatcccgtgccaccctgttagatgaggtaattggtgctatcgtcgttgcgcattagactccggtcaaaatttggatctatagcagaggagaaaagggaaatagttaggcaagctcgtcatccctgcacgcggaacgtatttcacactggagatggggctccactgcggcactgccccagctgatgagaagtagacaagggagggggagacgagagggggggaattaagcacttgaactagaggtagaagataggtgctgtaagattcatgcgcacacgtggtggtagataaacggagtctttccaaacgtgagaagtaccgaggtcctgtacagttttcttccattgagtaagatggcttttctgacacaattgattgtggggtccagttcgtccaagatggacgagaagaagcacaacacggatccaaacactcgaggattaaatcgaaagaaattcatcctaaatttttacgaatgactgttagcaattttgtatattgtaaatcatgcttgcacatatagccatcaatttgggcagaaccatactttcctcttactgttatatagcatctcgcatgaaacatgttgcattgcgttcaaggtatatattaggttaaacaacaacaatggtattatttccataccattatatgaatattgtaaaatcacatgatcgtcatgaccagatgaacgaaattaatattgtttgtacatgaccaactagagagctgttcagctaaatttgcaaaataataacacacagtacaaaattggccggtagctagctaggtttcgtctaactgccatgcaggcgaaccctagcgcgaggttgccagccaggggatccatcgcgtggtcgtgagcaaggctgcaataaccgaagctcgaggcaaaagcgtccgcaagagagggctgcaactctggtgccggccactactagaaaactcattttcggcgtcgtagggtatcaattttcgcaggcgggcatgtaattcggagccaaaaccccactggcaaaaaatgtacccggggtggagggcgcggtccgcctgcgaagatcgatctttgtaggcggaccatataagcgtcgcctgcgaagatcgatgttcgcaggcggcaaacgtcgtgcgcctgcgaagatcgatcttcacaggtgccacttatatggcctgcctgcaaagatgcccctatatagtcttcttcctacccaagccctattcattctccccgaagtttctctctcctaaagtgacttaaatataggggggaggttttgaacttcaaatcttcgggggatttttctacggtgcttagatctactcattttcacactaggtatgtaattttttaagcttttagacctcaatttctgatggatttatgcatgcaaaattgtgaaggaagagctctatgttttttaatttaatttcttttgatatgttgatgttagatgtatgtgtaatacttgatgcctcttgttgtagtgatttaatgtggtaacataaattctcaattttttttatttttgctatcacatccacctcctaattctagatctagatctagatcttgtcatatatagagagagaataaaatttttaatatctatttattcggtgcaatcaaaaaatagttatagtagtttgtaatatgccgatgatatgattttgttagattttcctaatgtactaatttggcaagtctgtgtaaaaaaaattgaaataaactttgtttttttattaatttacaattaacctttagttaattagttttgaatagcgataagttttttcagtaaaccctacaaatttggtattaattgtgcaaaattttatgtgcatttttttagagatatggaaagtcgggaatggatgtatcattggccgaggtttttgtctccatatagaaacgaagtgtctaaatttattgttattgccaaggcacacgctgaaaagaacaatatgaggaagataatttgtgaatgtgctgactgtaagaatgaaatagcctgggacttcaacgatgcttttaaagtaaaggagcacttagtaactcgtggatttatggacgagtacaaaatatggacacgtcatggcgaagaacaagtggacgggcctgaaaatgtagttccgacacaagttgaagacatggtgcgtgacgatggttctgttgaggacaaaatcgacctacaggaaatgttacgtcatgcagaacccgaggtgctgatggggtcggctagagggttaaataactttgaagctttacggaaggtagcaaagaaatttttgtacaatgagtcgaagggctgtgacagtgagttcacaacactacggtaagttctcgaacttatgaggttgaaggcgatacatggatggtctgatactagtttcgacagtctgttataacttctgtagaaaatgctcccgaggcctaactcactaccatccagcacatatcaagcaaagaaactcatatgtcccctttcacttggtgtggaaaagattcatgtgtgcgtaaatcactgcatactgtacaggaaagagtacgcttctttagatgaatgtccaacatgtggtgctagccggtacaaatcgaatagcaataatggcctagaaccgtctgatacaactgagggacgacagagaaaaatcccgcagcttgtgatgtggtaccttcctgtcaaagaccacattaaacggatatactcaaacccgcgagatgcggaactaatgcgctggcatgaagaagggcgcaagaaggatgggatgattcgacacccgacagatgctcgtcagtggataaactttgatgctcagtatagagagtttgctaaagacccacggaacattagatttgccctgagtactgatggagttaatccttttggagacatgagcagctcacatagtacttgccagtgttctcaccatgtataatcttcctacctggctttgtcaaaagcaaaatacgtactactctgtatcctcatacagggaccccgtcagcctggtattgatattaacgtatttcttgaaccattgttggaagatatggctgatttatggaaagagggattgaaagtgtgagatgagtacttaagggaatacttcacagtgaaggccatcatcttcgtgaccattaacgattatccagtaatgttttcagtttcaggtcaaattaaaggtaaaacaggatgtgtaatctacttgaatggaacgtactataggtatctcccgggttccaacaagcttgtgtacatgcggcaccggcggttcctacgcacaaatcacaagtaccacaagatgaaggcggagttcgatggcactgaagagactaatcctgcaccaaaacctacatcgggagaaaaggtgtgtgcaatgacagaaaattgtttgcgagtttggaaaaatgactaagaaaccatcaaagggaacaaagcgcaagaaacccgaaaagaatatgaaacaaggggatagtaagaagcaagatgatagttcgaagccagatgataaactccctcccccattcaagaagcattccatattttttaagtacctcccatactggaaagatctggaagttcggcatgccatagacgtcatgcatctagagaagaatgtgtttgacaacataattagaacattgttggacatgccaaagaagactaaagatggtctgcaatcaaggatggacctagtcgagatgggaatcagggaagagttacaccctcaaggagagaagaatgacaaagtatatcttccaccagcctgtttcacactgacacctgaggagaagaagtcattttgcaactcactccgtgatgtcagagtcagtcgactagtttccatgaaagatttgtcggtatctggttataattcacacgactgtcatgtcttgctcactgtgtttcttgaaattgcaataagggccataaaaccggagcatttaaaggttactatcacaaggttgtgctactttttcaacgcagtgttgcagaaggtcattagtctcgaagagttaggaaatctccgtacattcgcacatgagacacagtgccaacttgagatgtgtttccctccgtcattttttgatatgatggagcacctcattgttcacatagtgccgcagatggttgcgcttggcccattgtacctccatcaaatgtggtcatacgagcgttacatggcggttttgaagggttacgtccgaaatcgtgcacatccagagggatcaatggttgagggttatagtactgaagaggttgtcgagtgctgtattgattaccttaaagatggatatgcaattggagtacctgtgccccgacatgagggcagattgagtggcaggggaacgataggaaagaagagattcgtcacccatggtcacaaatcattccaagaagctcacttcagcgtgcttcatcagtttgctatcgttgagccgtacatcgatcaacatatcgaacaaatacgagctaacaataagggtcgcaccaccgagtggataatgaaagaacacaagcgtctcttcatagattggttgcgagacctagatttacctgagggacaaactaccgatgaaataactatgaagcggttggcttgtggtccatcaactacagtaaattcttggtagggatatgacattaatggatactcgtttagtacaagagcccgagataataagacctgtacacaaaacagcggtgtccgtgtggaggcaattgatgaagccggggaaaaacaatcatacttcgggtttattgaagaaatatggtaaatcgactatgggcatacaatgcaattccccatatttaagtgccagtgggtaaaatacccgaacggggtcaatgttaataagttcggtcttactgttgttgacctggcgagtgtgggtcacaaggatgacccttgggtactcgccaatcgcgtggcacaagtgttttatgtgaaagacccatcaaatttgaagaaagatatagtgctacccgggaaacaaaagatattgggagtggatggggttgaagatgtcgtagattacaatcaataagatagtatgccactttatagtcagtttgtacagaagattaagaatgtcgagacatctactcagaagaccgtgaagccttacatgcgcatggacggtgtggggaaaaatgttaaagggtaatgattgttgagtcgcatgtaagcatctaagaagttagtagttatgtaatggtggtatgttaggtgatgtgtgatcatatcgcaaattgacgaacaattgtactcaacattttgcatattagtttgtactaatttttatacaattgcactcaacattttgcatattagtttgtactaatttttatgtgcaattaccatttgtagggtaacatttacagttttttattttttaaaagtttttttaaaagaggtttaaaattttagtagcattttgttatgttcacttaccattatttgaaaacttattttaaaaagatttcaatcaatggtaagtgcacatataaaattgctactatatgttttttaaagtagtaatattaatgtttgaaacatttaagtaatatttacatttgaaaagtagtaatactaaggtttatctacttgtatgtacaattaccttttttattacaactactgtagacatgttcaaatcacaaaaataattttaaaataattctgaaataaatagagtcatccttgtaaaaatcttcgcaggcggaccgtccgcctgcgaagatcctttccctatataagggcaagcccgcggcgccaaaatttctaagtccaggcgggaaccctagaaattttggcgccgtcaggctgccaaattttttcacctccgccgtccttcgccgccacccgcctgcgaccttcaccatccgaccgtcgtcctccgacgccgccgaccgtcgtcctctgcgcgccgcctgccttcgagctcgcgccggctgcacgctacaccgcgccaccggccgtcgatccagctccaccgccgcccgctcccgtagccggccgcatcgccaccgcctaccgctccaccgccgagctccaccgaccgccgctccaccgctccaccaccgccactgccgtccaccgcgcgcgcgcgagctagcgctccaccgccggcaccgtccatcgccgccggccacttccccccccccccccccccggcccctccaccgtgctgccgaccactccaccaccgccggccgctccacagccgccgccgccatctctctctttctctctctcgcagtcgtccacgagcggcttcatcggcctttcgtcgtccacgagcgaagacgtcctcggccgaacggcttcatcggccggtcatcgtccacggccgaacctcgtcgtcgacccttccttcgtcgtccacgaccgaagctcgtcgtcggccgttcgtcgtccacggacgtgtgtgaatgtgggtgtttctttttatatgtgtgtgcatgtgggtgtgagggggtatatatgtgtgtgcatgtgggtgtgaatgggaatgaggggtgggtgatatgtgaatgattgtgaatgtgaatttgggaatgtgggtgatatgtgaatgaaattgggagggtatgttaaattttgcaagatatgtgtatttgtcaaatttttttaataacatgtgggagggtatattaacatttttttaaaaaaaatatggaggatatgtttgcctttttatttttttttaaacaacatgtcaaggaaatgtaattgttaattagtgcactacttgataataacatatcaaattttgtacaaatttgtttgtactaattaatttagcataatagtaagtactaattaataatatttcgcaatttaaatttgtttgtactaattaatttagcataatattaagtactgattaatagcataagtactaattaataacatatctattctagcataatagtaagtagtaattaatttcgcaatttaaatttgtttgtcctaattaatttagcataatagtaagtactaattaataacattttgcaatttaaatttgtttgtactaattaatttagcataacagtaagtactaattaataacatatctattttcgctacgtgttaatatgggaatctcagagaatttaaatttgttcatatgacattttgttaatatacagtttatttttgtacaaatttgtttgtactaatttgagtaatttaaaatgtggaggataacttttttttatgttagaggtttgaaacgatggccgatagtactaaagggactaaagagaaaggtttaggggagcaagagcagtcccttgctgctgtggttgctccggaaccaacggtcccaccggaagatagttccgatagcgacgtagctgacgaagacgatgagtactcgtcgccaagcgatccttgtccaagcccaagcccgaagagaaggaaaaagggcgacggtgaagaaggcgacaaggattacattccccctaaagaaggggtaagtaaacttaatatgtaaactgttcaccgtgactttcatgtataccttctcgtaggaaacggcgccacggcgatcaaaacggcagccgaagaaaaaagttccgtcgaaagacgacgaggtaccagctaacacaaccggctcaaagaaagcgaacggtcagcaaaggcgaagaaaaggaagggtgagagaagcgtgaatagaaaggatgaagggttccatattgttactcatgtttcgccaaaaggagagccgctcgcccctaagacggcatgtgcgaaattcagttcacagtgtggcataatagtaagggaaaagatccccatcacggtcaaggactgggatcatgtatcgaatggggataaggaagtcctatgaaaagagttgaagaaaatcttccagttcccggatggattagaggcagcagtgaagaattgtgcactgcaaacaatggccaagtcttggcgtggttggaaaaccaccttgaacaagaaatttgtgaagacgggacgcacactgtttttgacgtatgccaacataaccccgaatcaatgggacaactttctgatgttgaagaactccccagaagaaattcaaaggagccaaaagtatgcaaagttggccaagaagaacaaatttcctcatcgcttaggctccgcgggatacgcaccaaaggtggagcagtggacaaaagaggaggaaatgaggaagaaggggcaaccagtactaatggaggaatggacacagagatcaaagaactgggtaagagctagaactccgaagatcacggatgaaggcaaagtatcgtttgaagatccggagctgcagagcgttgccgataaaatagagaatttatccagttcacagaagaaaggatttttcaagcctaagagggagaaagatgtgctaagtacggcgctgggtactcctgagcatgggggaagggttcgaggtgtgtcaagctagatgagttggaaggaagggttcaaacatgacccccacaagaagcgtgaagcgtataaggataaacttagagagaaggggctgcggagtttgaaaggcaaatgatggatttctgcgtcaagcacatgcttttgcctcgccccgaaaccaaagaacctgagccagattaccccttcgatgacctcaaagagaatacaccctgcagattgcacgttcccattggacgctccgggaaaactcttgaggctgctacggccattgctatccctaggagaacatataatgaagagttcatacccaatgcgtatgccaaggtgcagccgcaagtggtccacgaagggtttgagtcctacgacattgacttcccgactgcagatggtgtatccatacttggggatgcggtcgatcttgtaattctctagcacaagaatgacatatccttttggattgggcaccgacgccacgcgaaaacctgtggtgccaaaaccggggttgggaaaacctccgagacctcctaagaggaaggtgactgataaggcggaggaacccgagatgtaaaaggaaaatccagtgccggaagtgccaccagagattgcagtgctggaggcagccatggagattccagtgccggatgtgcccatggagattacagtggcagaaccagaggtgcaatttgtggcatcagtcgggtcagaaatagaagaagtaccacgattcgaatgggacggtacagagccagaaatatttgaagacccttctcctacgaaagaccccgaggtgcaagagaccacggtccctgagaaggccactaccagttcagaggtgcctagagcggttaggagccacaactccaagtccaaagataagaacaaggagaagttcatggtaactgtcttcagaggggtaaggaacgtgccaagctcagagatgatgacccccagaaggccgctgaactagccgggccaacatacttcgcaaccaatgattgcccggaaaagtacgaacatgggaaagcactcttgccggaatgggcactgaacgaaggaccatgggagatgaaaaggttacataccttctacatggaggccagcaagaaaggcttgggcaatataacagctcgatcgctggcagattgtttcggtgaagaaggttacgtatggctagatttctcatatctccacaccatatatcgtcgggataagatggacgtcaactacgtcggtgtttggtgcatgtgagtatgagttttaattaattatatgaaaaatatgtacaatacaaatccatgtgattgttactaacaaacttcttctgcaggatgcaatacatggatgctaagaagaaaaaagaacctatcggcttcttgaatccaactcggatctgccaaacacaacataccgtgaggctagcaccagggtatgaccaactgaagggcatgaatccaaaagagatagctgaatataagaagggcttgcacaaggagaaattgattactgtcacacagtacattggacgagccttcttgcactttcaaaataagagagtcgtcatggccgcttataattttaagtaagtccggtacatttatcttctgcacatatgtcttattttagctggtactaactaactatgttgttgttaatatgtagcgatcattatatctgtttactcatccaccctaaagacggaaccgtggtagtcttggaccctctcaattacaaacaccaatcatacaaagaatttctaacaatcttacagtagtaagtgattatgactcttgcatttttatatgaatgtattataaataaatatcctccttaatatgaaacggtacaacatccatatagtgcgtaccagtactacaagttcaagggtggagaacaaacccgaacaagggagaagctgctagtacgtacctattgaccggtaatattccactcacttaatgtaactgccatggaagcaccactgaagactggcttctccgaccttccacccgctaccaattgtttcactaattgcaaattttaactattcttttatgatatgtcctgaagtgtcacaagcaaccgcgaggaacggtcctttgcgggtattacgcttgcgaattccttagagttaatggaaggtacaggattaacgcggaggatgtaagtctctatactatgtgctagacagcttcacatatttatgatactaatatattgtttatcttcaatgcatgcagttgccaagattagaatgtcgaacaagttttgacgatacaggcatcaaaaatgtctaacgtgatatgtgccacttcatccaccatgagtgctgtcatgtgaaaggagatttcttcgaccaagagagtgccctagccacaagtgatgaattcaaggatcttcgggagtggaacaatgctatgccataatgtattaaatagatggcgtatttgaagtgacaatgtaaaaaaatattgtaatatatatattttggcaacacttttgagtaatgtaatatatgtacatttatcagtaccaaatgcttgataatcttccaatatatgtacataataatctacctccaagaatttttattcaataatttaaaagtaatttacgggcaaattattattaaatttcaatattttctacctatcttcgcaggcggaagtttttttttgtaggcggccgattcttcttttcgcaagcggaccggactagccaacgtccgcctgcgaaaattatcttcgcaggcggacggccgccccgcctgcgaagatcggcgatcttcacagtcgttggcttacaggcggacggctgccccgcctgcaaagacccttttcggccggttgcgataatgcttttcctagtagtgggcagcgactgatctgattcctccacttcgctttccaccatatcgtccgccatgtcgagcttctgctccgtccttgcagcagcagcgaggaagccgctgcgccggagctccctccagcggtgattcatgactcgcgaggtccggccgtagacagcgtggccaatcttcttccagcagtcgcccaggcggtagtggaggcgtaggagctcgtcgtcgtcacgggcagtgaaggggcggtggtagacgtcgcgggcgaggtggtggcaccacctgtcacggcacaaccttgcagagcggcgtggcatgatcctggcgaccctactccagtggcggaagccgttctccttgacgaggcgaggcaaccaaggatgacgtaccaaagtaccggtaaaaacatcttcaatttttataatagtaaagaattggtattttcttttttttcaaacttattttttgaatttatttgaaattcatcaaagtgagcagtacgcattcgagaggggatgcgctttgggtgccattattgtcgaaaggttatacatgaaaatggaatataggaaatgttgacactatggtatacgcaagattggaatagggagatagtttaggtctttagtagtataggtaagattggaataaggagatttaggagtataggatatattggtactagggtatacatgagatgagaatagggacatgggatagagagattcttatataagttctgacccctgagatcaacggaatagtcctattcctgtttatatgtatagctccaggatgtatcagagatagaatacaaaatgggagtaagctagctaatctagcccatttgtcatttaattcagaaaaaattgctacacaactcaattttgcattaatcatactttcctcttgctgttatatcgcacctcgcacgagacatgcatattacattgcgtttaaggtaataggttacacaaaaatagtcatatactcatattaatgccttattgccataccattatatgaatattattgtaaaacaacataatcgtcatgaccagatgattggaattaatattgtttgtacatcagtacatgaccaactaaaaggttgtacagctaaaacaaggaaaatcattacagagtacaaaataggccagtagctagatttcatcaaactgccatgcacgcgaaccctagcgcgaggctgccggccaggggatccatcacgtggtcagtggcaaggctgcaagaaccgaagctcgaggcaagagtgtccgcaagggtactgcgctgcaactctagcgacggcagcgactgatcagctggctcctccacttcgctagtttccaccatgtcgtccgccatgtcgagcgccgccagctccttccttgcggcagcagcgaggaagccgccgcgccggagctccctccagcggtgcttcatgacgcgcgatgtgcggccgtaaacggcccggccaatctccttccagcggtcgccgaggcggtagtggaggcgcaggagctcgtcgtcgtcgcgggcggtgaaggggcggtggtagacgtcgcgcgggcgaggtggtggcgccacctgtcgcggcacgacctagcggagcggcgtggcatgctcctggcgacccggctccagcggcggaagccgttctccttggcgaggcgctgcagccgcgcgtcctcctccggcgtccatgccggcggcagcttgaggcggacgatgcacctcgcgcgaggcggcggcggcagcggtggcgtcgccatgatcacctcctgatccatcgcgacctctcaatctgctcgagctgagagctacggcgacgacaagtgaggattcagatgaagaatcgcgattcaccggtcgatgatgaaagacagggcaacgccgttgcactgtatacatacctatatagcgctaattccttcattcgtgtcggattacgaatcggagtcggagtgattaattaattagcttagcatgcacgcgtggattaatcgctagcttcggactccgtatatttactaatagtctaatagtgtttccaatcgaaggaaagtattcaagtgcaacgtaacggtgtttactatcccgtctgacatttgaaacaaaatcatgagaaaatctatgaaataccatcgacaagcactttaatcccataaatgccatcgacatacgcaacttcctgaaaatgccgtcatacaagcctatttcttttgaaaatgccatcacaccgttagtccacactgttagaacgaaaaaaatttacaaaaataaccaaattgccctaactccaaattatactaacccaatccagctcccgataggcgacaattgcgaggcagcgctcacaggcggcggcaacgtgggccccccaggcggcggcgcggggctcccaagcggcagcgcgtcggcagcaagcgttcgtgcggcggtcccaggtggtgagacggccgctcccaggcggcggcgagatggccgccaagcgaacgcgtggcggtcccaggcgacggcgtggggctcccaaacgacggcgacgaggcggcgctcccagatggcggcacggggctcccaggtggcgtcgcggggtccccaggcagcgacgcgtcggccgcaagcgcggcggtcctaagcggcggcacagcggtcccaggcgacggcagcgaggtggcgctcccaggcgacggcgcagggcccttgggcggcagcgcgtcgttcgcaggcgcggctgtcccaggcggcggcacgggcccctaggtggtggcgcggcggtcctaggcagtggcgtggcggcagcaagcgttcgtgcggcggtcccaggcggctgctcccaagcggaggtgcagggctcccaggccacgacgcgttagtagcaggcgtttgtacggcggtcccaggcgtcaatgtgacgggcggcaaggaggtggcaggtggcggcacaaggagtgactcaagggcctcatgcatcggcacggtggtcgcagggccgacgagttttgacttgattattagtctgcacgttcaatgcctaaaatatgtaagagaaaatccatgaaatgccattttagataaactatttcagtgagtggtgattatgaaacacatacatttttaaaagggcatgtagcctagtggttgcagtgacctgagtagcaccccaaggtcctaagtttaaatctccataggatcgaatttcagattggattatttgagggctaaattccctatttgataagctatgtttctaaaattaaaaaggctgcatatatccagttggatgtagaggccggttaaagaaatacccttctaaaaaaaagaaacacatacattttccttgatgaagttcaagcaaccgtcattcggcacaaaggcagcaatcttcttcccattcttcaccagctgaacacgagcacacttacagatggcagagtttggctgcttggcctcaataccactataatgaaacagatggaaactagttcaagttaagaaagcatgagtaataaaattgagcatgagtgttgtccaggcgtacatcttctccaaaacaatgcccttggcatgagatgatccagcaaagggtttcttccactcattgccaaagtggctcttcttgtatgccttgtcggcccatctttggttcctgcggtgggtcttgagcttgcgcccagctcccataccacatgttttcttgcaatgaaatttcaggaccaacttaagacaaatgctacgtcttacgattttgccaaacatctcccgcgtgatttttttcctggcatttgacgtttttttggccacatgatctttgcacaaggcatagaagcccacgaacagcccagcagcccatcatcatgcctaaccctgattgctaactctaaccccggtccactcactgccccacacgaccacgcccgcactcgttccccgttcacatcacatcgcacacacgccacgccgcttggatctgggtccgtggccagcacccgcaccgccgtagcgcgcgccaacgacggtgctgacgtggccgtcttccagcagttggtgcgcccgccctcatctgtcccccttctcgtcgatagatccagccgcctctttgccttccccacacgcatggatccatcagtgacggcgacgggaggggctgatccagcgcccgcttggtgatcaggagctctccgtcactctcccacttctctcttgtttcctctactctctctctctctcccactccgatctggcaccccctccttccccgcaggccgcacatatcccaccgcctatctacctcacacgcgcgtggcctgatccgctccctctcccactgacaatgcgggcctagtctggcagtcgcggaaacggacactacggttgctgtctttttaagatgctatagataacaagaatataaggtcattcacaatgcatctacatggcatttggcctcaactctccaactagactgattgtatacgtggagaagaaaaggaggtggggcccatgtcttcactagcttcgcgtgtccgagagcctcgtcagaagaaaacagctttttcaatcgcatctcagcatctgcacgtgagaaagcatgacacaaagagagaagggggagaagctcaccgaaaaaaaggtaattacaaagagagaagggggagaagctcgccgaaaaaagtaattttagtgatggggctcgcataggaaaatgtttggtggggtccacctgaatccatgccgcattgtggagaggaggagcttcgctgttttctgtacgtggctgtttaggctcctcggaaaaacaggacgcattgctaatgccccaacactcattctaaagctaagagcacataacgtggcaaatggaacattccctgcaaaatgcccacaaatcaagagaagtgaaatttaatggtacagtgtactacaagcaacacaatctaatcggtctcctggacctgatggccttaatgttggtttttatagagtttcttggccttggattaaatctgacatcactcaaacggttcaagacttttatgtttcaggccaatttccaaaaggtatgaatgatactaatattactcttattcctaaaaaaaattatcctacttctcctgctgattttaggccaatcagtctttgcaatgtttcttataaaatcatttctaaatctttggccgatcatatcaaaagtgttcttcctgatttaatttcagattctcaacaagcttttataaaaggtcgtcgcattgcaaataatcttattattgcccaagaaatagttcactctttcaatttaaaatcttttaagtaaaatgcttttctgctgaaacttgatcttgcaaaagcctttgatcgtctagaatggaactttattgagaaggctcttcgtcgtaaagggtttcatggtcattttataaatcttgtccttgcttgcattaattcggcaaacttctctgtcaatcttaacggccagtcatatggtcacttttcagctgaaagaggaatacgacaaggttgtcctttatctccttatttatttattcttgcattaaatgaactatttgaaatgatatctaatgcaattcaaacaggtcaagtcaaaggagcttctttaactccaaatggtaccattattccggccctgtatagatgggactaaaacttttaagtccctatcacatcggatgtttgaaaattaattataaatattaaacgtagactattaataaaacccatccataatcttgaactaatttgcgagacgaatctaatgagcctaattaatccatgattagcctatgtgatgctacagtaaacattctctaattatagattaattaggcttaaaaaatttgtctcgtgaattagcttttatttatgtaattagttttgtaagtagtctatatttaatactctaaattagtgtctaaagacagggactaaagttaagtccctggatctaaacaccacctcactcttcaatgtatgctgacgatcttatgattgtaggtcaagccactcctgaagaagctagaagcatcttccaaattattcaatttttttgccatcaatcaggtcaaactccaggttggaataaatcttctattctgttcagctctcatactcctatcctatcagtgtcactcaagatattttatccattttccctgtctccttaatgaacaacaattccaaacatcttggtcatcctctcattctaaatactaaagccagaaactctgcctacaactttatcattgaaaaattcaaaaccaggctgtcaattattaaagcaaaaactttatcccatgctggtagactttctttaataaaatctgtgtttgcttccatccctattttctatatgtctaccattttacactccaaaaaacttctatataaattaactgccattatcaggaaattctggtggacaggtaccaatgatgaagacagtaaaaaaggtatttgttggaaatcttggtctgacatttgtaaaccttttgatcaaggaggtttgggaatcagatatttactaactgttaaaaaaagtcttcttattcaatgtgcttggagaattattgaaaatccaaataacttggtttctaagatcctaaaagaaaagtatttccctcagggctccttttggaaagctttaacaaaaattcctaaatctactttttggagttctattctgaaaattagacatcttttggataattctatcatatggcaactttctcaaggtgatatctcaatctggaatcaaccttggtgttctgtttggaaatcccttcctaatcatattactgattctgcaatgactctttatttacctacaaaagtttctcatctctggaatgataggaaagaataggatatttccaaagtgtctcaaatctttgatccccaagtttcaaatgaaattttaaaaactccaattgtgcattctaatactgatgacaaactttactggattcataactcaaaaggtatttgtacttctcaaagtgcttataaagtcttatcaaccaactctatgttacctgctgctaatatttcaaatttgcaattaaaccttttaaagaaaacttggaaatgcaaatttattcctccaaaagttaaaacctttatttggagacttctcagaaatgctcttgcaactgcaaaaaatttgaacttcagaattcctactatttcaaactcctgctctcgttgtagtttgtctgaatcttgtgctcatctgttttttcaatgtgcttttgcaaatctggtttggaaactgtctgaatttcatttagatacaatcatcattgcatccatgcaaaacatcagtgatatcttagcctatgttctagctacaaacaactctgaattaagcctttaaaaagcttctattcttctttggatgatttggaaagctagaaatgacttctactttaaaaagaaaaactgggaacccattcaggttaattttgcagctcaaatcatgtcttcaaactttatttcttgtcttgatactattgatgaagatcatgaatctcaaaatcatgatgttaacagctggacttctctcaattctgcttcagtaattcgctgttatactgatgcctcctggcaggatggtaatactggtattggaatcttcatccataactctgatactcataaagccctatttattcaagctgcttctaatttcttctcctctcctttacaagctgagcatgcagcaatcatgacagccattttgatttgtcaaaagttaaatattattgatgttactcttcttttagacaatcaggaattagttagccttttgcaggttcaagactattattctcacgaacattattggagcttaaaccctttactttaagatcttatttcccttgcaggaacacaggctcttaacatcaaatggatttcaagacaagttaataagatggctgactttctagcaaaaaaagcaaggaataaatctagacaaaatctgaatcaaatagtttgtcaaaatatttcccacttatgttcccattctgactgtccgactaagacagctttggaatcttctccttttatggagaatgtatctttggttgatgtattatgcttctaagttcaataaagctctaaattctcaaaaaaaaaaagctactgcaaaatgaaatatttgtagaaaatttttttttaccatcatctgtagccatctgcggcagaacaatcccacatgaccatcatcagtgttaaccacacgaccatcttcagtgttaattaagacacaatcccatttcaaataatttggagcaagaaaactggcagaaactaagatcaagttcttgacaggctcctaacaccaaaaatattgtatgctaccatgcataggttctcagattcaagcatttaaaccaagggacgggtgattacacagcagcaaagaattaatatcgcttatgaaaatgtttatcactgacggtgtcaaatctgaccagcactggaccatcaataagctcacattacctacatctaccgcaatctcactctctaccaatccaagaacacacaacaaacgaatcaaccaaacatggcccatagctacacttcttattacaaactaaggcaaagagatagagaaaatgcttctagtgaagacacatgttaacacgagcgaacgcaacggatcgttgcagaaaccactacaatggacgaaagagaagggatcttttgcacacaccccatggcggcggagggagaggccgagagatctccgaacggcgatgcgagaggagggcttcaatgacggcggcggctgaaagtggagtgaggaaggaagacgagggagattctatagtagcaaatctcagcgatttagggttagcgtggtgcgcgctgagattcgtgttggggtgatgggtataatcccacagtcctcgtgaggtttggtgagagactacgaggcggctaggccagttcccggcccaccatgtcattcattgtgtgaacaggtccaaggcctcctattttaaaaaaaaaaaatttcgggccaatttgccagtagatttttagtttgttttctcaccttggacgtatataatcattccgatgagcattaaattttttttaggggccctatgaaaggatttgatccgtagaaaatttcagaggaaatatgacatgaagttctaaactattgtaactttggaaaaaatccaactacccctctaaactttgattggaagttcattaagcaccgtgtactttgaaatcggatatctcttactatcgaatttcatgcccgttctcgagcgattagccccgccacgtggcttcactcgattccagggttcgagtcgtgcgcgcatccgttggattagaaatcaacgggagagatccacaaaaggatctatttataaattttaatcttccaagggagtttatctcaaaatgtggcatccatcatccagattccagagaaatcctttcctcccctcgtctcgccgctttctcctccgccgaatcgccgattcacaagccgtcaccggcgttggtcaccgccactccacatcagtgcgcctccctcgccaatccccatcccctaaaatccctagcccacagctccaccatcgtcacttcacctctccgcgcctccgcatctcgcgagctgagcgttgtcgcctcctcctcgtctcctcgctcccttgccgcccgtccgcttccctggcgcagctctcaagtgggagggctgcgcgccggctggaagtctcttgactcttcccgttctatcgatccctgcggtgggagagcaccggcaaacagtggtcgtacacctcgccgatcgacttggctcgctgcggcggacgaccactatgacgtcgtccagcagctactgcatatcgactaacctcactccgtcggatcccccgcctggaggctctctgggacgacaatgccggattcgccggcgtgacgcggtaccgggcggacggggaaggctcgaacggccggttgcggtgaacgctccttggtgtttaggctggagatgataatcagggcagtccacaccgccgcaagaggcggcagcacggagatgctgagggggctcacccgacaccactgcaggttgaagtttaccacctccgtagaaagttgtcaagtgcattcctagcttacgtcaagatagagctggtgtcccctgcagggagatgctgttcaagatttatgagcaatacaatttccgcgatgatcgtccaggagtattgtccagcaacggatagtagaaacatgaaagaccaaccttttcccaccgcttatggggaatccttaaatagctatagttgcagctcatttttttgagagccacacaatgggatgctccgtttgctgttggattgaaggaatgatctaacaaattgtattattgatggtttgaaaagtgaggatattatgtttagagatgatcattacagaaactgtacaatgctcgtatatctgttcgcttgttttatatttttagatgattaaagtctctttgcggactatttttctaataataagaacattcatatattcatacattgggtctaattggactggctcatctacactttacatggcgaaaataatggcccatcaccaaatatgcgcgtcgaagccgctcttgctttctagttcaactccctgaattttctaataccatttatataagctcataacatggttttgcataattatttttatctaatttgtactttctctgtttcataatgtaagtcattctagtattttctacattcatattgatgttaatgaatctagacacgttaatatgaatgtagaaaatgctaaaatgacttatattgtgaaacggaggaagtatataatttagttgagttttatatctgttatattagctattcgaggcagctcgttttagcttttaaatacgcaagaccaacaacattcaaatcaagcttaggggataaaatgaacggtattataaagtgtaggtggggcatgatttttatttttgttttctcacctcggacatatataatcaattaaccattccaaatttccaattaaaattgtttttttggcctatgaaaggatttgctccgtagaaaatttcagaagaaatatgacatgatgttcaaaatcatgcaattttttcttacgcgctctttctaaactattgtaccttttcgtgtcttactaccatgtgaaagcgatcaagttacacaaatgcgtttagcaaaaagcaccgaaattcatatcagttagcagagtccaagtagtgcattgtacatcgacataattgaatgagtaaacataagagcactggaattactaataattcatgttttctgttggtaccaaatgtccttccacaagggaaaactcttacatggtgtcgtacagcaattctacagacacaagaccatagcccataggcagctttattatgttgtagaacaaaagaataagaaacatttgaagtacacagcctgctcggttgaattgatatcacaatttagaaacagtgacattttggggctaggagctgatttatatacctccagcccacggccaaccactttggtgaaccatataaatttcttcttgcaatttcaccttgtgacatgtactgttgcgcatacatcgtaatgaaaatatcatgcccaggactaggcagcaggcaccaagtcatacctccaattctgtgaatgctagatctcactgaagtgtcagtataccgacaaaatttgacttttgattagagaagaaatcaaatagtccggagctattatttacacaaggtttgttatgggatggtattctcatactagtcatgtcattctgaaatgtaaggctacacctttggaagatgaagatcggctagtgacgaagtgagatcttctctcgattgggatctccgactttggagtgttgtttgacctggcttccacattccactagaaaactgcatctgacctaagcttccaacagaatagctgtgatagacgcccaatgactgcctggaggactccataagctgaacactgctgcctcctaatccatggctcatgctgaatggatggggctctgacccagcaacagtaggactcagaggtgtctttgttcttgcatcacctgtgaagagaatggcaatacgaagcaaatttaaaagttttgtctataggacggaacctcaagctacagaaaacaaaaggcgagtgcaacagccacacagaaattgcaggatagtttgacttcacataatgaaagaaatctctttccatactattgtgccttcattgttaatagagttaagtaacaaaaactacttttctataatagtatattaaataattaaaaagttcagtccaacataataattaatataaaaagaaaaaagaagcagcttttttagaatggaaagatgtttgattgtttaaaattaaagagatgatgcatagtatatagtagacatatagtataacactttatttggttttccaaaaaagcagagcaaccaatggctatacgtctactaaagaaaaagaaatggtacatatagtatcaacagaattgtcagggtaaaaattttgtgcttctagaatttaagtcccaaccccacagacaatagatgctttttacatgaggaaacaccttaaagtaacagcaatgtcaaggaaaaaaaaaactcaatacatacctgaagtaatatgactccatagatgaaatctgaaaggtgatcccatgctaagcacaggactgcctgcactgttctgcctaaaaagtggcagataagacttgcggaatgatcttgggattgaattgctgacacacaatatggcacatatgactaacacaattgaaatcagaaacaacacaataagaatatttggatttatctctcggtggagtattctgtatccttgaatatcgattcgtgtagacaacacctgtccagcctctaacaaagcaaccccaagagtccaagttatactaccagagtcaattatcacctggttatctttgatctgcagcccctctctcagaagtgatgtaatataaggagccctgaaacaatactgttctataaaaggttgtggtggaacactactctttgcaaccttccatgttttttcacaaaattcctggcctctatttagaacatcaatgagagtggcatcggcagtcaaattgaaaaatttaaaaaccacatagaaaccagacatagcataaaactgcccatgtggttgcggaaaggtactaggaagagcacaaggtttagtgttgcagtcaactgagcttgcattggaccactcagaaagattcactgttaattttgcaagggcactacattcgttccactgaggcatcccgatcagttcaactgccattccctgcttctctttgcctgttgtcttccctccaacactgggacttccatctagtttgagcgggtggcagtaagaacaaatataatcttctttgtatcccgtttgtagacaaggatgcttaacctgaacttttccattaccagctgcccctcccaacttcttcacaagatgtgcaacagatttgtcaaatgcatcatttagcccataaccagacagagaataagcactaagttgatgactgatagaaccaatccttagactcatacttgtttcatcctgaatggaattatcagtctcaaatgtcacctgtaatgatgatccacctaaatcaagtgaaccatatgtcattttagaagatgaggtgccaagcatattcaaatgatggttaagagctatccatccataataagcttcatccatgccactgataatcttgactctgtctctagaacacagaaacgatgaattcttcagaatatcccaagccttgtccagaagccactcagaatctgcactcggtagcttgcgcacaccagctgtggcatatagaaaagcaggcgtgtgtttgtgtgcacgtctaggaatcaacttctcagccattcgaaggaggggctctattgtcatctttaatccagtttcattgtgaacaagtttgttcaacccaggttcagtctccattcgctgataggctcgcccagttaatttaccagattttttcttaggagcatttcctaagggtttcaaagcaataggaaatgtgtttccatcgtcatggttaacagaccattcgtaaacatacactcttgtcccagtgcttccacaatcaagaataacatagtattcagggcttccttccgagagaaagacatggaaatatctcaaagaagcatatataaagaacaccaaaaggaacagagcaatagcacaaccagcagctctcatgcatttctttcgatttgttggtgatgaggggggtgttttctcttttgaaaagcttgcaacagcgccatctctttgaagtgtgcggataggttttgcacgccctgagaccaaatcactaccagtgctagagcccctttctaatgcatcaattcttgagaacgtaggcaaatcttgaagtgaagaagacagccgcatagttgcttctttgtagtcagggtggcaattattataagatctcactggtaagggcaaataagcagttggaatcttggcaaacagaagtcataaggatgcagcataaataaccagagtaaattaattcaatagcgcctttgcaccgcctctgcctgcaagaaaattccatagttagaatatactaacgtggtaaaccacatatgaataaagctaaaatttgaaagatgctccgcactaactaacaacactctcgttatcaggcataagaaaaactttcctacaacaccaatgcaacactagcattgaagaaaatagatgcatcctaaattcctaatcttaggaaatatattaacactatataaatatcagtaatatctgcaaatcaactcacatgctaaaccaggttttccctaaatcctgatactaactcagtgcccccacgttaaactgctagtattcatatgcatcatcccaccgacactacaacagaaacaggtcaccaccgacgacgaactcccggctacacactaccacccataggcaaaaactcaaggatcgcagcaacgcgcccgcccccaaacacgccagcttcccctcgattccagcacccaggatcgcgtcctccaccacaccaaaccgcccgatcccagccaccgacccccgaacaacctaagatctaatcgcagattgccgacacgcgaccacagaaacccggcatcgaagctgccggattggatctggccgggaaggggggggggggacaccgacgacttacccgtcgcggcgggccggtctatgcctccatcgccgcccaccccccggcggcgcggggccagcggcggcgaggattgggagcacccgcgcggcgcggtggggcggaacaattggggcgaggcggcgatgtgggcgggggcggtgcccgcaacggcggcgcgtcgacgaaggaccgggcggtgtggggcagcgtggggtcggcgcggacggaggttgtgggggcgtcgtggcggatggaggtggtggtgacgacgtcttggaggcggcggcagctgagtggaggcgggcgacggatcggggatccgcagtaccggcggcggcggcgcggatgagattagggttaggggagggagggagcaagggtgagagggctgggtgatgaaggggcgatcgacggagggaggaatctgcggcggaggggaggagaccggcggcgaatcggggcaaggagggcggatttggggggcgacggtgcgggcgcgggttgggggatgaggacgcgcgggtgttgggggagaggtggagatgatctcgatcgttccatttttcacggccgtcgactgctgaatgtaagagcttaggagtgaaggattagctgggtccaagttcacagttccgacgaaaatcggttgaatttcagaaaccgtatgagatttcaatgagtttcattaaaatttaaatttgaattgataaaaaaaatcaaattaaatcttataaatagtatgatattcgtagaacctattgggatataaattttcaaaaaaattgatgtattccatgtatttactgaaatttacactagaaaagaaaagaaaaaataacgaattagaaaaagggaaaaaatcagtttacctctttttctagttatcgattgaaatctcgatgatttcgctcggaatttcgccaaagccgactggttttcgcgagcttatcggtaaactcaaggaatttgtattcaaattttggtttatgaaatttgtttggtatctaccagatttcgtgaaaatcgttattccgccagagctcgaaacgaaaggccatcttggaatcgtaaaccctggccagtgaattatagggtagatagataaatggaagtagtattttgctatacttgtggcatgcacgacgaggatagttggtaggcctaccctcgatggatttgcatgcgaccgcgcttgttgttcggtcgagagatacggcaactggcatgagggaaatatattggttgatgaggaaactgttttacgcgagagttgtctacgccaactcgctttgctggcggaaaagctatcacgtgaacgttcgtggaaattggttcacgcgaacgccccttttccggatcgtttctgtatactaactgattagatcgctgtaatttcagatcaccaactaattagatttggagatatacaacatggaccttgtgggctatagtagtttaaattgacatctttatcttatttttacttttttttgtttcttttgtgaaattattttttattctagtttgttatttattttgtgatcacaaaatatgtattcatttttaaaacataacacaacagcaaaatttatctttgaatatttttttcactattatttagagaaggaattttaaatcatatataaactttacatgtgtaaagtttacatataaaatgttactgaaaattactatgtataaagttagtatatgtaaactttatacgaataaagttacatgtataaaatagaattgtttatgttagattttagtcaaaatgagaaaagaaaaggcccggatatgatttagctaactagtgggcccgtgaagattttgcatatgcataggctaagttgtgggctggagcaacttgtgagcaagagcagacacaagttcgctcgacgcgaacagtcgcgtactagactcacccctttgctggcgcacatgccacacggctggcatgtccgtgccctcacgagttttcttttctttcatcaatttttttgccaatttttttgttatttttttattttagaaattgaatctttcatctctaattctagttgaaagtttttgaatttgagttgaacgtttcgaattttgagatcaaagtttttaaatttgagttgaacgttttgaattttgtgacgaaagtttccaaatcttagtttattgttttcaaatattgacttgatttttttttccaaatctgagtttaaagctttaaaatcttggttaacagttttgaaatttgagttgaaaatttcaaatatatagtagaaaaggtttgaattatttacttaaaagtttttaaatctaagttgaaagtatcaaatattaattgaaaagtattcaaatcttgacttggcagtttttaaatttgagttgaaagttttcaatgaaagaaaagaaatgagtttggattaagtgtgcgctacttaatttgttagcgcatatgcgtaaagtaggaaaccactcaaaggaatgttgttctcgttcatctaaaaccatccaaatagttatattttttataaaaaaatgacaacatttataccatgaaattttgtgtccaaacttaactcactctaaataaattcagcaaatgaatagtatagtggtactatatttatacccaaatttatttcctgatttgtaggttgaatttaaacttgatttttgttggagtgctagatgtcactaaactttacattgttaatttttttaaaatcttttataactatttatattgaattttcaagaaaaatgtacgcgagggaacatcgtatcgagggattagaacccactttcctggctgatgaattcggccatgcattaatacagagcagcaatcatgtctattactcatttttataatatcaattctaccgaatgcatatttctatcagtaaaataatatggaacacctcaaattaatacatacgtacatagatgagactccccaaaccagggaaatctcttggaacaacttcggtaagattgtgaggacctactcagacctaccattattttcagaagaatactctctttgagttgtaagaaactattagatattaggattaattgaattgatgtcattgtaaattcatgttattgaaaaaaaaaactattactattcaggatacctgttacgtgctactagaattttataaaattaaaaccatgccatcttcgtcattatatatatatatatatatatatatatatatatatatatatatatatatatatatatatatataccaaaatacccatgcatgtgggacccacacgtcagttccattttaatttcttcctccaccctcccctcttcttgctttccatctctgtccacctctccctcggtaataagagaggcagtggcgggcaagccatgggtgtgcggcggcacaagcaacgagagagcgaggcagcggtgaccttgtcggtgagggaggtggaggctgcaaaagcagcatctttaaggcaggagccctcgagtgaatgattgatgtgagaatttgtagctgctaattaatatggaaatttttaacctttataccttttaaattaatgtggggacttctatagtggactctaatttaatatattttacgcaaggactacaattaataatatatatatatatatatataaagatataaacatttacacgtagctccttgtttctcaaatattttatcttgatcacaatgggatgtctgatcttctgccaggtaaagattaggcggagaaggctaatctccttgtttctcaaacacctcatcgagatggctaatccctacatgcgaatcacaaaacacaaacaagaacaaaggtagattacaattcaatttgcatatgaatggttaagatctcaaagttggggtttcacaaaccgaactagcagcgaaaatgcaatgacagaaataatctaagtaaaaccctactctaaactataactgctactaaattaatatgattaggaacattctatagttagtcttagggcgtccacaccttgggcttagcccatgacacaattataaggcccaaagcacaaattagactcgggctgcatatggtatgtggcttttttctgcagattcccgacaacttaagagaatttttgatgtgtgaccaaaaccatctgaaagtagactccatacgctttccaacaagtactgatgggagctgagattccttctggatcagcagctatgtccatttgatgttgatgctgttaggagggtcgattccgaataaaaagcgtgtagaatttcatcacttactttctatggaccaaaagtgacatggtgacataggagtagatttggagaaggatattggtgtgataattccagaagcattgaactctttatctctggctgtacctttgttatatattggtagaaacagcctctaccgcatgccccgttatacatcgaataagaaaaggaaacaaactagagaaatatccaagcttatcatctattatcacatgtgaatagtgctactttaatttctacaatataattggttagtccacagcactactacataatacccttttggtgctggttgggaaaccccccttaggtgtcggttttccgaaccggcactagggaggcagcactattgattccaagtgattggtaacggtttcaaaaccggcacctttgaggcgcttgtgagccaaaaaaaaaaaaagctcgatgcatcgagcgcatccaccccccacgttgcccccataatctcaaatccacaacatcaatgaatcaaccaacatcatcacaacgaataaaccaacatcatcatagaaattacagactataaactcccgaatcaaccaatatcaatcacagacatcacacaacaaacattgaaagaacaatcaactccaccactgctcaccgtcgctgtctaccagatccgccaccgctgccaccgtcaccccgaggatccgccgccgccgggccgccatcaggccacaattgcctcccctcccacagttgggccgccgggaagtaggggccgtcgcatccgggaagtaggcgctgtcgcctgaacaccattcgccaccacctcgcgcgcctcccctcccgcaggatctggtggaggggagggcgcgcaggcccctcctagcccctgcgaggccggtgctgccttcgccgcccttccttctgccggatctgtcggagggagggcgcctccaggcagccgccgctcctcccgccgcgcgccgctgacaccgtcgatgccgccgcacgccgctcctctagtcgccgcctccgatgaaagagaagagagggtgctcaagagagaggggaaagagcgcagagagaacgagagagatcgagaggagacgagagagtttgagcgagcgagcggacgctgcggaccttatctcctcgacgcgttgtggtggggcctgtcggctcatcgccggtttttaatattaaaggttctgattctaaataaaaaccgatacctataattacttaaggtgcctggtttttgcgatttcaacccgcggaggtgggaaaaggcctataagtgctggttttagcacttccatcacctatagcgctcacatctgtttgatgttttgtagtagtacatgtaacttcattgatcatgcaagcacttcgtatgcacgctcccctttctttcacccatacaaatatttctgcaaacaataagataaaaaaactcatgaaatacttacataataagcatgcacctttgattgatgaatataaaagataggcatggttatatccgagttagcgatgttctcatcacatcttgtgatgttaaaaactgaaaataatagcgtagccatgacagagttagccgcaacatttttttttgccactaaactgtgaaatcgtatgtgatttgaaataaacagaaaaagaaaatatttgtagacttatccgtgaaatcataagtgactggaaaaacaaaacaacaaaaattaggagatattttcagaaaaagtgtaaacaggagatatttccagggaaaaaaactaaactataaaattgattttcagaaagaatgtaaacaggagatatttccagggaaaaagaaaaaaatgtaaacaggagatatttccagggaaaaaaaactaaactataaaaattaaattttaaatgtatcagagccaggtttcgatcctgggacctgtgggttatgggcccaccacgcttccgctgcgccactctgatattgttgtccagagttaatctctcattcttattatcgcgttttcttgcactatccttgatctaccctgcatgaaaacggttcggaatgtttctccataccggacgtttttggaaacggaaagtatcagttggaaatatttccgaaacttttgaaaacggaaatgaattcaatttttttctcaaaaaatggaaacaaggtaaggctactatctgtgagaaacgaaatcggaatttttttggaaaacaaattctcagatttttttttctgggaatcggaaacaaagtacgtatttctcatgtacaactgattagcttcaatcttctttgctctactagtcgagtgcccgtgcgttgcaacggatcttaaatagaaaatataatatggtttaacttgaaaatatataaatgtgtgtctgcgttgttgtaaaatagaaagctatattatatttaaataaaaaatagttattcgatccgatgtctcccagatggtgtcattcaataatcgaaagatacaaagtccaaaggaacaaatatgccatggttgtacagactcataggtcatctttgggaccaattatagtatagacaacttatgattactctaatgtgattatcattatataaaaattggatgataataaacggataaaagatgttaacagttgatgaaaatttgcaagccaagattaaacttgaatatatagagctccatccattttaaaatatatgtgtttattttgtttccctttttaatgtaagcattcttgccaaaattgcaggctgtactcaaaatagtgagatctggtgatcagataaaactttctaaatcaccactcaaagtctgaacctatattggtaacagttcatatgcaggatggaaatacataaacacatgaggagctttctcttttgttttcccgtttgtcactccatttcttttacataacaaagatggaggaaatttcaagcataagtactaatcactctttatttctgataatgaatcactgcatcagtaaaacttgataactcatgtacattgaaaaaatgtgtcgataaggatattctcgctgttttagcattgcagataaagcagaggaagattcaacagagtttcagcctacttgtgcgggtaatatgcatgttttgcaatatttttttctttcaaaggaatatttcttttagaacaacaatagtagtgcagcatgtgcatatttttctcaagtttctagtttgcataataatatcagttatcaatgttgataattcaaaaccacaaacaaaactatatattaatgccgtacggccacgctcgacacctcaacctctaggtcctgaaaagtacaaaatgttcaggttttttttttcaaagaacacaaaaatgttcgggttctagatcaatccctcaccggcgagctcgaggtgctgcggtactggatcgaccgcctcgccgtcgtcagcatgcattgtaccattggaataactaccacccatgcggcagagcattatattagatacttcagagaaaagtattttctatagaagggaaatctataggtaagaatgaaggttttatttacaatccaattcagccacttgaatgttaccaacacacaagatgcctaaaaagcaagggcaatattatgatcagcaaacacgtcaaagatttaggggtgttggacgagttatttcttattttagcaaaatatgtctctaaatggaattatcgttatgttgaccattccaaaaaaaattacctacatttaacaatgactaaagcaaacttaacatttccattctaacattctgcgtcaattaaaaaattattgctatcaacctcaagccatggacacaacacttgtttgttataggatttgttgctattaacctcaattcagtctgcataatgattagtgttttggctatctaagagacagcggacacttgtacgttagaaatatcatgttaacccagagatgatttggtccaagataccattaaaccaattatagcagcaaggacgactgctgtggccgtgcccaaagatgcacaatactccatctctgcatacctttagcctgcaaagctgaattcgttgatgtcatggtttctatacaattaagcgcaattgggcaatttgtgttgttattgttccagtatcacgaaatacaaattagatgtaatctgaacttaccttttcttacatagccttgtgaagaaatcaatagcactgagcagagaggcagagcacgcagaaagcacaaagaggaggaaagagggattagatatggggaagacttgagaatagagaagaaatcgccatcagtaatggcgactcgtggaggtggcgacggaggagccagcgggatcgcgtgacgacgacctgtcggcgggatggactcgcgtggcaccaccgaggcggtcgcggcggcgcagggaaggagccggtagggttgcgacagaggagcagccaggatcgcgcgacgacgatgacctggcagcgggatcggcagccaccgcgggatgagcgtccgaccctgaccatgcggcgcctcctctctgttccactgcggcgcggcagcctatgcacggcggctatgccctaccccgccctcgcctcatccaccgccgcaactccgacacactgtcgggctcatgcctcaccggcacactgtcgggctcaggcctcgacccctcctcgtggcggaaccagacggggatgcggcagcgcgtcggagcgtcgctggagagagaagtgatgcgatggcgttggaggtggttgcgagggagcggagatgcggagatagtgaccgagagaagggggaggatgcgtgcgccgcgtggatcgggcctgcggcggcatgcggagaaagagaaactcgatctgaatcgttggatatcacaatcgtacgggtaatattccgcatgtctgttaagggtggagtcaccaccatcactacgaaatttttaagtagttgagaaatgttcagatttaaactatgtattgaggttcttaattaaatggagatattttttttctagtctagtgattcagatttttattttgcctaatgactatttttatttttattaggccatgccatacatactaattacaattacagatgcatatagttgttctttttctccaagtgaagtgtacaattagttgtaaaaattagaaaggtgatttattgttttagaaaaagtattgaggtacaactcttcgtggattcgagaatttcagtttgaaaaggttttatattctaataaatatttaccctatacgctttgttttttaattcaataatatttgatacctttttatatccagaatttccaattccgattcaaaaaaattaaatttatgtggtttgcctagaaaaaaaaaactacttgagacccaaaccaccaaacgcgtgagtgaaatcctgaacaacttcaccgagaaaaaaaagagtgatttgcttcgaagtggaccattttataaattaggaatgattccatctacctcttcctcccaaaataaattaaattttcgtatattaatttaaacatagatatatctaaaatcttataaaaagataatttattttaaaatgaagagagtagctacgagtaattgcttccaaatcttctctaccaagctcgagcctccttccccaaaccttaccaaaagggaaacaactccatcgatcaatccacctcgaaaatgcacatccatcccttccattctatattaacgtttcaatgtacttccttcgtttaaatatatattaacttttagtgtttanaatttattgtaaagtatacttgatcaatcgtatatttccatcatttaatttctttatcacctacttcctattccttaaccaatcataatatttctttacctattttttttaaataatcatgttcaactccaaatctattttatgacggaggcagtataatttaatgaacggcttcatgcccctcgctgctacttctccctacatggtggcttatgccttctcctaaccaatcgtagcctccattgccatattattcctcctacctaaagactctgtttgagagagtttctggctactgcagtttttcccagaatcagaagctccctcaaacaacagtacagtttggtagttatgctaagccagggaaaaagaactttttgggggacatcatgttaatctcttgctgttttggccctccatggagtctaaccattgggattgtttaggcccattttttgaccatctatttgctgatgaaggaatcaggcatcgagccattggtagatatagttgtttgttactacttgtcatgttatctgccgctatgagtaggcacaaatatagcatgttttgtagaatcgtggtgcatcaacgaatttgttttgcacaatcatctgtgatttctaaattgtgtttacgcatcattttgactctcgaaatcagcattatttgtttttacctttttctttataatcaatacatgattcgttctccttttttgtgctaattatctggtagtttgttactgctccctgaaagtttccacgtttgtgctaccttagtgaacaaggatggaattcgcaattggtttggcttcaaagcgagcttaacacatttgtaggtgtttatggtacgctgcagcagtttgaagggactcgaaacgtttaatgcagtgcagccatattttttcctttcatgattagccattttctcatcagaggtagatcagtaaatgtatgcatactggtgaccattcagaaaacgaccacaggcagagaaccccattccaatagcaattgccattggtgtgtgacatgtaaatgtggggaaactgttttaaacactcgggtggacgtccacccgtttcttgca

SEQ ID NO: 7633 - DNA, 4696 bp, Oryza sativa
tcttgttgtagtgatttaatgtggtaacataaattctcaattttttttatttttgctatcacatccacctcgtaattctagatctagatctagatcttgtcatatatagagagagaataaaatttttaatatctatttattcggtgcaatcaaaaaatagttatagtagtttgtaatatgccgatgatatgattttgttagattttcctaatgtactaatttggcaagtctgtgtaaaaaaaattgaaataaactttgtttttttattaatttacaattaacctttagttaattagttttgaatagcgataagttttttcagtaaaccctacaaatttggtattaattgtgcaaaattttatgtgcatttttttagagatatggaaagtcgggaatggatgtatcattggccgaggtttttgtctccatatagaaacgaagtgtctaaatttattgttattgccaaggcacacgctgaaaagaacaatatgaggaagataatttgtgaatgtgctgactgtaagaatgaaatagcctgggacttcaacgatgcttttaaagtaaaggagcacttagtaactcgtggatttatggacgagtacaaaatatggacacgtcatggcgaagaacaagtggacgggcctgaaaatgtagttccgacacaagttgaagacatggtgcgtgacgatggttctgttgaggacaaaatcgacctacaggaaatgttacgtcatgcagaacccgaggtgctgatggggtcggctagagggttaaataactttgaagctttacggaaggtagcaaagaaatttttgtacaatgagtcgaagggctgtgacagtgagttcacaacactacggtaagttctcgaacttatgaggttgaaggcgatacatggatggtctgatactagtttcgacagtctgttataacttctgtagaaaatgctcccgaggcctaactcactaccatccagcacatatcaagcaaagaaactcatatgtcccctttcacttggtgtggaaaagattcatgtgtgcgtaaatcactgcatactgtacaggaaagagtacgcttctttagatgaatgtccaacatgtggtgctagccggtacaaatcgaatagcaataatggcctagaaccgtctgatacaactgagggacgacagagaaaaatcccgcagcttgtgatgtggtaccttcctgtcaaagaccacattaaacggatatactcaaacccgcgagatgcggaactaatgcgctggcatgaagaagggcgcaagaaggatgggatgattcgacacccgacagatgctcgtcagtggataaactttgatgctcagtatagagagtttgctaaagacccacggaacattagatttgccctgagtactgatggagttaatccttttggagacatgagcagctcacatagtacttggccagtgcttctcaccatgtataatcttcctacctggctttgtcaaaagcgaaaatacgtactactctgtatcctcatacagggaccccgtcagcctggtattgatattaacgtatttcttgaaccattgttggaagatatggctgatttatggaaagagggattgaaagtgtgagatgagtacttaagggaatacttcacagtgaaggccatcatcttcgtgaccattaacgattatccagtaatgttttcagtttcaggtcaaattaaaggtaaaacaggatgtgtaatctacttgaatggaacgtactataggtatctcccgggttccaacaagcttgtgtacatgcggcaccggcggttcctacgcacaaatcacaagtaccacaagatgaaggcggagttcgatggcactgaagagactaatcctgcaccaaaacctacatcgggagaaaaggtgtgtgcaatgacagaaaattgtttgcgagtttggaaaaatgactaagaaaccatcaaagggaacaaagcgcaagaaacccgaaaagaatatgaaacaaggggatagtaagaagcaagatgatagttcgaagccagatgataaactccctcccccattcaagaagcattccatattttttaagtacctcccatactggaaagatctggaagttcggcatgccatagacgtcatgcatctagagaagaatgtgtttgacaacataattagaacattgttggacatgccaaagaagactaaagatggtctgcaatcaaggatggacctagtcgagatgggaatcagggaagagttacaccctcaaggagagaagaatgacaaagtatatcttccaccagcctgtttcacactgacacctgaggagaagaagtcattttgcaactcactccgtgatgtcagagtcagtcgactagtttccatgaaagatttgtcggtatctggttataattcacacgactgtcatgtcttgctcactgtgtttcttgaaattgcaataagggccataaaaccggagcatttaaaggttactatcacaaggttgtgctactttttcaacgcagtgttgcagaaggtcattagtctcgaagagttaggaaatctccgtacattcgcacatgagacacagtgccaacttgagatgtgtttccctccgtcattttttgatatgatggagcacctcattgttcacatagtgccgcagatggttgcgcttggcccattgtacctccatcaaatgtggtcatacgagcgttacatggcggttttgaagggttacgtccgaaatcgtgcacatccagagggatcaatggttgagggttatagtactgaagaggttgtcgagtgctgtattgattaccttaaagatggatatgcaattggagtacctgtgccccgacatgagggcagattgagtggcaggggaacgataggaaagaagagattcgtcacccatggtcacaaatcattccaagaagctcacttcagcgtgcttcatcagtttgctatcgttgagccgtacatcgatcaacatatcgaacaaatacgagctaacaataagggtcgcaccaccgagtggataatgaaagaacacaagcgtctcttcatagattggttgcgagacctagatttacctgagggacaaactaccgatgaaataactatgaagcggttggcttgtggtccatcaactacagtaaattcttggtagggatatgacattaatggatactcgtttagtacaagagcccgagataataagacctgtacacaaaacagcggtgtccgtgtggaggcaattgatgaagccggggaaaaacaatcatacttcgggtttattgaagaaatatggtaaatcgactatgggcatacaatgcaattccccatatttaagtgccagtgggtaaaatacccgaacggggtcaatgttaataagttcggtcttactgttgttgacctggcgagtgtgggtcacaaggatgacccttgggtactcgccaatcgcgtggcacaagtgttttatgtgaaagacccatcaaatttgaagaaagatatagtgctacccgggaaacaaaagatattgggagtggatggggttgaagatgtcgtagattacaatcaataagatagtatgccactttatagtcagtttgtacagaagattaagaatgtcgagacatctactcagaagaccgtgaagccttacatgcgcatggacggtgtggggaaaaatgttaaagggtaatgattgttgagtcgcatgtaagcatctaagaagttagtagttatgtaatggtggtatgttaggtgatgtgtgatcatatcgcaaattgacgaacaattgtactcaacattttgcatattagtttgtactaatttttatacaattgcactcaacattttgcatattagtttgtactaatttttatgtgcaattaccatttgtagggtaacatttacagttttttattttttaaaagtttttttaaaagaggtttaaaattttagtagcattttgttatgttcacttaccattatttgaaaacttattttaaaaagatttcaatcaatggtaagtgcacatataaaattgctactatatgttttttaaagtagtaatattaatgtttgaaacatttaagtaatatttacatttgaaaagtagtaatactaaggtttatctacttgtatgtacaattaccttttttattacaactactgtagacatgttcaaatcacaaaaataattttaaaataattctgaaataaatagagtcatccttgtaaaaatcttcgcaggcggaccgtccgcctgcgaagatcctttccctatataagggcaagcccgcggcgccaaaatttctaagtccaggcgggaaccctagaaattttggcgccgtcaggctgccaaattttttcacctccgccgtccttcgccgccacccgcctgcgaccttcaccatccgaccgtcgtcctccgacgccgccgaccgtcgtcctctgcgcgccgcctgccttcgagctcgcgccggctgcacgctacaccgcgccaccggccgtcgatccagctccaccgccgcccgctcccgtagccggccgcatcgccaccgcctaccgctccaccgccgagctccaccgaccgccgctccaccgctccaccaccgccactgccgtccaccgcgcgcgcgcgagctagcgctccaccgccggcaccgtccatcgccgccggccacttccccccc

SEQ ID NO: 7634 - DNA, 50230 bp, Oryza sativa
ttccccccccccccccccccggcccctccaccgtgctgccgaccactccaccaccgccggccgctccacagccgccgccgccatctctctctttctctctctcgcagtcgtccacgagcggcttcatcggcctttcgtcgtccacgagcgaagacgtcctcggccgaacggcttcatcggccggtcatcgtccacggccgaacctcgtcgtcgacccttccttcgtcgtccacgaccgaagctcgtcgtcggccgttcgtcgtccacggacgtgtgtgaatgtgggtgtttctttttatatgtgtgtgcatgtgggtgtgagggggtatatatgtgtgtgcatgtgggtgtgaatgggaatgaggggtgggtgatatgtgaatgattgtgaatgtgaatttgggaatgtgggtgatatgtgaatgaaattgggagggtatgttaaattttgcaagatatgtgtatttgtcaaatttttttaataacatgtgggagggtatattaacatttttttaaaaaaaatatggaggatatgtttgcctttttatttttttttaaacaacatgtcaaggaaatgtaattgttaattagtgcactacttgataataacatatcaaattttgtacaaatttgtttgtactaattaatttagcataatagtaagtactaattaataatatttcgcaatttaaatttgtttgtactaattaatttagcataatattaagtactgattaatagcataagtactaattaataacatatctattctagcataatagtaagtagtaattaatttcgcaatttaaatttgtttgtcctaattaatttagcataatagtaagtactaattaataacattttgcaatttaaatttgtttgtactaattaatttagcataacagtaagtactaattaataacatatctattttcgctacgtgttaatatgggaatctcagagaatttaaatttgttcatatgacattttgttaatatacagtttatttttgtacaaatttgtttgtactaatttgagtaatttaaaatgtggaggataacttttttttatgttagaggtttgaaacgatggccgatagtactaaagggactaaagagaaaggtttaggggagcaagagcagtcccttgctgctgtggttgctccggaaccaacggtcccaccggaagatagttccgatagcgacgtagctgacgaagacgatgagtactcgtcgccaagcgatccttgtccaagcccaagcccgaagagaaggaaaaagggcgacggtgaagaaggcgacaaggattacattccccctaaagaaggggtaagtaaacttaatatgtaaactgttcaccgtgactttcatgtataccttctcgtaggaaacggcgccacggcgatcaaaacggcagccgaagaaaaaagttccgtcgaaagacgacgaggtaccagctaacacaaccggctcaaagaaagcgaacggtcagcaaaggcgaagaaaaggaagggtgagagaagcgtgaatagaaaggatgaagggttccatattgttactcatgtttcgccaaaaggagagccgctcgcccctaagacggcatgtgcgaaattcagttcacagtgtggcataatagtaagggaaaagatccccatcacggtcaaggactgggatcatgtatcgaatggggataaggaagtcctatgaaaagagttgaagaaaatcttccagttcccggatggattagaggcagcagtgaagaattgtgcactgcaaacaatggccaagtcttggcgtggttggaaaaccaccttgaacaagaaatttgtgaagacgggacgcacactgtttttgacgtatgccaacataaccccgaatcaatgggacaactttctgatgttgaagaactccccagaagaaattcaaaggagccaaaagtatgcaaagttggccaagaagaacaaatttcctcatcgcttaggctccgcgggatacgcaccaaaggtggagcagtggacaaaagaggaggaaatgaggaagaaggggcaaccagtactaatggaggaatggacacagagatcaaagaactgggtaagagctagaactccgaagatcacggatgaaggcaaagtatcgtttgaagatccggagctgcagagcgttgccgataaaatagagaatttatccagttcacagaagaaaggatttttcaagcctaagagggagaaagatgtgctaagtacggcgctgggtactcctgagcatgggggaagggttcgaggtgtgtcaagctagatgagttggaaggaagggttcaaacatgacccccacaagaagcgtgaagcgtataaggataaacttagagagaaggggctgcggagtttgaaaggcaaatgatggatttctgcgtcaagcacatgcttttgcctcgccccgaaaccaaagaacctgagccagattaccccttcgatgacctcaaagagaatacaccctgcagattgcacgttcccattggacgctccgggaaaactcttgaggctgctacggccattgctatccctaggagaacatataatgaagagttcatacccaatgcgtatgccaaggtgcagccgcaagtggtccacgaagggtttgagtcctacgacattgacttcccgactgcagatggtgtatccatacttggggatgcggtcgatcttgtaattctctagcacaagaatgacatatccttttggattgggcaccgacgccacgcgaaaacctgtggtgccaaaaccggggttgggaaaacctccgagacctcctaagaggaaggtgactgataaggcggaggaacccgagatgtaaaaggaaaatccagtgccggaagtgccaccagagattgcagtgctggaggcagccatggagattccagtgccggatgtgcccatggagattacagtggcagaaccagaggtgcaatttgtggcatcagtcgggtcagaaatagaagaagtaccacgattcgaatgggacggtacagagccagaaatatttgaagacccttctcctacgaaagaccccgaggtgcaagagaccacggtccctgagaaggccactaccagttcagaggtgcctagagcggttaggagccacaactccaagtccaaagataagaacaaggagaagttcatggtaactgtcttcagaggggtaaggaacgtgccaagctcagagatgatgacccccagaaggccgctgaactagccgggccaacatacttcgcaaccaatgattgcccggaaaagtacgaacatgggaaagcactcttgccggaatgggcactgaacgaaggaccatgggagatgaaaaggttacataccttctacatggaggccagcaagaaaggcttgggcaatataacagctcgatcgctggcagattgtttcggtgaagaaggttacgtatggctagatttctcatatctccacaccatatatcgtcgggataagatggacgtcaactacgtcggtgtttggtgcatgtgagtatgagttttaattaattatatgaaaaatatgtacaatacaaatccatgtgattgttactaacaaacttcttctgcaggatgcaatacatggatgctaagaagaaaaaagaacctatcggcttcttgaatccaactcggatctgccaaacacaacataccgtgaggctagcaccagggtatgaccaactgaagggcatgaatccaaaagagatagctgaatataagaagggcttgcacaaggagaaattgattactgtcacacagtacattggacgagccttcttgcactttcaaaataagagagtcgtcatggccgcttataattttaagtaagtccggtacatttatcttctgcacatatgtcttattttagctggtactaactaactatgttgttgttaatatgtagcgatcattatatctgtttactcatccaccctaaagacggaaccgtggtagtcttggaccctctcaattacaaacaccaatcatacaaagaatttctaacaatcttacagtagtaagtgattatgactcttgcatttttatatgaatgtattataaataaatatcctccttaatatgaaacggtacaacatccatatagtgcgtaccagtactacaagttcaagggtggagaacaaacccgaacaagggagaagctgctagtacgtacctattgaccggtaatattccactcacttaatgtaactgccatggaagcaccactgaagactggcttctccgaccttccacccgctaccaattgtttcactaattgcaaattttaactattcttttatgatatgtcctgaagtgtcacaagcaaccgcgaggaacggtcctttgcgggtattacgcttgcgaattccttagagttaatggaaggtacaggattaacgcggaggatgtaagtctctatactatgtgctagacagcttcacatatttatgatactaatatattgtttatcttcaatgcatgcagttgccaagattagaatgtcgaacaagttttgacgatacaggcatcaaaaatgtctaacgtgatatgtgccacttcatccaccatgagtgctgtcatgtgaaaggagatttcttcgaccaagagagtgccctagccacaagtgatgaattcaaggatcttcgggagtggaacaatgctatgccataatgtattaaatagatggcgtatttgaagtgacaatgtaaaaaaatattgtaatatatatattttggcaacacttttgagtaatgtaatatatgtacatttatcagtaccaaatgcttgataatcttccaatatatgtacataataatctacctccaagaatttttattcaataatttaaaagtaatttacgggcaaattattattaaatttcaatattttctacctatcttcgcaggcggaagtttttttttgtaggcggccgattcttcttttcgcaagcggaccggactagccaacgtccgcctgcgaaaattatcttcgcaggcggacggccgccccgcctgcgaagatcggcgatcttcacagtcgttggcttacaggcggacggctgccccgcctgcaaagacccttttcggccggttgcgataatgcttttcctagtagtgggcagcgactgatctgattcctccacttcgctttccaccatatcgtccgccatgtcgagcttctgctccgtccttgcagcagcagcgaggaagccgctgcgccggagctccctccagcggtgattcatgactcgcgaggtccggccgtagacagcgtggccaatcttcttccagcagtcgcccaggcggtagtggaggcgtaggagctcgtcgtcgtcacgggcagtgaaggggcggtggtagacgtcgcgggcgaggtggtggcaccacctgtcacggcacaaccttgcagagcggcgtggcatgatcctggcgaccctactccagtggcggaagccgttctccttgacgaggcgaggcaaccaaggatgacgtaccaaagtaccggtaaaaacatcttcaatttttataatagtaaagaattggtattttcttttttttcaaacttattttttgaatttatttgaaattcatcaaagtgagcagtacgcattcgagaggggatgcgctttgggtgccattattgtcgaaaggttatacatgaaaatggaatataggaaatgttgacactatggtatacgcaagattggaatagggagatagtttaggtctttagtagtataggtaagattggaataaggagatttaggagtataggatatattggtactagggtatacatgagatgagaatagggacatgggatagagagattcttatataagttctgacccctgagatcaacggaatagtcctattcctgtttatatgtatagctccaggatgtatcagagatagaatacaaaatgggagtaagctagctaatctagcccatttgtcatttaattcagaaaaaattgctacacaactcaattttgcattaatcatactttcctcttgctgttatatcgcacctcgcacgagacatgcatattacattgcgtttaaggtaataggttacacaaaaatagtcatatactcatattaatgccttattgccataccattatatgaatattattgtaaaacaacataatcgtcatgaccagatgattggaattaatattgtttgtacatcagtacatgaccaactaaaaggttgtacagctaaaacaaggaaaatcattacagagtacaaaataggccagtagctagatttcatcaaactgccatgcacgcgaaccctagcgcgaggctgccggccaggggatccatcacgtggtcagtggcaaggctgcaagaaccgaagctcgaggcaagagtgtccgcaagggtactgcgctgcaactctagcgacggcagcgactgatcagctggctcctccacttcgctagtttccaccatgtcgtccgccatgtcgagcgccgccagctccttccttgcggcagcagcgaggaagccgccgcgccggagctccctccagcggtgcttcatgacgcgcgatgtgcggccgtaaacggcccggccaatctccttccagcggtcgccgaggcggtagtggaggcgcaggagctcgtcgtcgtcgcgggcggtgaaggggcggtggtagacgtcgcgcgggcgaggtggtggcgccacctgtcgcggcacgacctagcggagcggcgtggcatgctcctggcgacccggctccagcggcggaagccgttctccttggcgaggcgctgcagccgcgcgtcctcctccggcgtccatgccggcggcagcttgaggcggacgatgcacctcgcgcgaggcggcggcggcagcggtggcgtcgccatgatcacctcctgatccatcgcgacctctcaatctgctcgagctgagagctacggcgacgacaagtgaggattcagatgaagaatcgcgattcaccggtcgatgatgaaagacagggcaacgccgttgcactgtatacatacctatatagcgctaattccttcattcgtgtcggattacgaatcggagtcggagtgattaattaattagcttagcatgcacgcgtggattaatcgctagcttcggactccgtatatttactaatagtctaatagtgtttccaatcgaaggaaagtattcaagtgcaacgtaacggtgtttactatcccgtctgacatttgaaacaaaatcatgagaaaatctatgaaataccatcgacaagcactttaatcccataaatgccatcgacatacgcaacttcctgaaaatgccgtcatacaagcctatttcttttgaaaatgccatcacaccgttagtccacactgttagaacgaaaaaaatttacaaaaataaccaaattgccctaactccaaattatactaacccaatccagctcccgataggcgacaattgcgaggcagcgctcacaggcggcggcaacgtgggccccccaggcggcggcgcggggctcccaagcggcagcgcgtcggcagcaagcgttcgtgcggcggtcccaggtggtgagacggccgctcccaggcggcggcgagatggccgccaagcgaacgcgtggcggtcccaggcgacggcgtggggctcccaaacgacggcgacgaggcggcgctcccagatggcggcacggggctcccaggtggcgtcgcggggtccccaggcagcgacgcgtcggccgcaagcgcggcggtcctaagcggcggcacagcggtcccaggcgacggcagcgaggtggcgctcccaggcgacggcgcagggcccttgggcggcagcgcgtcgttcgcaggcgcggctgtcccaggcggcggcacgggcccctaggtggtggcgcggcggtcctaggcagtggcgtggcggcagcaagcgttcgtgcggcggtcccaggcggctgctcccaagcggaggtgcagggctcccaggccacgacgcgttagtagcaggcgtttgtacggcggtcccaggcgtcaatgtgacgggcggcaaggaggtggcaggtggcggcacaaggagtgactcaagggcctcatgcatcggcacggtggtcgcagggccgacgagttttgacttgattattagtctgcacgttcaatgcctaaaatatgtaagagaaaatccatgaaatgccattttagataaactatttcagtgagtggtgattatgaaacacatacatttttaaaagggcatgtagcctagtggttgcagtgacctgagtagcaccccaaggtcctaagtttaaatctccataggatcgaatttcagattggattatttgagggctaaattccctatttgataagctatgtttctaaaattaaaaaggctgcatatatccagttggatgtagaggccggttaaagaaatacccttctaaaaaaaagaaacacatacattttccttgatgaagttcaagcaaccgtcattcggcacaaaggcagcaatcttcttcccattcttcaccagctgaacacgagcacacttacagatggcagagtttggctgcttggcctcaataccactataatgaaacagatggaaactagttcaagttaagaaagcatgagtaataaaattgagcatgagtgttgtccaggcgtacatcttctccaaaacaatgcccttggcatgagatgatccagcaaagggtttcttccactcattgccaaagtggctcttcttgtatgccttgtcggcccatctttggttcctgcggtgggtcttgagcttgcgcccagctcccataccacatgttttcttgcaatgaaatttcaggaccaacttaagacaaatgctacgtcttacgattttgccaaacatctcccgcgtgatttttttcctggcatttgacgtttttttggccacatgatctttgcacaaggcatagaagcccacgaacagcccagcagcccatcatcatgcctaaccctgattgctaactctaaccccggtccactcactgccccacacgaccacgcccgcactcgttccccgttcacatcacatcgcacacacgccacgccgcttggatctgggtccgtggccagcacccgcaccgccgtagcgcgcgccaacgacggtgctgacgtggccgtcttccagcagttggtgcgcccgccctcatctgtcccccttctcgtcgatagatccagccgcctctttgccttccccacacgcatggatccatcagtgacggcgacgggaggggctgatccagcgcccgcttggtgatcaggagctctccgtcactctcccacttctctcttgtttcctctactctctctctctctcccactccgatctggcaccccctccttccccgcaggccgcacatatcccaccgcctatctacctcacacgcgcgtggcctgatccgctccctctcccactgacaatgcgggcctagtctggcagtcgcggaaacggacactacggttgctgtctttttaagatgctatagataacaagaatataaggtcattcacaatgcatctacatggcatttggcctcaactctccaactagactgattgtatacgtggagaagaaaaggaggtggggcccatgtcttcactagcttcgcgtgtccgagagcctcgtcagaagaaaacagctttttcaatcgcatctcagcatctgcacgtgagaaagcatgacacaaagagagaagggggagaagctcaccgaaaaaaaggtaattacaaagagagaagggggagaagctcgccgaaaaaagtaattttagtgatggggctcgcataggaaaatgtttggtggggtccacctgaatccatgccgcattgtggagaggaggagcttcgctgttttctgtacgtggctgtttaggctcctcggaaaaacaggacgcattgctaatgccccaacactcattctaaagctaagagcacataacgtggcaaatggaacattccctgcaaaatgcccacaaatcaagagaagtgaaatttaatggtacagtgtactacaagcaacacaatctaatcggtctcctggacctgatggccttaatgttggtttttatagagtttcttggccttggattaaatctgacatcactcaaacggttcaagacttttatgtttcaggccaatttccaaaaggtatgaatgatactaatattactcttattcctaaaaaaaattatcctacttctcctgctgattttaggccaatcagtctttgcaatgtttcttataaaatcatttctaaatctttggccgatcatatcaaaagtgttcttcctgatttaatttcagattctcaacaagcttttataaaaggtcgtcgcattgcaaataatcttattattgcccaagaaatagttcactctttcaatttaaaatcttttaagtaaaatgcttttctgctgaaacttgatcttgcaaaagcctttgatcgtctagaatggaactttattgagaaggctcttcgtcgtaaagggtttcatggtcattttataaatcttgtccttgcttgcattaattcggcaaacttctctgtcaatcttaacggccagtcatatggtcacttttcagctgaaagaggaatacgacaaggttgtcctttatctccttatttatttattcttgcattaaatgaactatttgaaatgatatctaatgcaattcaaacaggtcaagtcaaaggagcttctttaactccaaatggtaccattattccggccctgtatagatgggactaaaacttttaagtccctatcacatcggatgtttgaaaattaattataaatattaaacgtagactattaataaaacccatccataatcttgaactaatttgcgagacgaatctaatgagcctaattaatccatgattagcctatgtgatgctacagtaaacattctctaattatagattaattaggcttaaaaaatttgtctcgtgaattagcttttatttatgtaattagttttgtaagtagtctatatttaatactctaaattagtgtctaaagacagggactaaagttaagtccctggatctaaacaccacctcactcttcaatgtatgctgacgatcttatgattgtaggtcaagccactcctgaagaagctagaagcatcttccaaattattcaatttttttgccatcaatcaggtcaaactccaggttggaataaatcttctattctgttcagctctcatactcctatcctatcagtgtcactcaagatattttatccattttccctgtctccttaatgaacaacaattccaaacatcttggtcatcctctcattctaaatactaaagccagaaactctgcctacaactttatcattgaaaaattcaaaaccaggctgtcaattattaaagcaaaaactttatcccatgctggtagactttctttaataaaatctgtgtttgcttccatccctattttctatatgtctaccattttacactccaaaaaacttctatataaattaactgccattatcaggaaattctggtggacaggtaccaatgatgaagacagtaaaaaaggtatttgttggaaatcttggtctgacatttgtaaaccttttgatcaaggaggtttgggaatcagatatttactaactgttaaaaaaagtcttcttattcaatgtgcttggagaattattgaaaatccaaataacttggtttctaagatcctaaaagaaaagtatttccctcagggctccttttggaaagctttaacaaaaattcctaaatctactttttggagttctattctgaaaattagacatcttttggataattctatcatatggcaactttctcaaggtgatatctcaatctggaatcaaccttggtgttctgtttggaaatcccttcctaatcatattactgattctgcaatgactctttatttacctacaaaagtttctcatctctggaatgataggaaagaataggatatttccaaagtgtctcaaatctttgatccccaagtttcaaatgaaattttaaaaactccaattgtgcattctaatactgatgacaaactttactggattcataactcaaaaggtatttgtacttctcaaagtgcttataaagtcttatcaaccaactctatgttacctgctgctaatatttcaaatttgcaattaaaccttttaaagaaaacttggaaatgcaaatttattcctccaaaagttaaaacctttatttggagacttctcagaaatgctcttgcaactgcaaaaaatttgaacttcagaattcctactatttcaaactcctgctctcgttgtagtttgtctgaatcttgtgctcatctgttttttcaatgtgcttttgcaaatctggtttggaaactgtctgaatttcatttagatacaatcatcattgcatccatgcaaaacatcagtgatatcttagcctatgttctagctacaaacaactctgaattaagcctttaaaaagcttctattcttctttggatgatttggaaagctagaaatgacttctactttaaaaagaaaaactgggaacccattcaggttaattttgcagctcaaatcatgtcttcaaactttatttcttgtcttgatactattgatgaagatcatgaatctcaaaatcatgatgttaacagctggacttctctcaattctgcttcagtaattcgctgttatactgatgcctcctggcaggatggtaatactggtattggaatcttcatccataactctgatactcataaagccctatttattcaagctgcttctaatttcttctcctctcctttacaagctgagcatgcagcaatcatgacagccattttgatttgtcaaaagttaaatattattgatgttactcttcttttagacaatcaggaattagttagccttttgcaggttcaagactattattctcacgaacattattggagcttaaaccctttactttaagatcttatttcccttgcaggaacacaggctcttaacatcaaatggatttcaagacaagttaataagatggctgactttctagcaaaaaaagcaaggaataaatctagacaaaatctgaatcaaatagtttgtcaaaatatttcccacttatgttcccattctgactgtccgactaagacagctttggaatcttctccttttatggagaatgtatctttggttgatgtattatgcttctaagttcaataaagctctaaattctcaaaaaaaaaaagctactgcaaaatgaaatatttgtagaaaatttttttttaccatcatctgtagccatctgcggcagaacaatcccacatgaccatcatcagtgttaaccacacgaccatcttcagtgttaattaagacacaatcccatttcaaataatttggagcaagaaaactggcagaaactaagatcaagttcttgacaggctcctaacaccaaaaatattgtatgctaccatgcataggttctcagattcaagcatttaaaccaagggacgggtgattacacagcagcaaagaattaatatcgcttatgaaaatgtttatcactgacggtgtcaaatctgaccagcactggaccatcaataagctcacattacctacatctaccgcaatctcactctctaccaatccaagaacacacaacaaacgaatcaaccaaacatggcccatagctacacttcttattacaaactaaggcaaagagatagagaaaatgcttctagtgaagacacatgttaacacgagcgaacgcaacggatcgttgcagaaaccactacaatggacgaaagagaagggatcttttgcacacaccccatggcggcggagggagaggccgagagatctccgaacggcgatgcgagaggagggcttcaatgacggcggcggctgaaagtggagtgaggaaggaagacgagggagattctatagtagcaaatctcagcgatttagggttagcgtggtgcgcgctgagattcgtgttggggtgatgggtataatcccacagtcctcgtgaggtttggtgagagactacgaggcggctaggccagttcccggcccaccatgtcattcattgtgtgaacaggtccaaggcctcctattttaaaaaaaaaaaatttcgggccaatttgccagtagatttttagtttgttttctcaccttggacgtatataatcattccgatgagcattaaattttttttaggggccctatgaaaggatttgatccgtagaaaatttcagaggaaatatgacatgaagttctaaactattgtaactttggaaaaaatccaactacccctctaaactttgattggaagttcattaagcaccgtgtactttgaaatcggatatctcttactatcgaatttcatgcccgttctcgagcgattagccccgccacgtggcttcactcgattccagggttcgagtcgtgcgcgcatccgttggattagaaatcaacgggagagatccacaaaaggatctatttataaattttaatcttccaagggagtttatctcaaaatgtggcatccatcatccagattccagagaaatcctttcctcccctcgtctcgccgctttctcctccgccgaatcgccgattcacaagccgtcaccggcgttggtcaccgccactccacatcagtgcgcctccctcgccaatccccatcccctaaaatccctagcccacagctccaccatcgtcacttcacctctccgcgcctccgctttccccccgggcccaaaatttttcttttctccgcatctcgcgagctgagcgttgtcgcctcctcctcatctcctcgctcccttgccgcccgtccgcttccctggcgcagctctcaagtgggagggctgcgcgccggctggaagtctcttgactcttcccgttctatcgatccctgcggtgggagagcaccggcaaacagtggtcgtacacctcgccgatcgacttggctcgctgcggcggacgaccactatgacgtcgtccagcagctactgcatatcgactaacctcactccgtcggatcccccgcctggaggctctctgggacgacaatgccggattcgccggcgtgacgcggtaccgggcggacggggaaggctcgaacggccggttgcggtgaacgctccttggtgtttaggctggagatgataatcagggcagtccacaccgccgcaagaggcggcagcacggagatgctgagggggctcacccgacaccactgcaggttgaagtttaccacctccgtagaaagttgtcaagtgcattcctagcttacgtcaagatagagctggtgtcccctgcagggagatgctgttcaagatttatgagcaatacaatttccgcgatgatcgtccaggagtattgtccagcaacggatagtagaaacatgaaagaccaaccttttcccaccgcttatggggaatccttaaatagctatagttgcagctcatttttttgagagccacacaatgggatgctccgtttgctgttggattgaaggaatgatctaacaaattgtattattgatggtttgaaaagtgaggatattatgtttagagatgatcattacagaaactgtacaatgctcgtatatctgttcgcttgttttatatttttagatgattaaagtctctttgcggactatttttctaataataagaacattcatatattcatacattgggtctaattggactggctcatctacactttacatggcgaaaataatggcccatcaccaaatatgcgcgtcgaagccgctcttgctttctagttcaactccctgaattttctaataccatttatataagctcataacatggttttgcataattatttttatctaatttgtactttctctgtttcataatgtaagtcattctagtattttctacattcatattgatgttaatgaatctagacacgttaatatgaatgtagaaaatgctaaaatgacttatattgtgaaacggaggaagtatataatttagttgagttttatatctgttatattagctattcgaggcagctcgttttagcttttaaatacgcaagaccaacaacattcaaatcaagcttaggggataaaatgaacggtattataaagtgtaggtggggcatgatttttatttttgttttctcacctcggacatatataatcaattaaccattccaaatttccaattaaaattgtttttttggcctatgaaaggatttgctccgtagaaaatttcagaagaaatatgacatgatgttcaaaatcatgcaattttttcttacgcgctctttctaaactattgtaccttttcgtgtcttactaccatgtgaaagcgatcaagttacacaaatgcgtttagcaaaaagcaccgaaattcatatcagttagcagagtccaagtagtgcattgtacatcgacataattgaatgagtaaacataagagcactggaattactaataattcatgttttctgttggtaccaaatgtccttccacaagggaaaactcttacatggtgtcgtacagcaattctacagacacaagaccatagcccataggcagctttattatgttgtagaacaaaagaataagaaacatttgaagtacacagcctgctcggttgaattgatatcacaatttagaaacagtgacattttggggctaggagctgatttatatacctccagcccacggccaaccactttggtgaaccatataaatttcttcttgcaatttcaccttgtgacatgtactgttgcgcatacatcgtaatgaaaatatcatgcccaggactaggcagcaggcaccaagtcatacctccaattctgtgaatgctagatctcactgaagtgtcagtataccgacaaaatttgacttttgattagagaagaaatcaaatagtccggagctattatttacacaaggtttgttatgggatggtattctcatactagtcatgtcattctgaaatgtaaggctacacctttggaagatgaagatcggctagtgacgaagtgagatcttctctcgattgggatctccgactttggagtgttgtttgacctggcttccacattccactagaaaactgcatctgacctaagcttccaacagaatagctgtgatagacgcccaatgactgcctggaggactccataagctgaacactgctgcctcctaatccatggctcatgctgaatggatggggctctgacccagcaacagtaggactcagaggtgtctttgttcttgcatcacctgtgaagagaatggcaatacgaagcaaatttaaaagttttgtctataggacggaacctcaagctacagaaaacaaaaggcgagtgcaacagccacacagaaattgcaggatagtttgacttcacataatgaaagaaatctctttccatactattgtgccttcattgttaatagagttaagtaacaaaaactacttttctataatagtatattaaataattaaaaagttcagtccaacataataattaatataaaaagaaaaaagaagcagcttttttagaatggaaagatgtttgattgtttaaaattaaagagatgatgcatagtatatagtagacatatagtataacactttatttggttttccaaaaaagcagagcaaccaatggctatacgtctactaaagaaaaagaaatggtacatatagtatcaacagaattgtcagggtaaaaattttgtgcttctagaatttaagtcccaaccccacagacaatagatgctttttacatgaggaaacaccttaaagtaacagcaatgtcaaggaaaaaaaaaactcaatacatacctgaagtaatatgactccatagatgaaatctgaaaggtgatcccatgctaagcacaggactgcctgcactgttctgcctaaaaagtggcagataagacttgcggaatgatcttgggattgaattgctgacacacaatatggcacatatgactaacacaattgaaatcagaaacaacacaataagaatatttggatttatctctcggtggagtattctgtatccttgaatatcgattcgtgtagacaacacctgtccagcctctaacaaagcaaccccaagagtccaagttatactaccagagtcaattatcacctggttatctttgatctgcagcccctctctcagaagtgatgtaatataaggagccctgaaacaatactgttctataaaaggttgtggtggaacactactctttgcaaccttccatgttttttcacaaaattcctggcctctatttagaacatcaatgagagtggcatcggcagtcaaattgaaaaatttaaaaaccacatagaaaccagacatagcataaaactgcccatgtggttgcggaaaggtactaggaagagcacaaggtttagtgttgcagtcaactgagcttgcattggaccactcagaaagattcactgttaattttgcaagggcactacattcgttccactgaggcatcccgatcagttcaactgccattccctgcttctctttgcctgttgtcttccctccaacactgggacttccatctagtttgagcgggtggcagtaagaacaaatataatcttctttgtatcccgtttgtagacaaggatgcttaacctgaacttttccattaccagctgcccctcccaacttcttcacaagatgtgcaacagatttgtcaaatgcatcatttagcccataaccagacagagaataagcactaagttgatgactgatagaaccaatccttagactcatacttgtttcatcctgaatggaattatcagtctcaaatgtcacctgtaatgatgatccacctaaatcaagtgaaccatatgtcattttagaagatgaggtgccaagcatattcaaatgatggttaagagctatccatccataataagcttcatccatgccactgataatcttgactctgtctctagaacacagaaacgatgaattcttcagaatatcccaagccttgtccagaagccactcagaatctgcactcggtagcttgcgcacaccagctgtggcatatagaaaagcaggcgtgtgtttgtgtgcacgtctaggaatcaacttctcagccattcgaaggaggggctctattgtcatctttaatccagtttcattgtgaacaagtttgttcaacccaggttcagtctccattcgctgataggctcgcccagttaatttaccagattttttcttaggagcatttcctaagggtttcaaagcaataggaaatgtgtttccatcgtcatggttaacagaccattcgtaaacatacactcttgtcccagtgcttccacaatcaagaataacatagtattcagggcttccttccgagagaaagacatggaaatatctcaaagaagcatatataaagaacaccaaaaggaacagagcaatagcacaaccagcagctctcatgcatttctttcgatttgttggtgatgaggggggtgttttctcttttgaaaagcttgcaacagcgccatctctttgaagtgtgcggataggttttgcacgccctgagaccaaatcactaccagtgctagagcccctttctaatgcatcaattcttgagaacgtaggcaaatcttgaagtgaagaagacagccgcatagttgcttctttgtagtcagggtggcaattattataagatctcactggtaagggcaaataagcagttggaatcttggcaaacagaagtcataaggatgcagcataaataaccagagtaaattaattcaatagcgcctttgcaccgcctctgcctgcaagaaaattccatagttagaatatactaacgtggtaaaccacatatgaataaagctaaaatttgaaagatgctccgcactaactaacaacactctcgttatcaggcataagaaaaactttcctacaacaccaatgcaacactagcattgaagaaaatagatgcatcctaaattcctaatcttaggaaatatattaacactatataaatatcagtaatatctgcaaatcaactcacatgctaaaccaggttttccctaaatcctgatactaactcagtgcccccacgttaaactgctagtattcatatgcatcatcccaccgacactacaacagaaacaggtcaccaccgacgacgaactcccggctacacactaccacccataggcaaaaactcaaggatcgcagcaacgcgcccgcccccaaacacgccagcttcccctcgattccagcacccaggatcgcgtcctccaccacaccaaaccgcccgatcccagccaccgacccccgaacaacctaagatctaatcgcagattgccgacacgcgaccacagaaacccggcatcgaagctgccggattggatctggccgggaaggggggggggggacaccgacgacttacccgtcgcggcgggccggtctatgcctccatcgccgcccaccccccggcggcgcggggccagcggcggcgaggattgggagcacccgcgcggcgcggtggggcggagcagttggggcgaggcggcgatgtgggcgggggcggtgcccgcaacggcggcgcgtcgacgaaggaccgggcggtgtggggcagcgtggggtcggcgcggacggaggttgtgggggcgtcgtggcggatggaggtggtggtgacgacgtcttggaggcggcggcagctgagtggaggcgggcgacggatcggggatccgcagtaccggcggcggcggcgcggatgagattagggttaggggagggagggagcaagggtgagagggctgggtgatgaaggggcgatcgacggagggaggaatctgcggcggaggggaggagaccggcggcgaatcggggcaaggagggcggatttggggggcgacggtgcgggcgcgggttgggggatgaggacgcgcgggtgttgggggagaggtggagatgatctcgatcgttccatttttcacggccgtcgactgctgaatgtaagagcttaggagtgaaggattagctgggtccaagttcacagttccgacgaaaatcggttgaatttcagaaaccgtatgagatttcaatgagtttcattaaaatttaaatttgaattgataaaaaaaatcaaattaaatcttataaatagtatgatattcgtagaacctattgggatataaattttcaaaaaaattgatgtattccatgtatttactgaaatttacactagaaaagaaaagaaaaaataacgaattagaaaaagggaaaaaatcagtttacctctttttctagttatcgattgaaatctcgatgatttcgctcggaatttcgccaaagccgactggttttcgcgagcttatcggtaaactcaaggaatttgtattcaaattttggtttatgaaatttgtttggtatctaccagatttcgtgaaaatcgttattccgccagagctcgaaacgaaaggccatcttggaatcgtaaaccctggccagtgaattatagggtagatagataaatggaagtagtattttgctatacttgtggcatgcacgacgaggatagttggtaggcctaccctcgatggatttgcatgcgaccgcgcttgttgttcggtcgagagatacggcaactggcatgagggaaatatattggttgatgaggaaactgttttacgcgagagttgtctacgccaactcgctttgctggcggaaaagctatcacgtgaacgttcgtggaaattggttcacgcgaacgccccttttccggatcgtttctgtatactaactgattagatcgctgtaatttcagatcaccaactaattagatttggagatatacaacatggaccttgtgggctatagtagtttaaattgacatctttatcttatttttacttttttttgtttcttttgtgaaattattttttattctagtttgttatttattttgtgatcacaaaatatgtattcatttttaaaacataacacaacagcaaaatttatctttgaatatttttttcactattatttagagaaggaattttaaatcatatataaactttacatgtgtaaagtttacatataaaatgttactgaaaattactatgtataaagttagtatatgtaaactttatacgaataaagttacatgtataaaatagaattgtttatgttagattttagtcaaaatgagaaaagaaaaggcccggatatgatttagctaactagtgggcccgtgaagattttgcatatgcataggctaagttgtgggctggagcaacttgtgagcaagagcagacacaagttcgctcgacgcgaacagtcgcgtactagactcacccctttgctggcgcacatgccacacggctggcatgtccgtgccctcacgagttttcttttctttcatcaatttttttgccaatttttttgttatttttttattttagaaattgaatctttcatctctaattctagttgaaagtttttgaatttgagttgaacgtttcgaattttgagatcaaagtttttaaatttgagttgaacgttttgaattttgtgacgaaagtttccaaatcttagtttattgttttcaaatattgacttgatttttttttccaaatctgagtttaaagctttaaaatcttggttaacagttttgaaatttgagttgaaaatttcaaatatatagtagaaaaggtttgaattatttacttaaaagtttttaaatctaagttgaaagtatcaaatattaattgaaaagtattcaaatcttgacttggcagtttttaaatttgagttgaaagttttcaatgaaagaaaagaaatgagtttggattaagtgtgcgctacttaatttgttagcgcatatgcgtaaagtaggaaaccactcaaaggaatgttgttctcgttcatctaaaaccatccaaatagttatattttttataaaaaaatgacaacatttataccatgaaattttgtgtccaaacttaactcactctaaataaattcagcaaatgaatagtatagtggtactatatttatacccaaatttatttcctgatttgtaggttgaatttaaacttgatttttgttggagtgctagatgtcactaaactttacattgttaatttttttaaaatcttttataactatttatattgaattttcaagaaaaatgtacgcgagggaacatcgtatcgagggattagaacccactttcctggctgatgaattcggccatgcattaatacagagcagcaatcatgtctattactcatttttataatatcaattctaccgaatgcatatttctatcagtaaaataatatggaacacctcaaattaatacatacgtacatagatgagactccccaaaccagggaaatctcttggaacaacttcggtaagattgtgaggacctactcagacctaccattattttcagaagaatactctctttgagttgtaagaaactattagatattaggattaattgaattgatgtcattgtaaattcatgttattgaaaaaaaaaactattactattcaggatacctgttacgtgctactagaattttataaaattaaaaccatgccatcttcgtcattatatatatatatatatatatatatatatatatatatatatatatatatatatattatatatatatatatatatatatatatataccaaaatacccatgcatgtgggacccacacgtcagttccattttaatttcttcctccaccctcccctcttcttgctttccatctctgtccacctctccctcggtaataagagaggcagtggcgggcaagccatgggtgtgcggcggcacaagcaacgagagagcgaggcagcggtgaccttgtcggtgagggaggtggaggctgcagaagcagcatctttaaggcaggagccctcgagtgaatgattgatgtgagaatttgtagctgctaattaatatggaaatttttaacctttataccttttaaattaatgtggggacttctatagtggactctaatttaatatattttacgcaaggactacaattaataatatatatatatatatatataaagatataaacatttacacgtagctccttgtttctcaaatattttatcttgatcacaatgggatgtctgatcttctgccaggtaaagattaggcggagaaggctaatctccttgtttctcaaacacctcatcgagatggctaatccctacatgcgaatcacaaaacacaaacaagaacaaaggtagattacaattcaatttgcatatgaatggttaagatctcaaagttggggtttcacaaaccgaactagcagcgaaaatgcaatgacagaaataatctaagtaaaaccctactctaaactataactgctactaaattaatatgattaggaacattctatagttagtcttagggcgtccacaccttgggcttagcccatgacacaattataaggcccaaagcacaaattagactcgggctgcatatggtatgtggcttttttctgcagattcccgacaacttaagagaatttttgatgtgtgaccaaaaccatctgaaagtagactccatacgctttccaacaagtactgatgggagctgagattccttctggatcagcagctatgtccatttgatgttgatgctgttaggagggtcgattccgaataaaaagcgtgtagaatttcatcacttactttctatggaccaaaagtgacatggtgacataggagtagatttggagaaggatattggtgtgataattccagaagcattgaactctttatctctggctgtacctttgttatatattggtagaaacagcctctaccgcatgccccgttatacatcgaataagaaaaggaaacaaactagagaaatatccaagcttatcatctattatcacatgtgaatagtgctactttaatttctacaatataattggttagtccacagcactactacataatacccttttggtgctggttgggaaaccccccttaggtgtcggttttccgaaccggcactagggaggcagcactattgattccaagtgattggtaacggtttcaaaaccggcacctttgaggcgcttgtgagccaaaaaaaaaaaaagctcgatgcatcgagcgcatccaccccccacgttgcccccataatctcaaatccacaacatcaatgaatcaaccaacatcatcacaacgaataaaccaacatcatcatagaaattacagactataaactcccgaatcaaccaatatcaatcacagacatcacacaacaaacattgaaagaacaatcaactccaccactgctcaccgtcgctgtctaccagatccgccaccgctgccaccgtcaccccgaggatccgccgccgccgggccgccatcaggccacaattgcctcccctcccacagttgggccgccgggaagtaggggccgtcgcatccgggaagtaggcgctgtcgcctgaacaccattcgccaccacctcgcgcgcctcccctcccgcaggatctggtggaggggagggcgcgcaggcccctcctagcccctgcgaggccggtgctgccttcgccgcccttccttctgccggatctgtcggagggagggcgcctccaggcagccgccgctcctcccgccgcgcgccgctgacaccgtcgatgccgccgcacgccgctcctctagtcgccgcctccgatgaaagagaagagagggtgctcaagagagaggggaaagagcgcagagagaacgagagagatcgagaggagacgagagagtttgagcgagcgagcggacgctgcggaccttatctcctcgacgcgttgtggtggggcctgtcggctcatcgccggtttttaatattaaaggttctgattctaaataaaaaccgatacctataattacttaaggtgcctggtttttgcgatttcaacccgcggaggtgggaaaaggcctataagtgctggttttagcacttccatcacctatagcgctcacatctgtttgatgttttgtagtagtacatgtaacttcattgatcatgcaagcacttcgtatgcacgctcccctttctttcacccatacaaatatttctgcaaacaataagataaaaaaactcatgaaatacttacataataagcatgcacctttgattgatgaatataaaagataggcatggttatatccgagttagcgatgttctcatcacatcttgtgatgttaaaaactgaaaataatagcgtagccatgacagagttagccgcaacatttttttttgccactaaactgtgaaatcgtatgtgatttgaaataaacagaaaaagaaaatatttgtagacttatccgtgaaatcataagtgactggaaaaacaaaacaacaaaaattaggagatattttcagaaaaagtgtaaacaggagatatttccagggaaaaaaactaaactataaaattgattttcagaaagaatgtaaacaggagatatttccagggaaaaagaaaaaaatgtaaacaggagatatttccagggaaaaaaaactaaactataaaaattaaattttaaatgtatcagagccaggtttcgatcctgggacctgtgggttatgggcccaccacgcttccgctgcgccactctgatattgttgtccagagttaatctctcattcttattatcgcgttttcttgcactatccttgatctaccctgcatgaaaacggttcggaatgtttctccataccggacgtttttggaaacggaaagtatcagttggaaatatttccgaaacttttgaaaacggaaatgaattcaatttttttctcaaaaaatggaaacaaggtaaggctactatctgtgagaaacgaaatcggaatttttttggaaaacaaattctcagatttttttttctgggaatcggaaacaaagtacgtatttctcatgtacaactgattagcttcaatcttctttgctctactagtcgagtgcccgtgcgttgcaacggatcttaaatagaaaatataatatggtttaacttgaaaatatataaatgtgtgtctgcgttgttgtaaaatagaaagctatattatatttaaataaaaaatagttattcgatccgatgtctcccagatggtgtcattcaataatcgaaagatacaaagtccaaaggaacaaatatgccatggttgtacagactcataggtcatctttgggaccaattatagtatagacaacttatgattactctaatgtgattatcattatataaaaattggatgataataaacggataaaagatgttaacagttgatgaaaatttgcaagccaagattaaacttgaatatatagagctccatccattttaaaatatatgtgtttattttgtttccctttttaatgtaagcattcttgccaaaattgcaggctgtactcaaaatagtgagatctggtgatcagataaaactttctaaatcaccactcaaagtctgaacctatattggtaacagttcatatgcaggatggaaatacataaacacatgaggagctttctcttttgttttcccgtttgtcactccatttcttttacataacaaagatggaggaaatttcaagcataagtactaatcactctttatttctgataatgaatcactgcatcagtaaaacttgataactcatgtacattgaaaaaatgtgtcgataaggatattctcgctgttttagcattgcagataaagcagaggaagattcaacagagtttcagcctacttgtgcgggtaatatgcatgttttgcaatatttttttctttcaaaggaatatttcttttagaacaacaatagtagtgcagcatgtgcatatttttctcaagtttctagtttgcataataatatcagttatcaatgttgataattcaaaaccacaaacaaaactatatattaatgccgtacggccacgctcgacacctcaacctctaggtcctgaaaagtacaaaatgttcaggttttttttttcaaagaacacaaaaatgttcgggttctagatcaatccctcaccggcgagctcgaggtgctgcggtactggatcgaccgcctcgccgtcgtcagcatgcattgtaccattggaataactaccacccatgcggcagagcattatattagatacttcagagaaaagtattttctatagaagggaaatctataggtaagaatgaaggttttatttacaatccaattcagccacttgaatgttaccaacacacaagatgcctaaaaagcaagggcaatattatgatcagcaaacacgtcaaagatttaggggtgttggacgagttatttcttattttagcaaaatatgtctctaaatggaattatcgttatgttgaccattccaaaaaaaattacctacatttaacaatgactaaagcaaacttaacatttccattctaacattctgcgtcaattaaaaaattattgctatcaacctcaagccatggacacaacacttgtttgttataggatttgttgctattaacctcaattcagtctgcataatgattagtgttttggctatctaagagacagcggacacttgtacgttagaaatatcatgttaacccagagatgatttggtccaagataccattaaaccaattatagcagcaaggacgactgctgtggccgtgcccaaagatgcacaatactccatctctgcatacctttagcctgcaaagctgaattcgttgatgtcatggtttctatacaattaagcgcaattgggcaatttgtgttgttattgttccagtatcacgaaatacaaattagatgtaatctgaacttaccttttcttacatagccttgtgaagaaatcaatagcactgagcagagaggcagagcacgcagaaagcacaaagaggaggaaagagggattagatatggggaagacttgagaatagagaagaaatcgccatcagtaatggcgactcgtggaggtggcgacggaggagccagcgggatcgcgtgacgacgacctgtcggcgggatggactcgcgtggcaccaccgaggcggtcgcggcggcgcagggaaggagccggtagggttgcgacagaggagcagccaggatcgcgcgacgacgatgacctggcagcgggatcggcagccaccgcgggatgagcgtccgaccctgaccatgcggcgcctcctctctgttccactgcggcgcggcagcctatgcacggcggctatgccctaccccgccctcgcctcatccaccgccgcaactccgacacactgtcgggctcatgcctcaccggcacactgtcgggctcaggcctcgacccctcctcgtggcggaaccagacggggatgcggcagcgcgtcggagcgtcgctggagagagaagtgatgcgatggcgttggaggtggttgcgagggagcggagatgcggagatagtgaccgagagaagggggaggatgcgtgcgccgcgtggatcgggcctgcggcggcatgcggagaaagagaaactcgatctgaatcgttggatatcacaatcgtacgggtaatattccgcatgtctgttaagggtggagtcaccaccatcactacgaaatttttaagtagttgagaaatgttcagatttaaactatgtattgaggttcttaattaaatggagatattttttttctagtctagtgattcagatttttattttgcctaatgactatttttatttttattaggccatgccatacatactaattacaattacagatgcatatagttgttctttttctccaagtgaagtgtacaattagttgtaaaaattagaaaggtgatttattgttttagaaaaagtattgaggtacaactcttcgtggattcgagaatttcagtttgaaaaggttttatattctaataaatatttaccctatacgctttgttttttaattcaataatatttgatacctttttatatccagaatttccaattccgattcaaaaaaattaaatttatgtggtttgcctagaaaaaaaaaactacttgagacccaaaccaccaaacgcgtgagtgaaatcctgaacaacttcaccgagaaaaaaaagagtgatttgcttcgaagtggaccattttataaattaggaatgattccatctacctcttcctcccaaaataaattaaattttcgtatattaatttaaacatagatatatctaaaatcttataaaaagataatttattttaaaatgaagagagtagctacgagtaattgcttccaaatcttctctaccaagctcgagcctccttccccaaaccttaccaaaagggaaacaactccatcgatcaatccacctcgaaaatgcacatccatcccttccattctatattaacgtttcaatgtacttccttcgtttaaatatatattaacttttagtgtttaaaatttattgtaaagtatacttgatcaatcgtatatttccatcatttaatttctttatcacctacttcctattccttaaccaatcataatatttctttacctattttttttaaataatcatgttcaactccaaatctattttatgacggaggcagtataatttaatgaacggcttcatgcccctcgctgctacttctccctacatggtggcttatgccttctcctaaccaatcgtagcctccattgccatattattcctcctacctaaagactctgtttgagagagtttctggctactgcagtttttcccagaatcagaagctccctcaaacaacagtacagttttggtagttatgctaagccagggaaaaagaactttttgggggacatcatgttaatctcttgctgttttggccctccatggagtctaaccattgggattgtttaggcccattttttgaccatctatttgctgatgaaggaatcaggcatcgagccattggtagatatagttgtttgttactacttgtcatgttatctgccgctatgagtaggcacaaatatagcatgttttgtagaatcgtggtgcatcaacgaatttgttttgcacaatcatctgtgatttctaaattgtgtttacgcatcattttgactctcgaaatcagcattatttgtttttacctttttctttataatcaatacatgattcgttctccttttttgtgctaattatctggtagtttgttactgctccctgaaagtttccacgtttgtgctaccttagtgaacaaggatggaattcgcaattggtttggcttcaaagcgagcttaacacatttgtaggtgtttatggtacgctgcagcagtttgaagggactcgaaacgtttaatgcagtgcagccatattttttcctttcatgattagccattttctcatcagaggtagatcagtaaatgtatgcatactggtgaccattcagaaaacgaccacaggcagagaaccccattccaatagcaattgccattggtgtgtgacatgtaaatgtggggaaactgttttaaacactcgggtggacgtccacccgtttcttgcatgtcatctaaatggttatgaaaaaatttcaaaaaaattgacatgataggttaatttgtaatatatcacttcacaaacatgcaaatccaaattcgacttctacaagttgtaacaaaaacaataaatttaactgtgaatatacgtataatagttagtgtttgatttgttattttcgttacaacttatagaagtcgaatttgaacttgcatgtttgtaaagtgatatattacatattaacctatcttgtgaatttcttttgaaaatttttcataatcatttaggtggaatacaagaaacgggtggacgtccacccgagagattagaatccatcctcaataaatgtactgaagtgcacatgcaaaagcaaaacagacaccaactttacacccaaagtatcgtctgcagtttatgcggtaaaaaaggatatcactctgccattgaacggcaaacttactaggttattatcaccacagtggatctttctgaaagtactaggacaggcaatttcaccagttaccatcgtcgatctgaatatttgatgaagctatttcaagagtgtaatttgatgttgcataaccaaactggttcaaaaagatgaaacggcatagcagcgctggaactttgtgattcgaaataatgatgctgctttctttaagcatacaaggaacctcaggtatgaatttcatttaatccacctttaccttgatttttacagaaaacgggttacttcactatgttctgtcttctgatactcttatatattaaagtgattatcagttcagaattttctggcaatcatcatgatataaacaagtatatactcctatcagtaatcatgccgttgagttgaacacatagtataatatcaaaggccgcaactcctatctggaaaaacaaaagatcacgtcagttccatgttccagttgtgatattacatgctgaagccagatcaatggaatccaaaaagaagaaaaaaaatatagtccggttaaaagaaacataagaactagcaggtctgcagaatcattaaaacataaaagaacaggatgacattacttttggttcacaaagcatgaatgattggactatatccatattcaacaatgcatgaacttattttaaacataactaatataaacaacatagatgcgacatgagggtaacggtagatttaggagatggatttccatacatctaaacgtcttatcaaaggggggaattgagtagttccttttgggcaaacgtacttcatgatttgctaagataaattcatgaacttatcatagcattgaagattctataaaccttcataaaatgcttttggtagtgcaaatgcatacgaaaacaaaacattttataaaccaaggtaaaataaagaccaaataattttacctcataaggtatcctatccagatcagcatgctacaagaagtgcatttctcgttccaaaaagaaactttctttctagtcttgagatctgaacctcttgctccatttgataagaagctgttcaatgtcagcatccattcttgtgcccctacctccccagactaacatgtgagcaagatcaatcattgaagatccgtctacctcatgcactgttttgaaacccattctcgaatagaacctaacgagctgattagaaaggaaacactggtaagaacaccatcacgcgctgcttaaacaaaatgcaggacaaaaaaagtccaccaataaaatgaaacgaaaatattgcaatatgtggagatccagcacttcaaaacaaggaactgtgattttgtgaatcaatacttgcaaatatccaaatctaaatgttgtctcagcgggaataacgccattatcgacaaggtgaaccctaggaaatgataaacaaatcaaaactatttcttctcatcaattgtgctacccattgtttccaaggtgctttcctttgtgaattatatcaaagcgaatcacagcttgagcaattcgtcgaacaccatgcgcgcagcaacatatcaccaccactacgcagcagcccaggctgcaatagtatgttgtatgtaccttggagtggtagagatccgtgtcgttgatggcaagtagctcggcgcgcttgcagccggcgtcgaagccgtggcgcacggcgacggcgccgaggaagacgccgagcccgaacagcggccggtcgggcacctgcagcgtggcgcgggacatcctcatggagtcgaggtgcagcacggcgccgcctggccacgggcggacgacgccctgggcacggcccagctccacctcctccgtctccccctccccgccgctgccgccgccgcggcgcgccgcggtgacgcggaagaaggggccgagcgtggtgaggcgcacgcgcaggccctgcgcgcgcgacgcagacatgatgtccgccatggtagggaagacgacggaagcgcgcgcggcggggctcgccgccggcgtgggcggcgcgggcgcggccatggagagagatgaggggttggggtggagcgtggacacgtggcgagcgatgagctgaagatatttgggtgagggctgcggctggctggctgctgcggtggtgggttcagcagcgccgcgcgaaagaaatcgagtatttctttttcgaagaaaaaaattgttctactaccttcttaagatataaaaaataaaaaagaaaatctttcttatgcatttccctggtataaaatgtttttggctatgaattggtcgtatcagccctaaaacaaacaaaggccttcactaaagccacgcaaaaaaggggaatttaattatttatcacttttacatttcacaattattcaaatattctttttagatttgcgcttactaatttgtcatcaaaaagagagaaattcttaagtttatgccaattttacctacgtggcgggataaatgagattgctagtatgtatgtagggtgtgaaatgtctattttatcctcctgtcctgtcatcctcttccctcctcatttctatttcctacatgcggcagcgacagcacccggctttagtatcctcgattgcgacggccggaagcaaagctgaggaatggagtggcggccagcggtgggaggtgtgggatgcgatagaagctgcggacgtcgatagccttggggagccacgatgcgatccttggttgcggcagcagcaacgtggtagaagtaggagcaagccacgacgacgcagtggtcctgcaatatggtactcccttcgtcccaaaatgtaataacttttaactctcaagatttatttcaaaatataacaacttctctaccaatattttcttctcaaccaatcacaactctccaccattcacttttcttacctacctctactactcaaccaatcacaactctctaccgtttgcttttatctatttttttaataaccgtgtctaattttaaaaatacttatattttagaacggaggaagagtaattcttttttgccggtcatcttctcaatgctaatcgcgtcgtggacaggattggagtatggaatgtgctgatgctggtcgatccatggtttgctggctctttggtgatgtggcagtcggatgggctgttggagcatcacacgaagcatcggatcgccgtggcgatcgggcagatcgacgacgtagatcatttctgatctaaccttgagcgattgctggcagctggactcctcatcaatttaagggctcaccacactacaggaaaaattaactattgccacatatatattgcaaggacatataaattgttacaattagttactcagctaccacaattttatttttttatttaatattaatatatcgccacaatataaatttgttgtgatattttggaatttgttgcaatgaaaaatgggctattacaacgataaaaattactgttgcaatacaaaagtactacagccacgattttaatctccgtggtagcaattacaatttcttgccacaatatattagtgtcgtaattatttaaattttttgttgtactataaaaatacacgtacattgcaacgggtaaaagagctgagcaataaattaaattattgggatcattatacattataattgaaaaggttaatgaaatcctaacactggtattgttatagattttaattagcgcaggtacaatagcaagctgtaagctagctgcaaacatattttaaggagataaataaggagagagaagagcagcgggctacagatttgtagccagctgtagtacggactctaagacacagtgtatgtatgacatgtcagaccagttattgacaatgtagtatgtaactattatataaatgagctattaaattggctataaatgaattgaagctaatagttggctgtactattaaacttgctcttaaaaaagttaatgaaaatctttcctaggttttgggccgaaagcctttctttcttttcagcccatggccaatccactacctccctccgtttagcctgctttcctttgacccagccacaagtggaccccataagaccagctcgaacagtccaataccatcttcaacctctcgaagatagtcccgtgcccgtacggttgctggagcaatcacccaaaattggttgagggtttttatccactcgatctactcttttcgtttttttccaaaatcatagcgtaaaactcaagataaaaacgaaaaatgattgaaagtttttgatcactcgatctactctttcctttttttttctagcgtaaaactcaggataaaaacgaccgtggaagatcgttgcatcatcagcaactgttaaacggagattaaagccgaatcgaaagggaggagtggggaatcgatttttgcgattaaattggaggagaaaacgcaattttgatatgacggcggcgggaggtgtgcagagaacaggtcggattaaaaaacaaaaggcgcacgggagaaaaaactggtgacaaaaaaaattacggaaaaaaaggtaacagatcggattaaaaaaaccggaaaaaaaaccaaaagcgtcagcgcgtgcgcagaaaaaaattccttcacgtgaaaaaaaatgggtaaaaataacggtgtcaagaaaaccaaacggatctttttttacggtagtcggacgttttttcttactggccacataagcttttttttaatcactttttgagtcggacattttttttatttttttctacttttttttttgagtcggactttttttttctacagacgacggtgatttcttggtcttttttatagtagagatgattaaaaccgaaacataaaattaaaaccgattcaaatatggataacgtatcaaaatacctgtaaaaatgttttcaactttcataatagtagagattatacataaggtatggcaacaaataaatagttgttgcagtaagcttacactattaccaaaaaaaatactcctcgggctcacctcacacgcagccacgaaggcccacagaccaagcccaccacgccatgaaccaaatatattagttcataatatccaaggaaccagtcaacagccaattccccattcctcacaaccctaacttaccacacccttccctttgcttcactattttgcatgcatagatccatcacaaaaggtggtttaaattataaaaaaaatgtgtagcaagagtggaaatgtatagatttaaccactctagaaagatccctcaaagatttgtagttcaaaatctcccccctatattttggttggtctcggagagagaaaaacctcgtatgtaaacaggggctcgaagagaaagaaggctatatagctggatttttgtaggcgacagaaattaggtgcctgtgaagatagatcttcgcagacggacgacataagtctcccgcctaaaataatcgcagcgcctgtgaagatctatattcccaggcgatccacataatataagtggtccgtctgggaatatagatcttcgtagtcagaccacaaccttagcctcgggatacattttcttaggtggtgttgtggttcggatgtgcatacctgcctggaaaagaaatggcaaacgtcactaaaattcgtttttctagtagtgaatcatcaccgtgcttcactataatggaatgtgagtcgatagtacacccgtccataaaatcctctcatgcttctgtttttgcttcctctcatgcttctgtttgccttgcatgttccatagccacgcgccgtgcgccatcgaaccctttcggttgcatttgcgaactaaccagatgccattttcttcctctgcaatagctagataactgcaaatctgcaattgccaataattaattgccggcggagaacatggcacgccactgcatgtccaccatggccgcgaacacggcgtgggccgcgtgcccgacctgcaccggcgcgccgccagacgccgccgacatctccgacccgcagcagcggcatgcaggccccgtcgagctgcctcgtcgagagcaggtgctcggcgccgatcctccgcagcgcgcgccacttgcggcgcggcgggaggacgaacacggagttggcggcgtgcccgaccccgacgccgtgccacgcggccggtgaggctgccgttgtgcgtctggaggatctggcgggccgtcgacggagacgaggcgacgatcgagacgacggtgccaagccggaccgccatgagcaacgtggctatggatttaatatggtgtctcgctgtgtatccgccgccaacttgggaccgaactcgattgtaatttgtaatcggagctgtcttgactcttgagtagtatatactcaggtaggggcggtgctcctctccacccgaccccataagtctacaacaatcaatctaggtttaaggtctcaatcgagacgagaagggggaataagccacaattccggcggctacggctccgtctccttcatcaggtgcgcgctttgatctggattaggtgtcgctcgatccttttcattgtcaaatctctcgatctggatttggataattttgtgcgaacttgggatagatcgatgatcttccgctgctgatagttgataaaagtggcctactttctcgtttctgatctgatgctgttctcggtttctccacagcaattcccgcgctgctgatggatccatctgagggaaggaaaatgagtagctttaaggaggaaagaagtgaagggaaagttccggccacggcgattgatcccaccaacgagaaaaaaaagaggactaagatggtgcgctacactcaagaccaaattcagtactgctttgcgaactcggtggagttatctgacgacgacgaggacgattttaagctgacggaggtgctgagcaaggagtgtcttggccggatgtcgcaggagtatctagccaagttgtatgccatggaaatcgctgaagagaaggagaaggctaatctgaagaagatacaggacgtcctccgcaatgaacgagagaacatcttcaacatccgtgaaaaacccgaggacgtccttaagcagtaccacaccaaaggctatgctgagtacgaggttgtcgttgacgatgacaagggcgatgaagacaataaagttcatgcgcgagttgctccccctggccgaagaagattccggaatggggttgccatgaagaagaatcagtcaggaggaggaagtattattaggaagataaattgaaataatcgtctttagtgtttgacagtatttgacatgtatacatcttagttgtaggggaaattatattttcccttctatttattagcatatagtaataatagtattatggtttgattatagtcgtgctaattgtattatgtttcaatcttgttcagcattgatccatcatctagttcagggaatctgaaactacgtaccctagactgaaaagtcagagaacatagtttgttttgactggagtagttttgttgactgcatttttaggaataattttgaaccccttgcaaaagctcgcctgaaaaatgttatgtataatttggaacctctacctcttgcaaaagctaagctggtctctgttgacatttttcagagttgcatgataaggattccgatggacaaaactttttgacagtcatatgagaatggcactctgctaccatatatgtttctccaaatgccaatgcaagttggattaacacctgaaatgaagaatgagtcagtcaggcagtgtgcttgagactgtcagacatattttttagtttagtttgcaaagttattgtagctatcaggtctgtctgatcacaggggcaagtgaaagtgtgaaaccgagcaatttcttcagttcccaacagcaaatttcttcagttgcttgacaagctattactttctcctgaatcttttctagctaacacatcgttagcaagggtgggcgtgatggagtatggatggacctggattttggtctatgctgcttccggatttacctaggcacgagcgaggattgcccatcgcctgtatagggatgggggtgaaagtggaggtgggtgtgttggttaggggtggttatatggagagttttgtcacgatttcccccattgcagtatcttggtggtacttcggggcatggtaacatgtgtggaatcttgtcttgcgggtaaagttgtacacctctgatcagagtaaaactattcgaatagccgtgcccgcggttattggacagtcaaccatctcaccgtgattagtctcaccttaataatttgacttaatgaactggtgtagtttaggtggtttaggtggggcctgtcgcaacgtggttttagcgttggacagtcatgaggttaatactactaaattatattctgctttactgtttttaacttatgatttataaatgctacttttactgcaaatatcctatgagccattccttcgatatccttgcatcataccttctcattggtatgacttgttgagtacagtggttgtactcaatcttgctttattttcccaatccccagaggcagtgaatttgtcggatggtgagttctatgaagattagacttgtgccagacgtcgaggttttgcctggggattatgggggaagcttctctttgccgagcatattaagtttagatgatctttagttttttccgctgcttttctgagtttattttatatttttgtaagacatgaaactgtatcaaattatcatctgtgtactttggttgatgtctggacagagattaaatatacagatagccggtgattcgggttctcgaatctcggggcgcgacacaattgctcacgaaacggttgtgcttataaatctaggcagcactgggaaagtgaaaaaagccttgactcctcatttgcacagataattttttttagataatggaagctttatttagactcagttaattacatcaagatgattttacattaatagtccaccaaggtttttattttctttttattagcaacggaacgggtataattttagactgccagctttttgggggtggtgtggctgaaactaaagtcagctttatagcaatgagtgatacagtgtgtaccaatcatatagaatgaatggattggcttttacttcagaaaatcatccagtttcttaagaaacatcacaattttgtgtcgcatttgtgctaaatattttagttagtgaaacttgactgtattaatttgcagatggaaatacatgtcagatgctgcccttcattcaatcttctacatatagtctacgaaaagtacgtatataatgggttacatagtatcatcgtacatatgtgcaggaccagtttgtaatgggttgtatcatcattaagcaggtaccgttcttgcgtttatactgtgttttttttttaaaaaaaaagtttgtaatgcaattatttaattggtagataaacatgcacccgcacgtggctcagacgcagacatcagatgctcttggctatagcttgcagcggggtggccatggtcatcgtcaacccaagattctccgacatgtccacaccattttcctccacctccaacgggagcgtccactcgaagcgatgcagcagcgaccccagcattgcgtgcagcatccttgtcgcgagtggcagcccgaggcagacgcgcctcccagcgctgaacgggatcagcccgaactccgtcgtcgccgtacccagggcacggccggcggcctcctggccatgctgccggagcatgaacctctccggcaggaacctattcggctccggccacgcctcggcgtcgcgatgcacggcccacaggttcaccaggatggtgctccccctgggcacgacgtggccatgtatctccaccatctcctcggccacgttgggcactatcggcaccaccgggtgcagccggagcgtctccttgatgactgcccggaggtagggaagacggtccatatcggcgtattcagcatgagttttggagccgagaaccttcttgagttcttcctgtagctttctcatggtctctcggtcctgtagtagctctgccattgcccactcgagtgtactcgcaatcgtgtcgactgtcgccagaaatatgtcctgaaattgatggatttaattggattaattgttaaaacaattactacgatgacattaacgaacttattggtagtaaagggacatagttggaagttggatatatatgtccctgtatttcttttatgttacataaataattgatgttacataaataattgtaaaaaaagttggcaaggaccccctttttcttcctcgcctctcttgattcggatctgtcggatgtcaccacaataggggtcctcgccaagcatatctactgtccatctaattcagacctgaagctcgtcgatatcgcatgacaaaggcctaaagagaggagcggagaggggaagagggtatgtttcagtgacggatccaaaccacgggccacctgggtcatggcccgtggcccggtggataaaacccatgttgacacgtgtaaatttaccatgtatttgatagataggccaaaagtataatgggctggctcggggcctacccaaattctgggttcacgcgaggatgttgatgctgagtggaataggaggaaaaggaaagggaccctgttggcggcgacattctgtgcactgttcaggcaatggcagagccatcagcatcagtcatttttgcaaacattgatcacactcgtagtggaggtgacagtgatgaagcctaggcaaccacttgatctaatggagagctggcttcccatgcaaaggaaggcgtcggggtaggactgcatgaccacaaatgccatcaagaagagaagataagatagaaattcaactaggccccagtatgaattttgtttccgcgtcggatgccatgtaaaaccgcctctaatttgattattggtctaggctaattcactatttgtcatcctcccaaaatacacatacccaaatgccactctcccaaatttttattctcaggtaatcagacccacatgtcagtcccccttcccatttgctgaccttatggacccatgtggatccggggaggaggcggacatgtgggcccaggtggcaaatatgaatgaaaatttgtgagagtggcatttgggtatgtgtatttcggaaagatggcattctcgtggttacagagggtgtaaaatattcggtacagtagttacggttgtaaaccagactttaatccacatactagtttttttttagaaaaattcatagatatttgcatggtgacttttctggtaataaaagtctatatataatttatacaaccaccttgattaattatttatattatgctagtatggtagaactcatgaattactaattttccagctataccttttgcaaaataaaaaaaatccaactaaactgcaatagcagcacacggatttattggtatctatagtacccatctatcttaaaaaataattatttccatctccacgtttagatcaccttactaaatataatacatgcacggtaacaacccatccttcagaactgtgcaacctagcctatccaaccgacgggccaacttatacatagcacctcacttacactatcgtcaccgctttatgtacaagagttaacccgaaaatgatatattatagttagggagacaatgtcttataagctggttctactattactcaactagcaatgtggtagcaaagagcacacgacactcatgggtcacacatgtcgcatccttattgggcaagatattacatgcacccaataggagatatcttgaggatgtaggactaacaaaacaaatttaaaagaaagggatgtatgcatgtatgcacgatttgtcttatgaaatataaaaaaacgtgtttattactctatattttaggatggagtgaatagttcttttttgaaaatatcacacgtaccgtactaccccttttgtataataagtaaagattaaaggcaaattttgtaatataacatcatgactttgcaataatagaactactcagtagctacaaacccacttttttttccttctctttcttttatctcacttatatatttaatgtgacaattgtgcactatatgtataaagtcagctcttacactagaacgaccaatctttatatattttttttcttcatttgtggttatagctgacttataactatatacctgcagatacctgcaaatctgcaattgccactaattaattgtcggcgtgtgtcatcatgtagcattgaaaaaaaaaacgtacgcgagagaaaaatatgcacgagagaaagaaatacagtttggtgctttacttacagtgagaaatgttctgatcaggtctctgtcgatggccaccttaccgtcgtccttcccatgctccgacatgtcgagcaacacgtctagcaggtcgtcctcgctcctggcctcgccgtcgtcgccagctgcttcacgccggcggcgcatccgccgctcgatctgctcgtcgacgaggtggtagaccgtccccacccgcccggcgaagcgccgccgcaggccctgcaggtcgacggcggcgagcgccggatagaagtccgagaggttgggcttcagcgacagcgccacggcctccctcgccgcgtcctgcagcacgcgcgcgtcgtcgtcctccaggccggcggagaacatggcgcgccactgcatgtccatcatggccgcgaacgcggcgtggccgacctgcaccggcgctccggcgccgccacccgacgccgccgacatctccgacacgcggcggagcaggtcgagcacagcgtcccgaagcagcggcaggagccgccggccgtcgagctgcctcgccgagagcaggtgctccgcgccgatcctccgcagcgcgcgccacttgcggcgcggcgggaggacgaacacggagttggcggcgtgcccgacgccgtgccacgcgtccggcgggacgcggccggtgaggctgccgttgtgcgtctggaggacctcgcgcgccgtcgacgaggacgaggcgacgaccgcgacgacggtgccaagccggaccgccatgagcgggccgtgccgcccggcgaggcgcgccagggagcggtgcgggaggtcgctggcgatgtcgaggaggttgccgatgagcggaagcggtgttggtccaggtggaagacggcggcgggcgtcgccaaacagttgtaacgcgtatgaaatcaagaacatgagaagaagcgagcacatgcagacgagcaagaaaaccatctttctttttttcttttcttttttgatgactaaaaactctgaatgtgtttttttgacagaagcaggttaccctgaagctcaatttatagacgaaaaagggacaattccatctacataaaccacaaatatttcaacggtaacaattaataccacgaaattcttccacctttcagaattaccgtaatgggggattgggatcatctgcagtaggaatagcgaccgcaagataaaccactgcatgcgatttcagccgtccattttggtgatgaatggaccagatcatcagctacagtactagcgcaaaaatactaaatatttcttgctacagtgatctacagtatccgggtgcatgtgaaccgttagattcggatctaacaggtggcaatggactgcataagttgcagtcatagtacaaactgcacctgatccaaatcccgtaatggggaagtgtttttttcgaaaatataccacaaactttaccaagattacagagatgccctgggagcaagattgggacgggttttcaatctcgatcattgccggcggcagcggtagtgtgtaggacagcaggaggcacacctggataaattttgtgcagctcgctgtccaggaactgacgaatcaattggctgcaatgcagcatagaagaacctacacgtgccctgatgcccaggacgcatgcgcctaacctgcccgaatggaggccgtagcactctcggcgcaacacggacgccagcggtttgcggagggtacgattgtggaggagaaaagtggcatcaggcgagatgtaacactggctcggtccccctgctcagatttcacactgtggcggccggcggcggagcagagaaatgagtgagggctgcatgagcgaatcagatgagagaagtagattgtgggggtgatcccatcgcaaaactaactccgtcattctcccgtcactccgtcaattttgtgctaattctggcaagtggaaggattttgtggtattatctggtaccattgaaacctttgttgtatggatggaattttcccgatggaaaactaactttgcagaactgccactggctacgctctagaagtcaggatttacaaacttccactttccaacctcatatgtccatctacatagatagcagttcgttcgccaccatttaagttcttcggtatttatgggtgactggatttgggtacattctatctatttgtttcctatagcagcattgttcatgcaaggtttgttgtttgtgttgagctcaagctccttagattcagtggcgaactccgtggagaattcctgctgagcctggtgaagcccacaagaaaatttgtagttcatcaacaaaccttcaattgtgctttttatggaggccaacaaaagggattacaggttattaagcggtgtgtatgttaaaggaggcctaaggatgcaatagttgtggcaacgttgcaattccctatcgatttgcacctctattgttgcttgatttcaataggaagtttgcaaccttagtgtagtttcctgttcgttggaatcagatggctggttactttcagctaatcaatttggcgatgtactaggatttgttcccctaaactctcttattatgttattaatgaatgttttatgtttgaaaaaaaatgaggtatatgtatgcacgtgttgcacaatccatggaaaccatccatcgatcactagtactcttcttgtcggtggctcccagtaattaaatttgggaaatcttgctagtgacgatcaataatagtagtaattgagtagtacggtgaaataaaatctgagtgggattgttgtgatcgtgatgtagtactgtgcttattgttgatgggatttttattagttcatcaatacaggggctgcaaggaagaaaaaacaaaggcaactgccaatgacataagcaatcccaatggtaaattggcaatcctattggtcgatttcagggttggaaacctcgatcttgtgaacgagggtcggctctatgccgtaagtcagtgtatactgtagtcagccctttgctgccctattcccatcttcttcaatttccctctttcctcttcaatgctaacctagtcctcctcatccacattctattccacattccctcgttcaatccctcttccttaccttcttcttccccttcctgttttgttctgctttggcgttcgtagggggtcatggatctggatggggatccacccctggaggatgagcatgaagtagtccactctcaacttccagagattgccacctctctggaagcgatgacaatcacaccaacaaaggagatcagagtgaggttgcaacagtctcctgaaacggcaacagttcaagccactcacaacctcctcatgaaggttggacattctggaggccagcagaggcagatccctttggaggctttgaagaaatcaatggcaaaagcttggcaaagagtttatcttgacatctctcaggtagaaagcaatctctttatggctcattttcgtaattatgaagatctgtcctgggtttggcaaaagcaaccgtggtcttttggcagtgatgtttttctgcttgaatgggtttctttggatgagaaaattaaacctatgtcagcttacactttcaagcatcttatggttaatgtgcgtatctatggcattcccccaagtcttagaaatgttaagaatgtcaagttggctgctgaaaacataggtcaaatctcaaaagctgaaccaatagatccagatagtttgctgaggaatcagaaatttgtttctattagaatcaggattgatgtggaaaaaccagttcctgatcatgttatcttggagcttcctgataaatctgaacttaaagcttttctgcattatgaaagaactcccataatatgtactttttgtggtctcctcttccataatgttcaggtctgtcctcaaagacaaagaattatcattcaatttccagatgcatccgaggaagatcttaaagataaactaggaaagtggatcactcagatcgattatatgccatcagaggcatttttggatatggaggaatccaacaaaaattcaattgtggaaaaattcaggcaacatttttcttctcctcaattcaagaacattcaagaacagcagaagcagcaagagagaggaagtgggaccagccagtcattaatgcccaagctagattggaaaaaagcgagtgagaaagctttgactttagctggttgcagcactgttcaagggcccccaagtcaagctgttcacactaccacagtaggcaaacaatgtgagaaaaaagacaaagaacctgatatacaaagtacaccagaagttggtaccgaagagatgttagtacatggaagtacagagaaaaagaagctggtttcaagtactatagaggatcatgtcagctgcaactcaaagaatgtcaatactgctggtaaggtgcatcagatggaaccagtccagtctgttccattggttcaccgagtttcacccagtgcaagtgcccatcagaacagtttagttaaccctgctattggcaccaacgaagtgcaacacagaagaagcacaagagctaccaagatttatgagacagcctcacaacatttaagtaagaagagagggtttcatgaagcagcccatgaatctaccaaacgccattgctccccaactacttcagctacctcttccttctcgattgtgggaggtgaagaacatggagggattgaatcaagaagagcttctccaactaaccatcattcagcaccaatcagggttccaagtagaagaggtgggcagagagctacaagatgggatcagagaggaggttatggtggtggaatggtgacctccacttcttggagacctcttgctgctgctcattctgatgtcattcaaagagatgctccaagatcccctcaaagcattaacaattttcatagcaggaagcatacttggagtgctttggaggtgcatcatgatatctttgttgatcaagctgctggagatactcaagggggtggtgcaagtgatgctggagctagctccaggctgatactggctacagatcctagggaatgcaatgtttcagagattcagcttgttgatcccagtgctggaaacggtggagatggaagtggaaagaatgatggatgggcaatggcgccagcccataaggcgtcaagggcgccatgagtcttttaagctggaactgccgaggtatggggggtcacctcggcagtaggaaaatgcaacacctccaacgcctaatatactctactaatgctaaggtaatctttatttcagaaacaaaaagctctaaagtcactgcttctgatctgatccatcattttcatgtagctaatagtcatgtggttcctgttgatcaagcttctggtggtctgtggctgatgtgggatgaagacatggatcttactatagttcagtctagtattaattatatcttagcttatggagtctataagaactctggtcctattttcaatcttctttgtatttatggtgatcctagtcacagggccactagtgccatgtggagtgaaatctcctcttttgttgtacatagtagtcacaaacctaccttttgtatgggagaccttaatgagatcatgcatgctaatgaaaagtatggtttggcccctcctaatcagaatcgtattaatatttttaagcatcatgtcaataatctggggcttatggatatgggttataatggtccagcttacacttggtccaataagcaacagggtaaggatctggttttggaaaggttggacagatgtcttgcaaatgtggaatggtgttttaattatccaaataccactgtttatcacttgcccatgttgtatagtgatcatgctcccatcattgccattctcaatccgaagaacaggaggcctaaaagatctttca

SEQ ID NO: 7635 - DNA, 46616 bp, Oryza sativa
agtacgaatgtactcaattcccaattgttgttgtttgtcgtccattctgagtcgaggttgaagataacgaagattagggtatcatccctagactaaagtctttgccgtggattggtaatctagctacgctaagtttcacatttgttgtttttgattgagggttgtatttcaggagaaatttgtatatgtaccaacataaaaaacagcttcactaaaatgccatcactggaacgggcttggataaaattccacccttaagcagagcgtcttcaccatcctgtggactattttgccattaggatgcatgcttcttcctcactccaacgcctcttctttttgcccttccagtgctcaccagtgaccatggtgtttgcccattgtaggagacgcaacatttctgaggtggctactggtgagacatgtagttgggatccatcggcagcagcaatggcaaggcgagggatggcgtccgtgccgggatgtgcagcggcgaggcaagggatgggtctgacatccgcagtggcggccacaaagcagtgctggcaccaagatggatactgattgtgaatattttgtgttcttgttgttcgtcttctataatggggattaggggagcatgatctcagaggggaccgctcaaagcatgggctcaattcatcaagccaatgctttgagcagctcccttttttttggacttgggggaacataccagttcttgttctaaacttcggcactagtgagtccccgtcatccatgctgaaaatccagagctggttggggaccctccattgggcccttcctaaccgggattgaccctctttgtagcttatagacatatgatcatatcagataaagatttgcagatcgatctatttttatgcatgcatggtgagagaaagtggacacgtagtaaaccaataaaatatattctcgataacaatatatatagcaggttttacatattacaatctcacaaaaaaaccagcttaattacaacaatcatgtgattcaaggttgatacaaatgcagatcgattagcaaacagacatgatcatatcaaatacgaatctataaatcgatctttttttatgcgtgcagggctgagagaaaacgaacatgtaagccattaaaattatctcgagataacaatatatataatggattttagaaagaaaaaacgacttacaacaatcaaattaaagtgattcaaggatgataaaaccgcacatcaatctgcaaacccgacaagagacttactcacggggaacaatagccaacaaccacaatagcgaacaaccacaccaaattaaactctggaatattataactgtgccgcttagcaggtgaaatcggtcggataggtcttgccacacttgttgaggatgagtccgagatcaactgggagggttgaccctaatgccaagcacattggccttcacggcggtgcaaaggcagatggcagcatcgagatcggcgatccctgacagcaacgagcagcagtcatcggggccgtacccaatcttcacatcgaccagccctttagcacgttggcgcacactctcagcttcagggcgttgatcgggcaacgcccgtgatcactgtgcccaccagggtgcaatggcgccggcactgcttcgggtgcgtagggatgaccttctcactagagcagttgggtgtgcagccgtgtgcggtgacagcaaagaggaaagggcaaggaaagaagcaacgaccttggaagccataattttgtctgaaatcgaatgagccggtggtaatcagtcactcagtgttctagactgctctagcttgtgtcagtttgggatggtttgcttgtgggttttcgtctgatatttataggtgagctatagcttgctatagtttagttgcacgcaagttgcttgtgtaatagttcctttgttttcctggatggatttgcatgcaagcatggaccagtagttggtgggatatatgacaagttaaattcttaattcgatgaaatgaattatgcagtcatgcagagcaccaatcgaacaatcatgtccagtagtacattttacgcgatactagctagttgagtattcgtgctttgctatggataaaaaatatattataatatcacctgaaataaagaatatctacattctagccaaaggtctctatttagccagtttgcttcattgtgaaggcatagcatcgctctatacagtctccatttaatgacctgtaatcccacgggaaggtccatgcactctctcgctgcatgactcacggaaccacaatgaagccgatacactcgaaaacctaggcggtggcacagggttgcttggggacggtgacttggtctactcgtgggtgtgtggaactgatggcctagctgcacgggaactgattcaaggctctgttgtaagatgggcccaaatgttagtcttcttgggaacaaccatgtgtattgtgttctatagcatagctaaggtggtgtttggattcagggacttaactttagtccctatatttaaacactaatttagagtattaaatatagactacttacaaaattaattacataaataaaagctaatttgcgagataaattttttaagcctaattaatctataattagagaatatttactgtagcatcacataggctaatcatgaattaattaggctcaatagattcgtctcgcgaattagttcaagattatggatgggtttcattaatagtctacgtttaatatttattattagtgtccaaacatccgatgtttgatacgtggtctattccgagaagtgacacgaagtcacattctaagtggtcggctgtggaaactcctcgatagcccgggaaaggctattgtggcatttttataggcctgagggaggagacatgtcccatgggccttatgtcctcgtccgacgcggtgcactgccaagcctgacaatcgcatttgttacgaattacctcgagatgtcccgttgctacagtccttttctaaaagtcatattttcacactagctcagcaggaataacaagacttggcaagtgagcccggcgtaacgtcccacatatagttgcctcatcggctataccgatgcggggctcaaagggcaaaaagagtactcatgattgtaaatagtagattatgtcatgcagcggagaaatcaagagggcaacaggaggtatataagcctcaccgaagcttgatacataggttagactccagatccagaaggaactaaatttctccaggtagagaactttgtaatgcttgatcgacatagtgatacaaacatgaataggattgttattctccaagaggtctaagcctgtaaacattttctgtgttgacttagctccggagcaggtccaagcataccaaggatcccaaaacccctcctcgaccgggatcgtttgtttcccatgtttgtcaaattagtttgtttttccgacaaataataatatatattttccataaaatgtcttacctataattttactgcagagattattcatattaaatagattttatatgtggcaatctatttctatttcattgattttttaataataagtttaatgggtaatttgcacaactccaataggaataggtggtgtaggatattttctgttacaaccattaccttccaataggagtaggagtattttttttttcgtgaccagcattgtgttaatattattattcttttcacgtgcaccgtaccctctaaattttaatcctgttttcactactgctgcttgtctggttgtagcgtaagggatgaccttatggccgaactactgctcgcaaagctgcaatgcatccatctgaaccatctttttctgagggctagcttgagggaatgggaatgccaccaacgggctggacatacttgtgccgaaacgactacgtagttaggcctgaaccgctgtgataaaattcgaccggtcatatacattacaacaataattgcaggaccgtctatacttgggtgcaaggtcgacattggtgtgcacgacacagtttgaagacatgatcatatcatatacagatctacatatcaatctatttttttcatgcatgggtcaacatattttagttgcttacatttcatctttatctcacccatgtggacctattaatttgatctgttgatctttatcttcatatcgaccagcccgtttagcacgttgatgcacactctcagcttcagggcgttgatcgggcaacggccatgctcatcgtgctggccatggtgcgactgcactggcactgcaacgggtgttgccgggacagcctgctcgccggggcagttgggtgtgcaaccgtgtgctaccacagcaaagaggaggaggctaagggccagaaagggagcgacgaccgtggaagccattgagctgggatcgagtgagctactagtagtcagtgatcactcaagagctggcttatggctgctctatcttgtgtggcttaggaacggtttgcttctggtgtttgggtgtgcgtctgctatttatagatgagctagcttgctataggtagttgcttgcatgatgcatgcatgtgtgacatgacagtacgttgcttggttttcctggatggatttgcatgcatctgcctgcatgggtcggttggttcttcgagttggcaagataatttcttaattgcaacgttgaattttggcatgcagtcatgcagagcaccaattaaccaatcatctccaattcaccagttgtccattttatcacaatttcttaatatattacatgattacatagtaatatactcccttcattccaaattgatctgcttatagttttttttgagattattactaaatgatctatatatttgtgttcatttattaagtctattcgttatttgtgcattagagtaaatggacattgatgcatgcatccatgcacacaagtatttataacccacatgtaatatcttgatttgctattggctaggaaatagtggggatggtgcatatatggagtttgttgctaaagtaaatatagtataagagagttattagcttttcttggtctttgtgtacctgtgaaatatttagatcaatttggaatggagggagtattagctagtagtatttattttccgtagttacatggattacatagaagttgaaccaaactgcgatgtattatgctgacgagagtctactgattacgcagcaacttatctggcttccaagagatgagctacccagccaaacctcgtttcaatatgaatatcctatatgtcggtaaacttattttgtccactttcagactcaataaaagacacctcgtttcgactttcgagctaagagtaattgatattttattggaagctgcacaggtatcagatgttgcataagaatcagaaaagactccataaatgctccaccaagataacctcactaaggcctacctatgatgggcagaagtacctcgcctctaacgggctaaactaaagcccactctagataaggccccacgggcacagctcgtcacagctaagaacttaattgtgacgggcccatttgtgaacccgataaagaacacctctaacaagcccacatataggccatcataggtgacaacacacctgtaggggtttatagacataatccgtcgaagatgaggacagtcatctctaacggttcccttttttacccatcacagatgaaaaccaccgaacaatacccatatcactctcccacccactcattttcttctctctttcactctctctctctctccctctctccctctctctctcatttccttccaccaagatcggatccaatgcaccggccttagcctccaaccccgagctcctgtcgccaccgcgacctccacctccccctccccgagcacgggtcctcattgcttccatccacgagcgcccgtcactgtcgcctccacctctgcccccaacttctattgattgccgcctcaatccacgagcacccaccaccgcggactccacctccattcccaagctcgggctgcctccgcctccatacacgagcacctaccaccatggccttcacttctgccctcgagctccggtcatttccacttccatcaatgatcgtccgccactaaggcctagacctcttcccccaagatcaggtgaccgtcgcctccatccacaagtgccaaccccctctgcctctgcctccacccccacatccatccacaagcacccaccaccgtgccctcactacaacaaaacaacccaaaggagacatcttatttgtaagatagagacgttttatttcgtctcccacagataactgagacgcttttataaagcgtcgtaggatcgtctctgtttgcaccgtctcaaaattatggagacgctttttaaagcgtacctatattatttaagacgttgctagagacgtgtaaattgcatctctataaaatatagagacgcttttatataggcacgcacatcttaatatatttgatattaatgctttcatctgggctcgaacacaacacctgcaggttacaaagttcatgcactaaccaagtcattaacgtgacaatcttgaaggtaaatagatagttttttttatattgcaactctgcaaacatgcgtcctgtagcagttctcttcttttttaatctaagactgaatattaaatatttattttttttggtccaaataattataatattattataatggtatttgatgatgacgattaggatcagtgtgtttattttcttctttctctatataaataattatatattatctaataacgatgacacggatataataaaaacgtctcaaaactcatttctacacatgagatgttccaaaaacgtctcaatattcatctctaaacgatttaattttgtgctaacctgtaaagcgtcttaaactatgtcctcaactaataaagcgtctcaaacatcgtccctattttaatttcatttataaaaaagagacgacttatagaatgacttaagtgaaacgtcttaaaacaatggttttgttgtagtgcctccccctccatccctgagctcaggtcatcgccgcctccatccacaagtgcacaccatcgagccatagtcattgcccccctctggtccgagcgtctaccgctgtctcttcatctcctccgcaaccgcgccagtcaccgcctcaaggacaagcatgacaagcatggtggaaggcgactcaccaccatggcaatggcactaagatccattgcttgcaagttctttttcacccaagtacttttgcatgtagttcacttgctgcttcatgtagttcatgttgttcacattgttgccgcagtgatgattccaatccctgtggttctatttgattgtggtgattgagattcaaggttttgttttttaattgggacaaatgcgatggggacgagagggattgtgatgatttttgtgatttgtgaatgcctaatgtgatctgtgatatcctgaatgagtgtgatagcatcctaggtggatgatattttcttttcccattttccacactagtgatgggtccttactataacctattatagataaaggtaccagtaacaggttaaaatatatagccgttagaaatgactctcacatatgacgggttttggttggggcccgttaaaggtaactcctaagtccgagagatcttcacctataacaggtgactcagtcatgactaaccactaatctcttactagggctaagcatgtcagaggtgatgatatgagcccaatggtgacctgacctgttgcatgtgtgcttgttttcacacccaactaggagcgttattcttagtagaactaccattatactctatccattagagaatatttgttcaattgaaaaactcatgtacgagagaatgctaaagactgcatattgtcttacatcctcttgggcctcctagttaatgcatttgcttgggcttgttgtgtggattagttaaatattatggttctgtgattgctcgtgtgatggatcgtagttcaggacgctttgggtcgttctcaccctcaccacttggtttacgccagtgctcctttcttacacttgctttaaacctactatcgtggagatcgggccaccccttgtgagtgagttcgtgttgtcttttgacaggtctactggttgcgatatagccatgtggaccatcttcttttgagggctatcgtgagtaactcattctggatagggtggaatgggaatctcaccaataggctgcacatacttgtgtcaaaatgacttttttgttaggcccgtatgtgggccagtttgatgaaattcgatcggtcacctcgtagaatttcaacatcgtcttttctcccagtaccagtaactggattagccctgccagctaaaaactgtatggaataaatgaaatacagtcagaaaaatggctcctaatgtgtcaacgataggaaatttccatcataactagctcgtcggagaaaaggaaatttgcctggtgcgtacacgtcaaggaaataattgtcctgacgtggaatggacagtctgcgatagttgcatatcactgataggtttggcggtcagagatattggaatatttttttatgggtacgaccatcaggaaaataagacaccacacctcgctagatagctgtatccatgtcactaaaagcagcggtcgtcagggcaaatctagtttctgatactgtgatcaggtgcatggtccatatcaatgtgcgtaatgcagtttaatttgaagatcgatcaatttttatgcttgcatgtgtgagagaaaacgaacatgtaagccattaaaatatctcagggtaacaatatataacgtgttttacatattacaatctctgaaaaagtaatcaacttacaacaatcaaattaaagtgattcatgtggatgataaaacaaccgcatatcaatctgcaaaacagacaggagacttattcacgaggaatcgtacaaacggccacaataaccaacaaccacaccaaattaaactctggaacattataactgtgtagcttagcaggtgaaatcggacgggcatgtcttgccacacttgttaaggatgaggctgaggtcgactggtaggttgaccctaataccaagtacgttggccttcacggcggtgcagaggcagacggcagcgtcgatatcggcgatccctgatagcagcgagcagcagtcgtcggggccgtgcccgatctccacatcgaccagccccttgagcacgttggcgcacactctcagcttcaaagcgtccatcgggcaacggccatgcccaccgttcttgccatgatgcgtgggcgtcgggacaacctgctcgccggggcagttgggtgtgcaaccgttagctatgacagcaaggaggaggaggctaagggcaatgaagggagcgaccaccttggaagccattgatctgagatcgagtgagctgctagtagttagtgattgcactcaagttgccttggacaatttgcttgggctgtttggacgcgcgcctgctagttataggtgagacagtatagttgcttagcttggtataggtagttgcatgcatgatgcatgtgcgatagtttgcttggttttcctggatggaattgcatgcattagcatgctagctgcataggccagttgttcagagttgacaagataatttcttaattccaacgttgaattgggtcatgcagagcaccaatcaacaaatcttgcccggttcacaagttgtccattttacgcgatatcacaatttctcaaccaattagtattgttttttcagtgttttctggatcctcagagtttaatctccattggttatatactcacacactacgaggacgttttggaacgatttatataattttatactccctcagtcatgcatgcaagcgtgtgcgacgagttgatcagctggctggaaaatttatacataatgcatgcaagtcatgaccgatctgaactgtttactctgagcaaatctgacgtctgaaagggagaaatgagaacaagctgccagatagctggaactccccaccgcggcattagacaaacatggcaagcgagcaatatgattttatctccatgttataatgcgctgagcatgcctttgaatcaaaggatttatgtaaggaatttcataagattcaaatcctataggaaaattttctatttggcacattgattcaaaggattaaaactttccaaatcatatgaaattcctatggaatgacacattgcatgtatattttggaggaaacttagcaagaggtctaacctcttgaaaatttcctttgagtctatctctcttatccgattcctgtgtttttcctatggtccaatcaaacgatcattcctgtgttttttcctatgttttgcaatcatctattttatactttaattcatgtcagaatcatgtatttttcctatttctctactttttttaaccctgggattcaaaagggccctaatgatgagacatagtcctgatctttcgatagatactgataagtcgtttgtggagaactcatcattgatgtaggatcgaacaacaagaactaaggtcctgtttgtttcagcttaggattattataatctggattattaagagtaagctgaaacaaacaagtagattattatgatagattattataatctataagccatattactataatctaataatctcctctggaggagcttttttcagattattgggtggctaaagaccaactaccattagatgccttcaataatccagagaaacaaatagctcacagcttattctatgtcagcttattataatccaacttagagtaatctgatttaataatctagattacaataatcttaagctgaaacaaacggggcctaagccaaccataagagggtgaatagttgtagtacccaaaaccaaaacttttagtggaattaaagataccctcgaatccaatgtagatcggtctgaccggggttaatccgccgtgcctatgctgctggtctaaccggtgttgatcgcccggtctaaccgccctacaattgcctctacctcctgtcgccgccgtcggtctgaccaccgtatacctaccggtttgaccggtgcgatgccatcggtctgaccaccggtgtcccgccggttggaccgtcgaacccgagcaaacacaaatcaaagatctcacaaagtagattgaaactttattacttctctctatgtttacaaagtgcaacaacagcactcctcacgaaaatattgactaaacatgaaacccaaacttttctctcaactcaactctctctaaaacgatatcgggaggccgcaccctctctctctatttatacccaaacttgtacaagaagtcctaatcccctaggaaaccttcccgtaaaagaaacaaactttacaaactccaattgtaccaaatttggactccctccaaattcgactccgtatcccatactcacacaatatctccatcgtatgacaaatggaatcttcaccaaccacgtgcattaatatttagcctaagcatcccgcacgatatcctgatcgtccggacgtcatattctcataaattgactcccgatccatcaccggcaacactctcccaaggcatgaagaccacctacacatgcatcaaccaagaaaccatatccgagcacaagttctcaccaacttgactcattgttaataaacaacaatactacatacacatagtatccatatagaagtcataaacatgaattatctacggatatccaacaaatcaacccgaatccgaaaccgacatagagttggccagtcagaccacgtgctggccgatctgaccacacgatacatgccggtctgaccggcaaccactacccggtctgaccggacccgctcaatcagtagtctttgttcatcacctgcaaatccaatcatctccaaaaccactttgccaataatctccaaatatcaaaaccaataatctcatatgccaattattcatcacaaaataagcattagcagggtcctttatgtatacaaagtttcgttagaatcaccgctatttagttcgatcttttttaccttgtactccctccgtcccaaaatataagaacgtaggatcggataggacatttcctagtagtacgaatttggacagacatctggtcctagattcttatacttcgggacggagggagtatttttttttcaatgcttttcattagttaaatgacatgtaagaaaatgagtaaacattccctccgtgggaaaaaaatccatatcctcttttaatgggcctatatatatatatgtccttttcctttggcgtcgttagtgtctatgatttctcttttgccctccttctataccaaatctaggtaattcatttggccattttcattcttagtggaaaatataaaacatttataaggcacaccttttgggtttagcctatgatataattacgaagtccaatacctaaaaactgactttgacgtggtttgtttagaaaattccaaacagcttaggaggaagaccgaagtgttcttcttaatcagcagctaagtctgtttgaagttaatgttgttaggagacccgaatctgactccaaaccatgtatctcttgccttctatggctcaataatggcatggtggtgttggagtagacttgaggaaggccgtgatttggtccccaaccaacttcactgatcataaatgtaaatgtattccatgaagacgctccccatttcttcacccatgcaagggtttcttcaaatgacaaaacataaaattcatggtgtacatagtatgttttgttcgaatattgtcagcgttctggatattggataccctatatatagtatttacctcgcaagaccactgtagaccaagtccaatacagaaacaaacctagataaagtctggaatagataaggaaggattcctagataataaatgaaatacataggcctacttgcgctgcttggactactcggatcatacttttttccctagttctacttggacaaacgggcaactgagggtataaataccaggcacgtaagtgaggagtaggacaagtcaaaacccatgagagaaactaagacaacatataacacctccgatctcgtcgagtcaacacccaaagaagtcgataacaactagtcgccaaccactatgcccaagctctgcaccgatatactagcatactagattaggttttttttcctcctcattattctcatgaggatgatatatataatacactagctccggtcaccaaaagttgggctattacccatcttggtgtgctggatcagtataaaaatccttgttgccttgcgttccattatctaaactaaattggatagagaattttgcatcataattagggttccaaagaatgatttatttgagaccgtcgcacaagatcatagatacacgcacagaaccagaaaaattttgacactagggtattattttgtaaaatagtttttgacaactaagctaaaacctggtgttacaaactcattaatattgtttttaaaaaaaatagacaataaggttctataaatatcatagtatttattgggttgtcttttcgttttttttcctcaataacaccgaatttcatggcagaaaactaatgtgataacgagcgggtagtaattaaggtcgtttttttttaaaaaaaagaactttaaggatgttctaacaaaatatcggctcattctgtctcgacgatgttcacagctaggggtggagatagtcactacaaaaccgtttttactcctagttgggaacccctatagtcccgattttccaaccggtgttgaaattattaacacataataatttaatttattccataaataaatcatgacattgcatatgtaaactagcatgaacatatcataagatctacatatgtaaactagatagtatagcataaacagatcaaatatgcgtaacatagtgagcacgtaccaagggtaccggaagaccagttgcacagcaggaattactcgcggttgcgggcgttgacaaaggcgtgcatcacgcgagcaaacagaaagacgagccgtcgtgaacgaatagggagcagtcgtgcgaagcgcttcccaaaaaccttattgccgccttctcccggtgcaggacgtggaaggcagaggttccggagacatgctatcccgatcgccgctgcatgccggcgagcggaatggagtagtctacaagcgacggcgcagtacagagtaggaggcaaaccctagattgatttcacgtgtgttgcgtggaggcggcggctcggtttatatagagaaaggtcgcttgatctccactccgcgtaaccgaaccggataagtcacgcgtaacttattcgaactccacgccgttttcacgcaacggatttttctaaatttcccgcagcaaaacaaaactgcaaaagaaggccgcatctgcgcaagggtgaggaaccaattttgtggaccattcgacgcgtacgttgtgccgcccgccccgccaggcgaggcgagcgagcacgcgtgtattccccctgttctctccacctcacatgcttcaagtggctaggagggcatcctcccttttaaggaggtcctcctctcctagaataagcaaggtgatactaaactcccatgcatgccatcccatgaggtgggcttttgtgattttcaaaataattaatcttcgagtgggataaggcccatctattaattccaacaaccgggactacgaatctgggactaaaaatgcgcatcttcagtccggggtgaaataaccgggagtaaagttcaatctttagtcccggttggtgttaccaaccgggactaaagagagcataggcagtccccgtcggtccccatttctttttttttcattgtttctttgctaattgaaagagttaatccctttattttctcccaaatcgagtgccatgcatatcctcaaagcaaaccccaaatccccaaatcaaagtaatatcccaaatcattcacatcacaaatccaaagttactttatacacataaatcaaatacatcacaaatcctaaaaaaattacacacaaatcaaatacatctaagatccatgcaatgaatcacaagttgtacaaaaaaagaaattatacatctcagggaatcacaaattatcaaaaaaaaaaagaatggacgctgtcggctgccatggccgccgcttgcggccccgtcgccgccgccgggcatgaccccgcttgccgccactcgccacacctgaccgcggccccacctgcccgccgctgccgatcgccggatgggaggggaggagggggaggagaagggaggaggaatgggaggaggggggaggaggaggaaggggatctgaggggttaggagcagagggggtgagatcgatccaatcttatctaaatatctcggtgaggaagaaagcccgtctgggacttaaccgatcagagatgggagagaaatatttactcccggttggtaacttcaaccgggactaaagatagatttttagtcctggttggtattactaactggaaataaagatctaaatgatctttactctcggttggtactaccagccaggactaaagtggtaatctttagtcccggttagtagtatcaaccaggattaaagatcctcagccccctgacacaagcctctgacaggggatgaaccggtacttaaaaaaaaaaaatttaaccgggactaaaaacaatatttagccccggttctttttagaaccggaaatattgtggaaatcagccgacccagcaaagatcatttctccagtagtgagtgtatattaatttggggggtgcccaggaacccggtcaagaaattttttagctatacccttaactattttcatcatgtatgcacccctcaatacaaatttaggcacccgcatcatcttaaactcgatctaaagtagagtaaattaagcaagtggcaccaccctctatttcgctctatctccacctcacagcagccccaaatgctgtatatacaaaggcggaaggggttactatactgttgtattggctacaattaattatcttaattcactacaccgaatcgttaagttatctctattctattaatttcaaatcaagtacgtattcatcccgtcccgtgcatgtattgacaaatgataaatcgtgtgctgaaaagcggcggaggcgcgggaggtaggcaccggcgccgcctcctctcgccaatcgatcgacgtacggcggccattcaccataaaatgattacacatgccgtactctagctacttgacacttcacctacccagggcaacgatgccgaatgggttgtccacttaatgcgcctaggctcattttcgtgatgggcctaggttcgtggaaattagggctgccagatgaatgtatttcaatttatgcatccatatttcgtactccctgggctccgttaaaaaaaacaacttttgtatatatctggattcatatatatagaagttggcattttttttgacgaaataaaagtactagtaacatatactaactaatagatataaaaagatatcgtaaatatatgcattttatgccacctatatattagttttcaaattcaatttcattgtgtttcagcagaaatcaacagggaaaaaataatatgatagttttaaaagtacaattttgctagatttttctctttttaggccagccatatctaatactccctccggttctatattaattgacgttttagacaaggttaaaatcaaagttttataactttgaccatcaataactttaaaaatatttagtttaaagaaactaaaacaatatatatagatttgtcttttaaagcactataataaaagtaaatatgcatttatttattatatatattatagtagaaaaataaggtcaaagagatatcttgtagaccatgtcattgttcaaaacgtcaattaaaatagaaccggagggagtaatgtgtcagtataacttattaggtatacctattgtacttggattcgtatctaccataatatactgcaaatccaatattatatggaaaatcatattaaaatagcctatcaacataatgaatctaagaggaatttttatagaagcttacacttacaagtaaaattatttttattttattactattattgtgacatttattagttagcacgtgtgataaatgtatcttaaacttgtgtacaaataatatttttgccggtaattatcgataagttctatctcaccatgatatagatacagccatacatataagtcgtgctttcctatgcgggcatggaaaacaaagaaattatatcaacgtgtgagccatgataatatgaatagactaaatttcacggaactacatatattttaatcaaattatcgtaaaactagatatttaagacgtggtatgataaactacaggtttagtgattaatttagtttttttttaaaaaataaatattcaagactaaatattatgaaattacatacttaatattgaagtgatcacaaactatatattctaaattttaaattcgtaccactatcttcacgcgttaaagctatcaacattctagttttgtgataaattggtacaaaaattataattttgtgataaattttctatttaatctttatttatgtgacacttcattctaaatctgtagttttgtgagaaatttcaagctaattaagtctgtagtagttttgcgatcctttaattaaatatatgtaattttgtgagatttactgataaaaacgatctaatatatataagatgggtattacaagttagaataaccaggtggtcaaggacggtagaactggacatacatcgatcgagtactgcctgcaaacagacgcgagacgcttattcaactcaacagcgtcaacagacagacattgcacgaaactaaactcgtcttattgagacacataaactctagtgaatattgttgcagctcaaataattagcaggtgaaaccggacgggtagttcttgccgcacttgttgaggatgatgctgaggtcgacgggcaggttgaggttgatgaggccgagcacgttagccttcagagcggtgcagaggcagacggcggcgtcgaggtcggcgataccggccagcagcgggcagcaatcgtctgggccgcgcccaatcttcacaccgatcagcccgttgagcaggttggcgcacaccctcagcttcagggcgtcgatcgggcagcggccgtgatcgtcgtgcgacggcggcgtcggggcaactggcttgccggtgcagttagttactgcacacccgaagaacaggatcaggagggtcagggcaagaaggggagcgatcttgttggaagccattgctcaagtggtgaagtgatctagctaagctagtaatggtgctagctagtggagtagacagtgcttcagcttgtgttggcgtgtgatggttatttatagatgattgctactccctctgtgttccatttttatacactacttaaaaaaaccctgataggtacctgctcatatatgccgatttatttaaaactgacacctattgaccatttctcaccttcacatgaggaaaaaatatgtaaccggcacttttgacaattataggtgtcaattctaaataaaaactggcacccggattttttcaaatacctataatatattatagataccagttcttcgaaaaccggcagttgaaaaaaattgagccgaaccgagccaccaattaactcccaccaaagtcatcatgcatccactccattcatatccgatccgcttgtgctctctctctctctctttctgtctcgcacttgtcctctcctccctctgcaacgtcctctcttccctctgcgccactgctctgtcgcctctagcaccacatccattgccactgccaatcgctacatccggcgccgccgcccattgtgccaccaggtctggcggcgatggcattggcatgcagagggcaatcgccggcgacctcggcaaggagagagaccttggcaaccggcaacagctacctccacaccgctcctccgatggcgacacatattgccaacgatggcgggaccggggagagtaagttcatcttgcttgtgtagttcttgatcttgtgttgttgttgatctgtaatctgtgataattgttgttgttgatatgtgatatgtgaaggatgggatgaggatttttgtagttgatatgtaatggatgggattaggggcagcttgaaagaatcgactcatcgagccgagccgatgcttggagctagcttctcttttcatttttttttcttttttgaatcggaaagagcacaaaggaaccggtaccaatgacctagtgtcattggtgccggataattggtcttggctatgaaaccaacacgtatgccaggtttgcaaccagcacctttaaggtgttatgctgtagtaatatgatgaactcaccaacgtcataaatttagggatagaggtaatataaattatatgtcgttttgacttttttaaagttattaattttttgttgaaagcttgatcaactttatataaaaataaagcaacacttatagcaccaaattagtctcattatatttaacattgaatatattttggtttcttttttattttgggttgaacttgatattctttatgaacttgatcaaacctaacaaaatttaactcaggaaaaaaaatcaaaactacttatactataatatactagtaatatggttgtgctaaaccctatggtacaattctatttgtctttaataatttttaaaacttcatgctagcaaaaaaaattttacatgacagggtgtcatagacataatgacggaatccttatatgacaagtgtgttgatgagcacggttttgtggactttgctcgaagtggcgggatgagcaatcaaaagcaatcaaagaaatttctccgcgccttaaacgagcagtgtgacttgtagaaaaaggattgcttttcaatgaatgtatgtgtcatggcaattatgcttcaaatgtcttttttgttgaagagttcttgtctcagttgtcacattatgcaaaatcacaccaggcaaataaattaaaatggaaaaatggacacaattcttattctgctctattgaagaaaatgttcctttgctacttcttgagcatttttgttcttttggtatgtggttgtcaagtgatagaagatatgcagttttcctgatttgtttacggtatatttagtcacaaacaaagcattgtaattagtaggttcttttttccttttacttttttctttttgtgttctttgatcgttccatcatgttctatcccttacctactggattaagatggatgaaacatttgattttttttctcgaatgtatgtgttgacaaaaatccaggaagaactccacaatctaacatgtctctaagtgtaaactggcatcaaagatagttaactaatgtaaattggacatgagcaaaaataactttatcacaatgataatcgagcataaaaaagggataattgctcatttgacgctctttttaagcataataactaccaaactaaccatatattttcaagtttgcttagttgaccctgttttctcaaatcgtattttccgtttgaccctgttttaactctaccgttagggtttcatatagaaaacagagaaaaaaatatttttaccaccccaaataaccaaaatacccttattacactcaaccatatccccaagcccccatccttatccagtcccaacccaaatcttggcaactatggcgtgcagcaccggagctcgccggcatgcagaggctggaggtcgggtggcggcggcgtacgcatgaagggagatggagcccagcatgtggagggcaggcggtgatagcgcgcgcgcggagggagggagcggcacaagcacggagggaggcggacgccggcacgtggacggctagtggtgacggcgtgcgtgcggaggaagggagagacgccctgtgtggcgagaacgactgacggcagaggggcgtgggcggagggaggcggaggccagcgcgtggatggcgggcagtgacagcatgcgcgcggaggaagggagcggtgccctgtgcggcatgggagctcgccggcgtgtgaagtctgggtagatagaaactaggtcaaatgagaagggtataaacgtctctttttccttttattaacaccgtttgcttggcttcacgaaatagggtcacatctgatgttcccttttagaaaatagggtcaaatgagtaaacttaaaaagtagggttaaattggtagttacgctttaaaatagagtcaaatgtgcaattgcctaaaaaaccacaatcaatgatataatcaacatataaagacggagaaaactagcaaacacaagggaggagcgagcgcaatattaatatatatccagattaagggaacaaaactcttaatagtactgttaaccaaagcaacagctgagaaggaacaattctcgattataaagcttgagttaccacggggattcccaacatagctaggatctttcctactcaaaacattcagagccttgacagtctagtccaaccttttgcctatcaaaagtaatctaagacctctgcttcttcttctccttgaagagtgcgagcagtgacactgcagacaccttcacaaccttcaacctgacacctggaatatctcccaaggcatgccctttccaaccgaatccaacaatcagcacctcatcctagagtatccaagatatcagaaaatccttgaaataccatcggcgagtacactaatcccagaaataccatcgacaagagcaactttctgaaaataccatcgtacaagcctttttctcccaaaaatgccatcaccgtcaacttaccgttgattccacaccgctacaaccattttttttcaaaaaatgaccagattgccctcagtccaaaatatacccctcccattctcccaattcacggtaaaagaaagaaaaagaaatgaaaaaaatgtcaccacccttcttgtcgaaacaagattttggcaatactaaaaaggggtggctatcaagctggaaaagtggatgggtttagagacaagaaattttatacaggttcaggccttcttaataagaagtaataccctacttctgttcgaggattgatccgccgagtgttttattgattgtatgatctgagagaaaaatcgtgccccaaaagacacccggacacctccttatatagggaaaggggtccgtattacaaagtacaacccatatccctaacggaataggtagttacagataagatacaatcgtaaccgactaggatcccgggtatttccttgacatagaagtttggaatttaacccgattccctttgaagatattctatctatacatggcaccccatacctaatcggatatacatgtcgtatgggtatggggtatccataatctccacagtagcccctgacacctttacagtcgatgaaatagtcttctctcgtaattcaaatgataatccgagtgcttcaacttcctctgtcttagtcttctgagtagatgcatctaattaggtgtagcccccgactatgtgattagttaaataaaaactaaacatatagtcaaagtgcatcaaaacatccatccgagtggttttacaaccgaatcacccaagggattatatggctaagcatgtgtggcatctgataaaacatccagccgactgctttagctttaatgcgccaaaaatgaggtatagaaaaggcccgagtgagaaacactctaaaggtctataaaccaacatacatgataaaaatccgagtaaaaactctcaaaaagactcatcaaatgtggtataaagcatgataaatgatgagtctaaatagcctaagctatgacccacgccattattaaggtaagcatataacatgctgagagaatgaccatttaaaattagtcatctcaataaggcccgaacagctttgtagcctaaaaaggccaacaaaattagtataacacttttctgttgggcacccttttatttgcattgtagtaattccaaagaattatctaactacgtcaaaaaggattttagcagcattgggctattctgtcgtgagcaacttttgccaaagcaaaaatatatacctaagtccctaaggatcacaaccagccacgctgataataaaattgggctgaaagtattgtttaggcccaggcccataagcatctcccgataccttagtgaaataaacgctaaaatagagcgccgtttcgtcttccccgccgcgatcctctccattttccccacttcccgctacaatgcaaatactgcgccggcggaaactagggttcgcaaatccgcaccattccacccctctcgaagctccgttctcttgcatagatcttccgtacatccatcgcaccaatatcctcttcattcgctgccgccctcgctccaaatctaatcatccatctcgctcccatggccgaggagagagaaagcttcgaaagtcaatgggctccctccgatgtaacggatgagaacttgaaggagatggtagcacatggcgttcttccggcaaaggagatcatcgggtggcgtccggcatgcggcgaagcatttctgacccctgacacacacgaggtcgtggtattttctcacttcttatatggtggttttcctctcccaacctcaaagttctttagggggattgtggagttttacggaattagcttgcatcacctaaaccccaattccatagttcacattgccaatttcatccatgtctgcgaagcttttctagggattaggccacattttgccttattccgccgcatcttcttcctgaagccccagccaaacaagaacaagccgtgcgtcgttggtagggggaccggttttcagttaaggggaaccttaagccagaaatacttctccatgcccttcaaaacctcaaacaagggctggcatgcaaactggttttatgtgcaaaatcctgagctagcactccccgagtactcctgccttcctccaacatatcaagacacccggaactcgcttccaatgggagatgaggctgcccaagcactttctttgatggaacgcatgttgaaacttaaagagcagggtctgcaaggggaacaaatcacccggcatttcatcaagagccggctggcacctatcaaagagagatctcgcactgcctttgagtttgatggcaagaatgaccccaaccgtgaagatccagaatctcttgagtttaaaatcatgaaggagagaatgtacaaaatcttctcaaacgctatcgcggttagctgttcacacctgctgccagtggtgccatataatgctttcaaccctcctccaccggtatgtatcagacatctcggcctttcttatgacatccttttgtcttttgtaaggttggctgaaaacttgaaatatcatgcataggaattttctttaatgaaatctgatcctccaatcgctcaacgccgctcaccccgccggcaggctggtcaggccagtggagggccgaaaatccggtctgatgctcagccaagcatctcaaagccaactaaccagtcggactctcgcaaaaggaaattaattctgagtgacgacgagggtgacaatgttgaaaaagctggcaacaaagaggtgactggaaaacagccaaggcaagctaacccgaagaagaaaacatccagtcgtccaataccaaaaatcaggaagtcatccaggtacaagtcattaagcaatttcccctgtatcgccaaacatacaccatcgaagtagtgttaatagcatatctcaaatctgcaggaagccatctgacatcgatccttctaggaaagactaaaccgactagcatggagactggtcctacgacctccacagaaaccgggccgaccgccgaaaatcgcctgactagtagtcaaccagcgaccgataatatagaggccagcaatgagcccctgactggaaaccagtcggccgaagctgaagccagtgctgatcaggtgcccccgactggaaaccagtcgggtacagaacaaaatgaggacatcccggaaacagaggctcgagcaagcagccttccctaaaaagataccaacaccgacccgaagtccagttcatccgataaggtgcaagggccttctcgtcctcaaccaaagatcataacaggtaatcagctcttccaaattcattttgatttgacaaattctcttcgattgttttatcatcatcatctgtgaatacgtaaaggcccaatgatcggtgacgaagaagttcttcggatttagtcagctgaagattctcgccaacccatcttagttaaatggtgggatgatgaaatgcagccacaagggattataataaataagtagaaagaagacgaggaagtgtctttgcttgcaaagacgctcaattaggccactcgtctcgtaaatgtatgttttttgcacatagctttactcatcctgttggccacttcactgaatagagatgaatttgcaatgcacagaattcatcttaggaatgaagcaaaaactgcaaccctcgagaaactggttcctcaccatggaaccctggaagagacaagagcccaactccatgaaaccagggagcttgccaggaaaactgaacatgatcttagggaccgaatcgccaagctccaagattccaatttcgagctgagtggttcatccaaaggtaacattttttcctgtttgacttattccaagctgctatccgtatgtaattaatcaatggaaaatattatagtgcaagttgccaagatcaccgagctagaaaagcgaatcaaagctctggaaaaagacaagggtgaattgaccaaacagagggactcggctctgaaagacatcgaaggtatttgtagttaaaactccagaaccattcttgtcttcgtgcccagtcattgatgtgaaccatttatgcatattgcaaaattaaatctcaggctcaattcgacatcttggtcaacaaaattaagaagcttgaaggagccagggatgaagttgccaacgccgctacaccactcatccaagccatgtttttttaataataatggtctgagttcgttcgacgctattgaaacttcgacaagctgagagctgcttcggatacatactttaagaacatcaaagaagctggatgcatgggggcgagcatggcattggcaatgaccaagtccttgtacccgaagatcgatattgacgctgtcgacggctttgcagacgggaagcaaattgaattgataagaatcacactccattattattatagtagcccctgactgataactcaaggagcaacttgatgttagcaatcaaagagggaaagaagatacaaaagtaatgcctaagcataaaaacgatgaagatgctcaatattccaagagttgtcgacatgagtaccgtcttcacgcttgagtcgataagaacctggccgagtaactttagaaattatgaacggtccctcccataatggagataacttgtgccgatctcgtgtagtttgaattttcctcaaaacctggtctccgactaagaaaacccgcgatcaaacattgcggttgtgacaacgtcgcaacccttgtaaataccgagccgactgaattaaggctgccccacgggcttcttccagtcggttgagatcgtcaactcggtcttctccgtagcgctcctccttgaagttgcaaaatcgcaaagattcgaactctacctcgcttggcaacattgcttccgcaccatagaccagaaaaaacggtgactgacccgtggcccgactgggcgtagtatgcagagaccaaagtacggatggcagctgatctacccatttgccagcatagggatgcagtcggtcgaaaactcacgctttgattccttgaagtaccataccattggcacgttcgacttatccattgcttataggatgcgctacggaggcatagcaaattttgatgccgaagtcttcacaaaaatctttaaacacatcgccagtgaattgagtaccattatcggtaatgattcgattgggtaccccgaaccggtgcacgatgttgatgaaaaaatctctagccttgtccgctgtaatcgtgacgactagtttggcttcaatccactttgagaacttgtcaatagctacaaaaagataagtgaaaccaccagtagcccttttgaatgggccgaccatgtcgagcccccaaaccgcgaacggccaggataacgggatggtttgcaactcctgagatggtaaatgagtctgtcgggcaaaaaattgacaaccttcacatgttcgcacaatttaatcggcgtcggatacagtagtaggccagaaaaaaccctgccgataagccttgccaacaatggttcgtgcgacagcgtgattgccacagatgcccgagtgtatatcttttagcaattgccttccctcctccaaagacatagcattgcagaatccctgatggacttttcttgtacagctcggtctcatgtatgacataaagcatgctgcgcctggagatccgctccgcctcgtctttatcctgagggagttcttggtcaaaaacttgatgaggggctctctccagtcggcttcgatcatgcttacttcttgagtgtccacagcctcggttatttcctttcttggtatggtcggttcataaagatgttcaacaaacacatcagaagaagctgtttctcgtttcgaaccgaaattggccagtctgtcggctgcctcattgttatttcgaagaacatgggttagatcgaggccatcaaacttatcttctaacttgcgtacctcctgccgataagcagccatattatcatcgaggcaggaccactctttcatgacttgattaacaaccaactgagaatctccacaaactatcagacgccggatctccaaagatattgcgatccttaatacatgaagaagcgcctcatattctgccacattatgggacgtagaaaaatgtatccacaatacgtagctcagcctttctcaagtcggggaaatcaggacaactcctgctccggtgcctgaaagcctctttgacccgtcaaaatgcatagtccaatactccatcttttctataggcatgtcttcttggcactcagtccactcagcgataaaatctgctaaggcttgggacttgatcgaaattcgcggcttgaaggatagatccaaagacatcaactctaaagcccactttgcaatccgtccatttgcctcgcgattatgaagtatgtccccgagtagaaacgatgtgaccaccgtgaccgagtgaccttgaaaatagtgagataatttcctaacggtaattaaaacaccatataccaacttttgcacctgaggatatcttgtcttggagtcggctaaaaccttgctgacgaaataaattggtcgttggactttttcaacatggccatcttcttcacgctcgacaaccaggaccgtgctcacaacctgagatgttgccgacacatataacaacaatggctcttgcggatgtggtgaagttaagaccggtggagtggtgagaagtttcttgaggtcttcaaaggctttttgcacttcgggtccccactggaaattgtcggttttctttagcaacttgaaaaatggcatcctccgctcgccgagtcgtgagacaaaccggctgagcaccgccatgcatccagttagcttttgaacgtctttctgggaactcggcggtttcatgttgagaatggcgttgatcttctacgggttggcctgtatgcccctatgggatatcataaagccaagcaacttccctgacggtactccgaagatgcacttttcaggattaaacttcatcctgaaggcgcggatgcttgcaaaggtctcttctagatccgcgatcaaatcagccttctacttggtcttgacaactacgtcatcaacataagcttcaacgttgcgaccaatctgagttgaaaaatatctctggatcatgcgttggtaagttgctcccgcgttcttcaatccaaaaggcatggtgatgtagcactaagccccgaacggtgtgatgaatgaagtcttcaagtagtcggactcttttaatcggatctgatgataccctgagtagcaatccaggaaactgagtagctcgcagccggccgttgagtcaactacctggtcaatgcgaggtaacccgaagggatctttgggacaagatttgttgaggtcggtgtaatcaacacacatacgccattgcactgtcctcttccgaaccaggaccgggtttgccagccagtcgggatgtaggacttccttgatgaagcctgctgctaacagcttggtcaattcctccgtgatcgcatccttcctatcctgtgcaaaacggcggagtcgttgcttaatgggtttagcgtcttccttaatatgtaaagagtgctcaataacctctttaggaataccaggcatatcagatggtttccacgcaaagatatctttattattttgaagaaaggtgatgagcgcgctttcctatttacaatctaactcagcgcttattacagcagtcttagtgggatcagagggatctagaggaattttcttagtcttggcatcgccttctccgctctttgatatcttggatgcatgtcacaccctaaaaatcttaaatatataaattgttgtttaattggaattattagaattgattttaaaagcctagaagagaagatctaattttaaataataaattccaatataaaattgggccagataaaattttattaaaaattttgcttgattctatattccttgattttctgggatttatttgagccaaggaagtatttttaataaatggaattgaatttcatgaataatttaaattggaaaagttttaaaaagtcttcttttggctttgggccgaaagtcggcccaaatctctctctccctccctcggcccaagccgggcccgcaagcgagccgccgctcacgcgtgcgcgcgcatccgcccgctgacaggtggggcccaccagtcagggccgtcgtcaacctccagccgtcgcccgactgaaccctagccgagccgcgccaccgtctccttccaaattcgttcatccctttcccgatccggtgaaattgatagagggaaaatgatccccgagatccactctaccttttctcttttggaatcgtcggctaacatcgtttggaaattggtagattcgatctcgaatcggattcgtctctctccccgaaccctagactttccttcgggccgccggccgccgtgggccttcgccgccgccccctagccgctataaaaggaccctcgatgtctcctctctccgccgccaccctcgctttcgtctctcaccgccggtagagctctagcgccatgtagcctagcgccaccgtcaccgccgttcgtccagccgtgcgccaccgtcgctccggtcgtcgtcgtcgctcgggaaagccgccgtcgtgatcatcaagtcgtcgctgacctcgtccgcccctccgttgtcgctgtagatcgccggagccccgccgtcgtcgtcgagccgaaggtcgccgccgcttcttcctcatcgctgtcgccgtccgttgaccatctgctgccgttttggtcaccggtgagttcgccgcgtcgcccgcaacccgtaggtgccgtccgttcgcgccgccgtgccgtcatttgccggtgagcacgcgaggccgagccaccaccggtgatggcgtcaccgttgacgtcatcgatgccgtccgccatagacccgcggtagatcaagatgatctcggtcgttcattttggataggatcaatcccggccgttcgtttccgtgagtcaccgccgtgcacccggtccaccgtgaaccctagccgctgacgcaataatccccttttcctgttcaaaaataattcaatattgcgtcataattcaattaaaatctatataaatgatttaatccgattaaatctttgaaaattcataactaattcatcttagctcggatttagttggttcaagtctctaaatttttctaaaattgagatctacatgttaaaaatatccacatgtactgctcatgcttgtttatgtgctatttgggtgattttgttcttttctctttagattccgacgttcccggagagtccgaatttgcaggagaagactttgaagagttccaaggccagcaaggcaagtcacacagatcccaaacgatcctttgagcatgttgatcccgtttaaagctattgtttctattcaactattgcatttatttttgaatgtcattgggtggaaataacctattgttttgttatggcccttttgtccttgattactctattccttgataccttgggttattataattttactagttgagctttatatgttggttcagctagatattagacagaattgcttagccatgcttagagacactagctcatataaatgggataacttatgattcactattatttaatgatggcttaatgatagctcacgatggttgatcgtgattggttaattaatcaatttgccaaccaaaacctgataatggtgggttgtgagcatatggttttgatggttgtgctcatgacaattaaggaccggttcacgattttcggttgtgaaacatttaccgtgccaaccacaagccagcgttggcaacggctttactttctgtatagtatggttcatagtagagcaccagactgtgaagtggcggagataagcccacgggggtcgctggggagtccatgccttgtttaagggggtgattatgatccgggaacggtgcactgctttgaattgtattatatagagggtattgtcacaatctctattcgggtacttgtcaagtatcgcgacgcatggttgacatgatgttgaggttgtgtcttgtgggtacagtggtacacctttggccagagtttaaactattcgaatagtcgtgcccgcggttatgggcgggtctaacaatgtctttcgtgattagtctcacatttctcaccatattaatgttaataacttggttagctcctggtttggaatggttaattcctggtttggagttagaactgtgcagccggggttggttgttcagaatggttgggcctacgcaacagggtatgttgcatagcgttggattaatattgtttaattattatttaactgttttattaaattctgaaatatttgttaaatgctatttatgcaaatgagactatattatgccatcctttgctatcccgtgcacttgcatatttgctacgtggcttgctgaatatgtcatatactcaccttgcaatcattcatcagaggaggagttctacagtgatgctgttggtgtggatgattaggagtagccctggtcaagctgcctgtggagaggagtcgcctgcgctgtttcttttattttccgcttcttagaactttattgattgagaggaactatctacctctgtaatgacattttgttcgcttattaattagagtaataattgtactgtattatcaatttgttattgtgtgcctcggctgattcctggacgagggtttacatacatgtaagcgtttggaattttggatagaaattccgggcgtgacattgcaggcacttctccttcggttgctgttgatgcagccagtcggatctcctctcgagcgagcgtgatctcgcgagtctgggccatctcgcagctttccttgtcgcaggtgacggtttgcttgatgtcactccgcagggatatgactcctcgaggacctggcatcttcatcatcctgtagatatagtgtgggacaaccatgaacttggctaacgccgggcgtccgagtatagcgtggtacgctgtctcaaagtcagcaacttcaaagcaaatgttctctgtgcgaaagttctcccgagtgccgaaggtaaccagcaaagtgatctggccgagtggagtagaagatagcccggggatgaatctgtgaaagggcgcactactcggcttcagttctgtccgagggatctgcatgtcgtctagagtcttggcaaaaaggatattgagtgcgctgccaccatcgatgagagatcgtcggagcttgacgttgcgaaccactgggtctagcactagggggtaccaccccgggtggaccactcggtcaggatgatccgggtggaccactcggtcaggatgatccgagcggttaaacttgataactgtctctgaccaccgaagatattggggtgtatcgggctgaacaacattgttctcccgtttggtcagcttttgctttcgcttggattcataagccaggggtccgccaaagatgtcgttgagttccttgcgggagtcttgaaaaccagtcggggcatcatcttcatcatccttcttctttgacatgctttgatctccgtcagtcagcttgcgtgcattcttggcgtattgctctgcgaactgtttctagacgaagaaatatttggccgcatgatttgaattcggacgatgcgggcattgggagttcatgatcttgtcgaaagtgttgacgtgtgagcgctgtcgggaggatggtgtagtagttgccacaagttcctcgggcttacgcttgcgatccttgtgattggcacttccactcccccctgtagtcggcgcatctttctttggcttccaggtgctgcccgactgcttggatgcaatgacaacgtcttctactttggcatactcattggctttttcaaacatctgcttgacagtcttgggaggcttgcggccaaacttgccgactagttcatggcgaatgcccttagtgaaggcggcgatgataacgtcgtcagtgatatcagagatcttgttacgttgctcagagaaacatcggatgtaatctcgaagggattctccggacttctggataatgttgtaaagatcaaactgggtaccaggacattcaaaagtgccctggaagttggcgatgaagtggtcacgaagctccgcccaggagccgatcgtgtcacggggcagcccgtgaagccaggaccggacagagtccgctagggccacggacagataattagccatggctttgctatctcctcctgctgcacgaattgcgagaccgtagactgtgagccaagactcaggatttgtcgtgtcgtcatacttctcaattccagtcggtttgaagccggccagcaaatccactcggcgtaggtcacttgtgaaggcagcaactccatccacatcgtcgtcataacgatctggtgaatggtgggggatgtggcctctcgccgcacatcactggttgatagtatcgcgatgatcgacgggacgccttcgacgtggggagcgaggttgttcgacccgacgctccctgtgtcagtcggtgtgtcagtcgggaggcgagtgaatagatcgttcaccgtgatccctgctcctaaaaggaggtggctatcaagctggagaagtggatgggtttagagacaaggaaatttatacagattcaggccttcttaataagaagtaataccctactcctatccggggattgatctgccgagggttttattgatcgtatgatctgagagaaaaatcatgccccaagaggcacccggacccctccttatatagggaaaggggtccgtattacaaagtacagcccatatccctaacggaataggtagttacagataagatacaatcgtaaccgactaggatcccgggtatttcgttgacatacaagtttggaatttaacccgagtccctttgaagatattctatctatacatggcaccccatacctagtcggatatacatgccgtatgggtatggggtatccataatctccacacttctacaaccctaaaccagattcaggcgtctcttccgcccagcgacgacggcgaggcagcactccacggtggtggtgccgctatgcctgacgcagtagttccaggaggaggcgcgggcggtacatggcggtatcggcgcggcagtcgcaaggagcagtcaggagtccgaggcaatggcgcagggtccttaggcggcggcgatggcgctggctccacaggcggcggcgcggtggtcacatgcatcggcgcgggctccacaggcagcagcgctggcttcgtaggcagcggtgcggcggtcacaggcgacgacgaggaggccgcaggcgccggcgcggaggtcgcgggctatatatgggtgattttcttcttcctcgccttcttctttagctaactcgtagcattgctgctgtttgtttgtggcttgctcttgccacgcagagattctgagattccagcaacagcggcggcgtggtgggatgtgttgttcatatgctttgcttgactttatatcatagacccgcaatattgttgcctgtatttttcctcttgttttcaagatcgacttttttagagttctgctagcctgtactgttctgagcatatagtggtgttcatatgagttcttgcctagctattttgtcattcagtttaattttggtggttcctgacattcaataaatttggacaaattttggtctacaactcgaaaatgagttcgtatatcatagtgcagatttcagttttaggaatagtaatcctaaaatttggacagtttcagttgtgtgaaaattgaaaatttcagtttaagttttaggaagaatattacctggtgcaaatattccaagaaaaaatccactctttaccaaagtactacctccgttccagtaaaaaagaaaagtactacctccatttcaggttataagactttttagcattgtccacattcatatagatattaatgaatctaggcacacatatatgtctagattcattaacatatatatgaatgtgggcaatgctagaaagtcttataatatgaaacgaaggaagtatcaggcagtagttttgccgatacattatccagccttcgcaagggcagaatggtctttacaccatgtccaatggagtagagctgacagagcagtgatggtgatggcatttctgagagaagttgattcgcacgatggcattttggaagttagattcgtcaatggcttttcttggattagaacactcgtcgatggcatttcatagattttcactttgacgtaataattcaatactcatgtggtattcctccgttagagaacatgtaagctttgaaatcagtcgagctttactgtggtctaaatcaactatgcaattctctgtagactcaagggttaattagctccttgccactacaaatataccaaattagaaaaatattactactattcacgatatcagcaacgtgtcactggaatttggggaaattggaactataccactccgttgcattttccatccacttttctatcatccccgttaattctatctgccaactacggtggctagccaacaacgactatgcagggtgctcaactgccgaaagctgtcggacaaggcgtgcgcgcacgaggcacagaatgagctcatcccgctccgtgtggtggtgcaggttctcttctttgagcatgcgcgcgcggtgttcaagattgccatgcatccgatgaagctggaggaggattgatgaggacatcccttccaacgatacaaccatgcctattgcacaacaaggaccaatgactagagctcgagctcgtgaacttaattatcaggtaaaaccattcctagctaatcatacaagttcttctcagaattgggtgctactaaatagttgttgtgatctacttgttgttaggaatatgggagaggaaccagatcgcaagcaacactagcaatgctgatttgatgaagtcaatgctcttcactccggagggcaaacggggcaaatgagtacttgttggaaatatctcatcgtctactttcagctatgtatggcctcaaatttgacccaggctgctcagaatgacgaaaataattcttcacatcagaaacttgggcttgggccttgtatctttacagcccattaggggtccacaaaacctagggtttgctcccacctcctctcctgatcattcctccacttatataaactcctagcagccaccattttgcactttgggttttgtttggatgtaagtttagctgcagctacttccttgtactcgcgtgtgtcggctagaccacccggatacttgtattcagaaccccattctggtttgtttcagtttcatcacttgacaagtgacgtgagttgtttccttgtcaacttgttcttgctagttcttcgattgcttgcaggttcaaggttgttcttggcacggtaagaacagcaacaacgtggagtcagtgtaccggttgctaaggcgcagcacctctgtggtagttgtagtcggatcgccaacgtcgtgtcctcccccaaatcgaagtttatcctcctcttatcgaaagatcgggaacccctgctgctgcatcaagtggtatcagagctcaagttgctaggtgagagattttatcacttctttgtttttacctacagcccaaaaaaaaccacaaaaataggtcagatccgaaatcaccaaaactagttgagcctttgtagttctacttagtctttgcttgctgagttttcgattgcatcgattggttgagttgttggttctagtagtttagtcttttagagtttcgggttctactcacgattttgtcaccacatacacttccaccatcacttcatttatcttcatcccgctgccaccatcaccaccatattcaccacgaaatccacctccaaccccaccaaatttcgtccaccacaaccagcagcaccctcatcaccacatcaaccacccccaaatgcatttattgctgcctccaccaacagccaacccttttgcaactttttgaagtgaatcagcccttcccaagaaagcatttaagtactctcacttttgacttgttggctgaatcatgtaactagccaaccaacccatcattacttcttgttttgatttgttggctgaagcttgtgaaatttcgaaaatgtttgggaaaaggttattttgctaaggcttgttttgacttgttggctgaagctttgagcttgctgtaaaaaaaagaaagaaatgaaaaaaaagaaagaaaaaaatcagaagtgaagagaaggaaaaaaaaggaaggaaagagaggaagttgttgttgctgctgttttgtttgtgttattttcgtgctattttgcgtggctacgcttgtgactaggctcgcgtctctaaagggttttgcctaggaccagcacaataccatcgttgagcgattattcaacttgcattgattaatgtggttctagttgtaccttgatattacttgcagccacctatagctccacaatttttatctactatatcacaggatcgtgcttgttgtcggctccggtactactaaccattgttgttgttcttgctggttgccaatgccttttacataacaaagtaagaacatgtaagaactcgtttgcacaagtttggtagaaatggagatggacaacacctagctccaatagttgataggacatatttcttgtgaattgtttcttcccattaaccatgacaggaggatcgagggagcacactcaactttcaccacgtacgagggacatcatacaacattttgagcgccaagtgagggagcatgctgaaggccttgatgaggatgttagggtcgccaatgatcgccttggtcaattggaggctgctcaaattgacaccaactccaagctttcctcattggagaggtcccttgtggctttgaacacttctcttgcaggtatcttgaatacgttggagagaatgggccaagatggtcatgatggatcggctaggcgcaaccacaatggccatgatgctaatagcaacatcgcggcaagggaagaactggagtacgctactgacaccgagcatgatgaggagatacttggtcgtccacaaagacaacagtgccggcagcgccatggcatgggcgctccaccacgacgggaggtacgtgataatgatgattctttaggcacgatcaagtttaccattccttactttgatggaaaatatgaccctgatgcatatcttacttgggagttagctattgatcagaaatttgcttgccatgattttcctgagaataaacgtgttagggctgctaatagtgagttcactgattttgcatccatttggtggagtgaatttgttcgttccaatccaaataataacactccccaaacctgggatgcaattaaaagagtcatgcgagctagatttgttccttcatatcatgcacgtgatttgctgcacaaattgcaacaacttagacagggaaacaaatatgtagaagagtattatcaagctttgcaaacaggaatgcttcgttgtggattggtagaaaatgatgatgctggtatggctagattcatgggtgggctgaaccgagaaattcaggacattctagcctacaaagaatataattcaattaatcgtttgtttcatcttgcttgtaaagtgaaagggaagtgaacggacgaagagctagcttcaggactaacatttctgcaggtcgtgctagctcctggacaccttccaacgctgctgcaccgtcaaatcgagcagcagcaccatcgtcctcaagcaacaagctgcgtccctctacaacaaactctataccatgcccgagtgaaccaacaagaggggttgttgctacaccttccaagagctcatcatcagtggcatcatcagaaaggacaagagatattcagtgcctacgctgcatgggctatggtcacgtgtgcaaggactgcccaagcactcgtgtaatgatcgtgagagctgatggtaggtactcctccgctagtgatttagatgaagaaacctatgctttgcttgcaactaacaatgcaggggaaggtgacgcgccccacaaagatgagaaacacattggggctgaagctgcagagcactatgagagcctcgtggtgcagcgagtgctcagcgcacaaatagaaagggctgaacagaattagcaccacaccttgtttcaaaccaagtgtgtgatcaaggaacgctcttgccacgtgatcatagatggaacgtgatcatagatggaggaagctgcaataatttggctagtgctgaaatagtggagaaacttgcattgagcacacagccacatccgcagccctactatattcaatggcttaatagcagcggcaagataaaggtaacacgattggtaagagtacattttgccattggttcttatcatgattcaatcaactatgatgttgtgcctatgcaagcatgttctatgttattaggtaggccatttcagtttgataaagattctttacactttggcaaatccaatcaatactcctttatgtataatggaaaaaaacttgtgttacatcctatgtctcctgaagtaattttaaaggatgaacttgctgagctagcaaacaaaaaaatcaggagcatactaggagtgagcatcttattgcagctaatgaacttgagaagcataagaagaaacccaccaactctgttcaaaataataaaaaagagattaagctgaagggatcttgtttcattgcaacaaaatcagatttggatgaagttgacactgacactgttgtttgctatgctttggtttgcaaagaaaccttatttccaattgaggatactcctatttctttgcctcctccggtcactaaccttttgcaggagtatgctgatattttcccaaaggaggttccactgggactgccaccaattcgagggattgagcaccaaattgacctcattcctggggcctctctgccaaaccgtgcgccatacaggaccaacccggaggaaacaaaggagattcagcgtcaagtgcaagagttactcgacaaggggtatgtgcgtgagtctcttagtccttgcgctgtccccgtgcttttagttcctaagaaagatggctcatggcgcatgtgtgtggattgtagagcaattgacaacatcataatcagatatcgtcatcctatccctaggctagatgatatgcttgatgaattgagtggttcacttgtgttctctaaaattgatttgcgtagtggttaccaccagattcgcatgaagttaggagatgaatggaaagcagcttttaaaactaaattcggcctatatgagtggttagtcatgccctttggtctcactaatgcacccagtactttcatgagattaatgaatgaagttttatgtgctttcattggcagatttgtggtggtatattttgatgacattctcacatatagcagatcaatagaggatcatcatggtcatttgcgtgctgtttttgatgctctacgagatgcacgtttatttggtaaccttgagaagtgcacattttgcatagatcgagtctcttttcttggctatgttgtgactccgcagggaattgaagtagatcaagccaaggttgaagccatacatagctggccggttccaacaacgatcacacaagtgagaagctttctaggagttgctgggttctaccgccgctttgtgaaggattttagcaccattgcagccccactacatgagcttaccaagagaaatgtgacattcacttgggctgtagcacaaaggaatacattcgacactttgaaagataagttaacacacgctcctttattccaacttcctgatttcaacaaaacttttgagcttgaatgtgatgctagtgggattggattaggtggtgtattgttacaagaaggcaaacctgtagcatatttcagcgagaaattgagtgggcctagtttgaattattctacttatgataagaaattgtttgctctagtgcaaacattggaaacatggcagcattatttatggcccaaagaatttgttatacgctctgatcatgaatctttaaaacacattcgaagtcaagcaaaacttaaccataggcatgctaaatgggttgaatttattgaatcttttccatatgtcatcaaacataagaagggaaaagaaaatgtcattgctgatgctttgtctagacgttacacaatgctatcccaacttgacttcaaaatttttggcttggaaacaataaaagagcaatatgcgcacgatgatgattttaaagatgtgttgttgaattgcaaggagggaaggacttggaacaaattcgttctcaccaatgggtttgtgtttagagctaataagttatgcattccagctagctctgtgcgtatgctattattgcaagaagcgcatggtggagggctgatgggacactttggtgtgaagaagacggaggatatccttgctgataatttcttttggcccaagatgaggagagacgtggagaggttcgttgctcgctgcacaacatgccaaaaagctaagtcacgccttaaccctcatggtttgtatatgcctttgcctgttcctagtgtgccttgggaggatatttctatggactttgttttagggctgcctagaacaaagaaggggagggacaatatctttgttgttgtagatagattttctaagatggcgcatttcataccttgtcataagagtcatgatgctacacatgttgctgatttgttctttcgtgagattgttcgcttgcatggagtgccaaacaccatagtttttgatcgcgatacaaaataccttagtcatttttggagaaccttgtgggctaagttggggactaaacttttattttctactacatgtcacccccaaactgatggacaaactaaggtggtgaatagaacattatctacaattcttagggctgttttgaaaaagaatactaaaaatgtgggaagaatgtttgcctcatgttgagtttgcttataatcgttcgcaacattctactactaagaagtgcccttttgagattgtttatggccttctgccccgtgctccaattgatcttttgccccacccaacttcagagagagtgaactttgatgcaaaacagcgcgctgatttgatgttaaaacggcatgagaccactaaggagaacatagagcgcatgaatattaagtataaacttgctgggagcaaaggaaagaaacatgttacttttgaacctggtgatttggtttggttgcatttgagaaagaataggttccctaatttgagaaaatctaagttgctacctagagctgatggtcctttcaaagtaatacaaaagattaatgataacgcatacaagcttgagctacctgccgattttggggttagccccacgtttaacattgcagatttaaagccatatttaggagaagaagatgagttagagttgaggacaactcaaatgcaagaaggggaggatgatgaggacatacgttccaacgatacaaccatgcctattgcacagcaaggaccaatgactagagctcgagctcgtgaacttaattatcaggtaaagtgattcctagctaatcatacaagttcttcttagaattgggtgctactaaatggttgttgtgatctacttgttgttaggaatatgggagaggaaccagatcgcaagtagcactagcagcgctgatttgatgaagtcaatgctcttcactccggagggcaaacgaggcaaatgagtacttgttggaaagatctcgtcgtctactttcagctatgtgtggcctcaaatttgacccaggctgctcagaatgacgaaaatagttcttcacatcagaaagggcttgggccttgtatctttatagcccattaggggtccacaaaacctagggtttgctcccacctcctctcctggtcattcctccacctatataaactcctagcagccaccattttgcactttgggttttgtttagatgtaagtttagctgcagctacttccttgtactcgcgtgtgtcggctagaccacccggatacttgtattcagaaccccattttggtttgtttcagtttcatcacttgacaagtgccgtgagctgtttccttgtcaacttgttcttgcttgttcttcgattgcttgcaggttcaaggttgttcatggcacggcaagaacagcaacaacgtggagtcggtgtaccggttgctaaggcacagcacccctgtggtagttgtagtcggaccgccaacgtcgtgtcctcccctaaatcgaagtttatcctcctctcatcgaaagatcgggatcccccgttgctgcatcaagcacgaccacaatggcagtggtgacgaggacgacgagttcgtgcgctggtaatagggtgcgcaaggatagaaattgacaggaatgatagaaaagtgtggatggaaaacacgacaaagtgacacggttttaatttccccattctagtggcacgttaccgatatcgtgaatagtagttgtatttttttaatttgtcatatctgtagtagcataaatccaaataaccctaaaataaattgcacaacctgatttcccaattaacttatccctctggttttccgcacgcgcgcttttcaaactattaacggtgtttcttttgtaagaattttctatacgaaagttgttttcaaaattatattaatccatttttttaaaaaaattaactaatacttaattaatcatgcgttaatacacacaccgttttgcgtatcggagaggaggggttcccaactcctcctcccgaacacagcctttagtgattaggatctccgtaggggagacggagggatctggcagcctataggctctttggcaggaaacaatctggaaataggtggtaatcctatcccagattcaatcgggtctccagtctttgcactctagggtgtcgagacggacggcagtagcgacctccgggtgtctgtgcagcaccagcaagagttgaggcagacagcagcgcgcagcaacctcccagggaagtggctgacaagcttgcgttggtgcgaaagcaacatgctccctccactatcagcgtccacatctggacgcgactcctaggagcatccatgtttggacgctatttgtagtagcgtccttattactttggttcatctttcctcttaattactaataatttaatttaagggattttaattattataaataaaaaagctggtgctccaccactgcttcctcctgctcctgggatggagccccatatccgatgcgaaaacccgctcccctgcttcctcctcctcgtccttcctgtcacgggctcgtggcgtgggatgcaacgtggtgctagtgtgctactaattgagacgactgagtaagtgtgttcctagcaagggagcgtggtaagtcttccatcccgtgccaccctgttagatgaggtaattggtgctatcgtcgttgcgcattagactccggtcaaaatttggatctatagcagaggagaaaagggaaatagttaggcaagctcgtcatccctgcacgcggaacgtatttcacactggagatggggctccactgcggcactgccccagctgatgagaagtagacaagggagggggagacgagagggggggaattaagcacttgaactagaggtagaagataggtgctgtaagattcatgcgcacacgtggtggtagataaacggagtctttccaaacgtgagaagtaccgaggtcctgtacagttttcttccattgagtaagatggcttttctgacacaattgattgtggggtccagttcgtccaagatggacgagaagaagcacaacacggatccaaacactcgaggattaaatcgaaagaaattcatcctaaatttttacgaatgactgttagcaattttgtatattgtaaatcatgcttgcacatatagccatcaatttgggcagaaccatactttcctcttactgttatatagcatctcgcatgaaacatgttgcattgcgttcaaggtatatattaggttaaacaacaacaatggtattatttccataccattatatgaatattgtaaaatcacatgatcgtcatgaccagatgaacgaaattaatattgtttgtacatgaccaactagagagctgttcagctaaatttgcaaaataataacacacagtacaaaattggccggtagctagctaggtttcgtctaactgccatgcaggcgaaccctagcgcgaggttgccagccaggggatccatcgcgtggtcgtgagcaaggctgcaataaccgaagctcgaggcaaaagcgtccgcaagagagggctgcaactctggtgccggccactactagaaaactcattttcggcgtcgtagggtatcaattttcgcaggcgggcatgtaattcggagccaaaaccccactggcaaaaaatgtacccggggtggagggcgcggtccgcctgcgaagatcgatctttgtaggcggaccatataagcgtcgcctgcgaagatcgatgttcgcaggcggcaaacgtcgtgcgcctgcgaagatcgatcttcacaggtgccacttatatggcctgcctgcaaagatgcccctatatagtcttcttcctacccaagccctattcattctccccgaagtttctctctcctaaagtgacttaaatataggggggaggttttgaacttcaaatcttcgggggatttttctacggtgcttagatctactcatttcgggctgca

SEQ ID NO: 7636 - DNA, 20813 bp, Oryza sativa
gaaggagaaagaacagaatctctagtgttatccataataattgaataatcaatgatcctgatgagatagcaactgtgttcacttcttactttgaaaatctctttcaaagatccaatacagatgatgccactccttctatggatcaaaatgacaatgatgtaatttttcctccccctgaaatcccttctgaaaatgacatcctagaaattctaaagcaaatgcgaagagatgcctccccagggccagatggtctcaatgttgcattttatagagctgcctggaattggataaaagacgatgttactgccatggtaggctccttctatgaaacaggtaagcttcaatcaggtatgaatgctactaatattgttcttgttcctaaaaattctaatcctaagtcccctgctgattttagacccattagcctttgtaatgtttcttataaaatcattgctaagtccttggctaattacattcagaataaacttcctaaccttatttgtgacactcagcaggcttttgtcaaggggagacgcatctctaataatattgtgcttgctcaggaaattgctcactctattaatctcacctcttttaatcaaaaagcttttcttttaaaaatagacttgtctaaagcttttgacaggattgaatggagattcatagcggacgctatttgtcgtaaagggtttcatgctaatttcgttcgtcttgttctttcctgcatcaactccgctaatttttctgttgttataaatggtcaatcgtacgggtacttttcagctcatcgaggtattcgtcaaggttgtcctttatcgccttatctttttgtccttgcgattaatgaactttctgaccagcttgcagatgcaattcaaaggaaccacatttcagtaataaagttaggacaaaatggtccttccattcattctctgatgtttgcagatgatctaatcattgtggggcaggcccaacaagaggaagtcaggaaaacctctgaaataatcaattccttttgtctcagatcaggccagactccaaattggggcaaatcttccatcctgttcagcaaaagtactcctgaagaggtaagacaaaatattcttacaatctttcctgtttctcttatgaactccagcacaaagcatctagggcatcctcttctggtgagtgcaaaagacagaaatgctgcctacagtttcattgtcgacaagtttaaaagcaagcttactacttacaaagctaattctctttctcatgcaggtaggcttgccctcattaaatctgtctttgcttccattcctatttattacatgtccatcatgcttttctcaaaaaaattgattgctaaactaactgctattataaggaaattttggtggacaggaattcaagcagatggtggcaaaaaaggaatggctcttaggtcttggaaagacatttgcaaacctgtttctgagggaggcttgggcataagagatttgatggctgtaaataaaagtatccttgtccaatctgcctggagaattcttactaatccaaatgatcttctatcctctgtcctaaaatcaaaatattttccaaacacttccttttggaaggctagaacagatatgccaaaatctgctttctggtcttctattcttcaggtaagggatgtcttggaggaagcttcagtgtggcaactttctaaaggtgatatttctatttggagccaaccctggtgctctatttggaaaaacattcatgatcatcttaatcttgataatcttccttttcacatgcctgataaggtttctgatctttgggatgagaataagaattgggatgctcagaaaataactcaaatttttgatagtgcagctcaacattcaattatgcaggttcagattatgcagggagaggaggaagataggctttgctggaagtacacaccctcaggagtttgttcagccaagagtgcttacaagacaatttacaatgaaatgtaccccaatcaaaatcaggtcagtaatttaacaaaaaatcttttgaaattaatctggaaacacaggtacatgcctcccagagtcaaaacttttggatggaggctgctgagtaatgctctcccaactgctcaaagaatgcaccacaggatcaaaaccgttagtcccaattgtcagacctgtggtcaaagggaggatgacttgcatctcttctttctctataatttcagtcgtttatgttggttcatctctgactttaatctcaaagctgataatctttcttctctaggctctgttcaagatattattgcctatctttcagctaatggcatcaatatatacaatcttttaattatgctttggcagatttggaaagcaaggaatgatatcaacttcaaaacaaagatttgggagccacaacaagtgtgcaatgctgcgcaggcaatggcaaagacatatgaaagtgttcatcaaatggaagaagacagttgccaagacttcaatcgggctgaagagaataatataagaaattctattgttaaaattcctacaggaacaagagtttatgtggatgcctcttggaaggaagagaaaataggagtagggatcttcatccacaaccctagcaatcacaatgctattgtcatcaaagctcaaagtctcaatgcaggaactcctttgctagcagaagctgaaggattatttttagctatgcaaattgctcgtcatcttcagctgcaagaccctatttttctctcagataacagtgagatagtgaatgttgtgcagaacgaggactacatacaaaaccccggacattggtctctgagaccaattctttcaagaattaaaaattttctgcaggatcaacaagttcgaatcatttggatctctagagagctcaacaaagttgcagatggccttgcaaagtcagcaagacaagctcagactaacagctgcttagcttttgattgctctaatatttctcacatttgttccagagatgtttgtcctactaaaagagctctttccttcactcctaatggagcagttaatgtaactcatgctttgtgtttctaaaacgctttcttttaataaagtgcatgagctctcaaaaaaaaaaaacctcgatcttgattgggtcacgtggcacaacgcatacagtcccgaattcttggcatgataagcgtttcatgcatgtattcacaccccttccgcagctgttcgatgccgtatcaggggtcaaaatggtacgaaaattttccggattccagacctattttcgaaaacagaatctgtcggtcggaaatttttcggaattttttagaaacggaaatgaattcggaaatattttctcggaaacggaatcgaaaatgataagggcagttttcgacggaactcagaatcagttggaaattttctcggaatttctgaaaattttgtgactgcgataccctggattctttttttaagcactgaacagtgaataccatggtttaaaatatgtgttatgcaaatataaagttacataagaatatttttttcctgcattagaatttatcaatagcattactctcttaaatatatataatttattccatactgtgttttgtgatgaactgttaagacttaacaattggacttatatcattgtgttttatgatgaattgttgatcgttgggacttgagaattggatttgttagtttgaggggtttttgtattccgataaattttcgttaccgtattcgcgccggttcgttttcgctccgttttcggtttccgacggaactcggaatcggtcggaaattttctcggaatttctgaaaattttgtgactgcgataccctggattctttttttaagcactgaacagtgaataccatggtttaaaatatgtgttatgcaaatataaagttacataagaatatttttttcctgcattagaatttatcaatagcattactctcttaaacatatataatttattccatagactgtgttttgtgatgaactattaggacttaacaattggacttatatcattgtgttttatggtgaattgttgatcgttgggatttgagaattggatttgttagtttgaggggtttttgtattccgataaattttcgttaccgtattcacgccggttcgttttcgctccgttttcggtttcgataatatttgattccgtttttttatccgtggtttccgatttaaaaaaaagaaaatggaaatgataaaggtggttttcgtccgcctccataccgttttcacccatatgccgtatacatggtgaaaaaaatccagtggacctaaatgtaaattacaagttctaagaggttttttttgttataaaatgcaacgttccatgacatgcagacgcggaagaaagccatttttctttagtgactaacaactctgaatgtgttttttgacaggagcagctaccgctgaagctgaatttatagacggaaaactgactttgaaatgcttgtttgtaccacagagaaaactcaattcatttcatttcacaatattaatggctgagttctagttttgagaggagttcgggacctttcctcttatcacgtaaaaaaagactgatggactaaagtattgattaattaagtattagctaactaaatttaagaaataaatcaattaatttaaatataaaacaaacatattatcaaaatatattaaataataatttaaatgaaactaatttggtgttgaatatgttgctaaatttttcaataaatttgataaactaaaataagttctgatgaagataaatggggcacacaaaacgagatatctattagcgtataattaattaagttttaattattacaaacttgaaaaatagattaatatgatagtttagaataactttcatataaagaaaattcgcacaaaatacaccgtttagcagtttgaaaagcgtgccacaatattctagaatttcatcctctccttccatgagatttgaacgggaccataatatgaaacggatggagtatccaataatttactcccatccgtttcacaacgtaagtcattctagcatttcccacatttatactgatgttaatgaatctagacatatatatttatctagattcattaacatcaatatgaatgtggtaaatgctataatgacttacattgtaaaacggaggaaatatctatttatctattatatactaaaagcctatcaaacttactacaaacgctcctaagcctccacataggattttaaaaacactcctacatcgccatgcatgtggtgctctaataattatagaaattctaagaaacaaaacaccatcgattttcatttacattattttcaaccatcagatatattataaaagtactaattaaatttatctccaaaacctgcatctagattgccgtacgtgcacataagtacattagttggtatttaaaaaacgtacgtacgtacgtacgtatgcacgccgggcgaactgactgttttttcttcttttctttctcacttggacaaaaaatcaaactgcccatattaactatgctttaattacgtgtacaaatatacataattttgagtttctaattaggcgcatgtcgtcgaaacaccaatgaaaaacaaaaataaattaacaatatatattatataatagttaaattagacttgcatttttaaaaataaaaacaactccaattgtaattagcaattttcaaaagttattcactccctacgtaaaaagtaatgatatgtcaaaatgattatcactaaatttatcatgaatctatttatcatgtattatgtgttttctctattcgtataatttttaaaaattaaggatcgtatatattcttttcacaccataccggtgtcctgtatcttctacttaggcttcgtttgatatagctcgatggctgagcttattcaggacacatgaaacggcgtaagtcattagttcaagattaactaaatgatataaagctgaaaatagattaatttgatttattttaaactttatataaaatatatttttaataatacgcatgttgcatttaaatatatacgatgttgattatgattgtcaatttaattatgctgaatagaatgattcagatggattatatttagatattattattaaaagatatttcttttgtaataattcctagatcaatgggtagatcactggggtatgtgcttacaacgaacaaggagcagccaatcgaatactactttagaactaattgcttatttacttaatcgtttaatttgtagtatataatagtctttgtcaaaaaaaggcctaatatatcaatcgtatgttaccactaatccaaaagtatataagttctatccacaatttgtcaagtcatactgcttactcggcattcatgcacagtgcacctaataattagctgacatccaatgagcacttatatcatcaagcaccgaagataacatactatactaagtaaggaactattaacaaatggtaggtaagtagagcatgtcacctaaccacaacaaacaatagtcgtctacaagcagattgccggtatcaataatacatttctacacttctaccagcactcttaagatgcatgtcacataatagatcgaatgaatcagaaaaaatctgagaaaaaaatacatggccatctatttacacttaaaccgatagatccactatcttcaaccattagattagatatattctagctaaaaaccaaacaatagtcatgccatcccaccaaactttttgaaaataattttttttactaatgatgtaaaacaaaatcgtagacactcatataaacgtgtgcacaaccacctacgaatatacacactactattagccaaaaaatacatgcgcataaaaattatcacatggaaacatattatatccatttataattatgtcattttcatctaaactaggaagatagcccgcgcatatgcgcgggcatgtgcgtaaaattttattacgaatgtccatgtgtagatggttttctatccaaaatattattttacattatcataaactaaaattgaacttatttaacatgctttgaacgttggttacttgcaacatataaattgtgaactaaaattacatcaaaccgtgttgtttttaattcatgagaaaattttgtaacgaaacaattgatgtgtttcctatgaatgtccaattcttttgttagattttatttgaaattttaaatattttcattttttggtcctgctaaaatgtttgaatatttctatctagaatgggttataaacccaacaaaaagaattttaaaattagataaattttgtttaattttcatttcattttatcttcattttttttggacaaatccactatatgaagcatctttgaaatgctttgatctcaatataagtgggttgatcctacaacttggcatggtgtaaaggcatccataattctaaattatctcgctccaattatgtaaaaaaaattaatatagaggccatagtattttcttagcaaattaccgctaaactggagcgtcaggtaagaatcacacgtttgtagattgttccatgctatatgtcacaaattcacgatgtactgcagcaagttttaccaaaaagtaaatggatacggtctttaaattcctatatggaattgggttatatattgctgaggcgacatcaggttgtttcactcttaagattccttggtgcaaccaacatgcttagtacgatcagtatgttgttcaactggccacatgacttcatagatcatatatataatttagacgctacgatcatcttaagattatttatttatctcctaaaatgatcatttattgataaaagcatcaatatcaaaacgtatgggtaaatagcttttgtatacacgctgagaaaaaaataactaagttgatagaaagtcgttagatgtctaatgggatataagtaatgggtctaccagttttataaaaaaatcgactgggatattttgatttttagtgagaaattttagtattttattttatttagggtaaaatttgctagggacatctaaaaaatatgtacttaaccggggacaccgtaagaacgcgtatcagttatgggacactgaaaaaactttataaaatccaaaggaaatggacagagaaacaataacgaaagtatgattttgccccttgcctaccaagttcagctcgcaaacacctccgacactgcaaccgcacccgccgccagtgagatggctgtctagtggggggagggggtttcgagaagggcccatgcgcctgggcccgtggctccatgtcgttcttgcactcgtcgccgctgcagtgcaagggccatgttggtgtcaatgctccgccacacaccgcgcttggggttagcacaacgtggaccacctcctgattcatgtcgagcagggcgccgcaaagcacaagctattgctgtcagtctcgcagccgcaccacgccacgatgccataccctccacctcccatgtcgtgactaccacgacgtctgagctatatgcgagccacacttggcaggaagggggcaaaatcatactttcgcaattgtttctctccccctttccattggatataacaaagtaatgctgcgggtatctaacagctaattaccagttttttgcagtgtcccatagcagatatacgttactgcagtatctcttagctaattacactttttttttatatcttgtagtaaattttacctttagtaagtagaggctacaatatggatgtgggtccataatgtaattttttgttagcacttaaatacaatcaatatgggcattaagttattgttttcacttaaaataataataactggctagacctaatagatggagattcgcttgtggtcttttctttgcccataaaaataattttaattatcatagagatagaaaaacagagaaaagtaaggccgcacaccacacgggaacggggatggagggagggttgggatgtttcttttttttagaaaaaaattgattgatctgatgacctaaaatataatgtgttgaattttaagtcaaaactgatggttggatgttatttttttctcagatttattagttcttttctaatttaactttgacaagtggcagcttagcaaaacgcgtatagggatgtagaggaagggaatatggtttgggatgttttttattagaaaatatatcaataatgatgtaaaataatgtgttcatatttaagtggaagccaatggatggatgtttctataatttaagaatgtcatacaacgatttagaaatatttataagaggtttaatagactttaacgcctatttatgagattattttccataaagataattttaattttaattatgatagggataaaaaacagaaaggaacagggagcctacaaattgatacgtgcgtggtacacggatatggggacatgggaggttttggtattctaagatagatctaacgaagtccaccgatttaaatgaatatcgatggttagatttctctattttattaggatgccatgtgacggtttggaagtgtttgtaggaaatttaatagattttatttagaatttaatagattttatttagaatataatagatagatagatagtactacgtacatatggatttttgctttattttatacggtagaaaattatattttatattttttcttccgatgatacgttgtactaattttttttttgcctttatctcattttgacactggcaatttttttattccggcgaatcgaacggaagcttttcttttttttctgaatcatacgtactggtattttttgttttgtcgacggtacgtattctcacttttatacagggaaggtattatatacacacacctaatgattattctaaagtaatgggcccaccaatttaaatggaaatcaacgatacatatagatctaatctaatggtataaaatagcgggtccaccaattaaatgaaaatcgacggtgagattagatagtgccacgtgacggcataggagcgtttataggagtcccacgtggctacttgagagcgtttgtaggaagtttaatggacttttagtatataatagataatagatagatagatagataggaaaaaaatcaaatatttatatattgctaaaaatggaaataatcggggattaggggtgagtaataaaaaaaaatttcttggcaaacgacataccggtcaacagcaatacatctatgctaatttcaccaatctcaagatatgccattttttagagatactcataggaattaatgcattgtgtgtgaacgtgtttacaggggtgagtatatacgtaaatacgttttgtgagcatctggcttgtttataaaagacaaaatttttaatgtactacctaccttttggccacacaccaacaggcaacagctgacggctgaggagtgagtcataataaacaatataataggaatcttgttgtgtagtcatcgttgtgtacttgtaccattggttgatccctaaaatattccatccaatgtacctttactatcacaattgcgagcagaatttaattacgatcaggttactttcctgctcgacattcgtttccgagtctctcctaataattatttgccatcagtggacgtctacaggatttttcccagtatggagaaattactcgtcattgccctcaaaattagagaatttttacagtacaatgtactactagtatataattattcttttgggtttttttttaccatatggttttccagttacaaatatttgcatcatattcatcttaatttgtagagagattcatatatatctcaaacaagcactccctctatctacaaatataaggataattcgtcgagaatatttcaccatccattttcttatctcaatcaatcacaattgtcacttctttgaattccctaagcatgtttccaaaatccgatgggtactgcactaattactgcatatcaatctccactgcatgggtgacaactgtactataattctttaatataactaaccatgtaatccctctaacctcttaaaaaacaatatgcctccatactataatttgttacatctggtattagattagttttttatgagacgggggagtatacgtgaagtttaaggtaaggttgaaccttttttaaaaaacttaaacacatagacatacacatagaggaatcgaggtcatcgatgcatccccaagataggtgtagcagttagaagctacaactccatctgtatcagaatatatttgttttaggattttttttagcaaaaactgaggtagagaaaatatattctcttttagttattttagtgatcaaattttgaatttcttagatttatatcgaaatatatatccccactgttggctgaataatatattgatttccacgcattagaactagtaaaaaaaacttggtacaaaatttcgaatcctctaaatacttatatttggaatgagataaatataatgtgtactccctccatccataaaataactatattttagtcttgggtatttaaaatgagatagaagaaaaaaaagactaaaatgcctcctgatcaataaaataaatattatatattgatgggtggataggtaaggaaacggcaaaggtagtgaacaaatgaaacttattaacttattattttgtaaaccgagcacaggtaagggatataaaagtaaactcgttttgaaaatgggcagtatctaaagttattttgggatcgacggagttacctactaataaaatgcttaatccttctctctctctcatgattggtgcacatgcacgctacaacattttttcacaatctgtgtggatagctgttgttgaaacaatggaacagatccaaactatttgaatctgtgtactctaggagatggatgatctggtgaatgaataatgtcatgaacaaaaatgggtccatttttccgtcatatatattcggtgcaccctcttcttatcatatctcacattttactttctccggtacacatcggtcgggacattctatagatctgacaaatataatgcaaacacgaggcaaagtatagattctggaggaccatagtggtaagagcatcggttctaagatgatcatgagtttctgaaataaaacaagcaagtctgtcgaaaagtaaatgtaaaaggcatatatatatgcttaattaaaaagcaagtcttctattttgtctccaagcaaaagtcctaaccctagcaggaacggctgtggctttgtttttccagatgttattcaacaaagagtgttacttttttttttaagaataacacagtacaacacagacactcacaacgcacgcacactcacccaccaaatcccacccccaaaaattgacgccggcatgccgcatcctgcatgttactgaatttacatctgaccaagattggtgttctctcttcatgatttctttataagattgttgaattgcttgtacctgtaggagtataaatccggcatatatagtctgtcttccctgtcatcatgcattatttctacctccaacatttgttaatttgtgatgcttatggttgacgaagttgaataagatagctagctagtatgctacacacactcacggcgtttttgagaatttaaattcctaacacgagaattttagcatcggtcacacaatctccaactaaaggaaaagaagattcagagaacatatcttatgtcagtggaatggagaatctgaatttgcctataattttttagataatgaaaattgattgcattcccagcctctgccttatagcacagagccaatataattttatactaaataaaaatgacataatatgatgggacaaattgctaactacccaaagaaagactagctaaaaggtttcaaatgaccacgcagattataacaagtaagcttctatacagtacaccaaccataataaagtaagagatgcttagctaccaactctaagatgggaatatatcctatgcacaaaagccttaccgtgtatacaccatgcatactaacgaaaatatttctccaaaaattttggaaaaaaattatacatgtatttttaatagtattacatctaatctcatcttcatattctttatatgtagagagcaacaaaaaagataaaattctgatagatttgtactctcaaaactgtcagaatttttatcttttttgttacggctaaaatataataaatttgaggttaagactttacacatactgtaatagtataagaagtacttgtacattttttttccagattttttgataaaatttgttagttgatgtgcatggtgtgtatacaagacttgtatgcacagatatgttcctcttcaagacatagcatatagtagtattttggtccactattatgacatagtggaccagcagtgtgaagccactttgaagagataactagcatgggttagacaactttctattattgaaaaaattatatcattttagcaatgccaaattgtccgatgtggttatcggcactccatgatttgtacagtgcattttcgctagcacattggcactagtagttgtaggaaaaaaaaacccttagggtaccaaactctaaacaacaggtgccagtagagccaatcacattgttttcctaccaggacatattcttagacacccactcaatggagaatgacaaaaaatatatccgtgaaaactcatataccatgctcatctctacacgtcatgtaaggtatcttaactaattaaaaaattagtagttttccgttcgtcacaaatctttttcatctgtctcctcgtgatcgtgcacgcaatatgagtctttcgcccgtcactgctaagttacagccagcccaatccacacaattcatccctgttcatgctagggtgtttttcagcccagtccacgcgagcaaatatgcccgaacaaaaagaaaacaaaaataaaagaacagcaaatgaaaatcgcaggccgccagctcagcgcgagtcctcctcctgcaatccagtggcttttaatgtgctatcctgtagatcccacttaaattaatgatttgatatttggcaatcttgtttgtgcaatagatatatcttgcctgatcttgatttatggcaaagtatttctttgatctgtttctggaggcctagggttcgttcgggtgttatagattttgggactttctaggtattttcttgtggtgtttgctatgtgcctatattcttagatcttggactgattgtggattggggctatgctctaaccttagaaccttacttgtcctcccctaacgcacttcaccagtcccactccccggacagtaagattcctgctgatttgcaagggccactcgccaatgaggcataagcgccactgttgctcgtgcagcagtcatgttgttccaacttccaagtcactgtgtcagcagtcctactgattaacactccttaaaatgggtttcgattatttgagatcatggcccactttcattcacttaggtggtcccacatgtcatcctcataaatgttaattaaagcaattaggcaacaaaacaatgttaaattatcaaatttttaataagatggacatcatcatcatcatggattcgtgaagtcagaatccatgggggcagcggaagtgatctgaaaccgttcttgacatgccgcgcagcaaagcggataaatgatgacgtggggatggtctagtttgatcgtcatggaagagaaggatggtgttgtccttgctgctgtcttctttcaacctagccggtcagtttctgactgaagtaatgcaagaatatgttacatatatacaaagctcacaacagagctcttgcattagaacaaaagaattgctggaaaaagatgatgcagttatacacgtatgtggtgataatttggaggaaaatcatttgatagctggatgatcacctgggattctaaactgcatgtaaaagcatgacaaaaagattggatcttttgtgattggttttagttaagaagtcataatctttgagaagttgcagaggaggtaccaatgcaaggttgttgcgattggagaggttgaagtagcatgtaatgctgtaaaataaggatcagcatcagtttactcatatatcaacttcggcgttgatggcagcatcggcagcaacatttgaagtagcagcatcttttatatcggttgtggcactgttgatgtcaatcccgatatcagcatcgagctcttctaagtcaacggagacaatggagtgcctggcagcttgcttttgcttttgcttctgcaactcaggtgcactaatatcttctttcttttgcgctttggttgggggccttggagcaaagatgaaggaggaagagggccaactcccaagtttggattggccgatgcaggagcgtattcgatgcggcacccactttagctgatgatgggaggatcgacgtaaacaacctacaagatgatgaggcatgaaagtgttagtgaataaatattttgaaaatagggaagagtgcatataatggatacctttctgttggtcttgacaaaatcaggatcaagaatgcagcaataagtggttccaatcaggttaaacatatgttgcttccattcacaccaccatcgggaccagagctttgaactagatgtgtgggtatagaaatcctcacaatcgcctagtgaaggtctctcgatcaacatgaaacgatcgaattctatggcattggctactgggcccctcgcctggattttgtcaatgaagtagaggccaatcgggtgctaagcgaagcgaagttgataagtagaaactagtggacggtaaaactcatacgagacatgggagttacaacccgtggagaccccggttggaagaaggcaatgggtgatggttgatatgaagatatcccttctttattaatcaaattgggtttaaaactggcagggaattcaaaattatcgccatccttataggcataccaaattttagcagtcttagcgaagccatagtaaaaggctttgaactaatagctatgatcgacaggcaataatttgcctcttgggtagcacgatgcgacttcgccataaggcatgcatcagctgcgagtaggagctacaccttcagcatgatccaatgggatggttagtgtattaagagtaggccttcctaccacttttgttaaatatgtgatccgaattttgggcccacaatatattcggattagtttgctagtaggattagtttcctagtaggagttcctattaggtttcctattaggtgtctttctattatcccctatatatactcttgtaaaccgtacgggaaggggtgacgttcccattgttattcctctacgtttgtaattatctcctctatagtgatcattgccggtcggcgcccgtggttttttcccacaagggtttccacgtaaaaattcgtgtctccgttgtgcatctattttcataacaagtggtatcagagcattggggatcaatctactagttcccagccaccggcgtgtttatcggatcgaagaaatcgatctcgggcggcaccgtcgtctcgtgattccaatccgaagcaaagttgccgtcgactcggagtcgacgtcgtccttcctgccgccgacgcgtcagaggagcagcgcaggcgcagcagaagcatcggcagccagcagccctaatacagaagcgcacggttcaagaaaaaaaaatcagccgagagagatcggttgtttcgttctgtgcatgctaatttttccagtggaaaattgctacagccaccaaagcttgtgtaccaggaagtttcagatctacgctacgtgcacacgagaagtgtaccaagtttcgcgattttgctaggtttacatcaatttcttactagcaaattcagtattaattcccatggtaagtttgaagtatgatctaccgctcctagaccgagacacaagattctcactttggcaagtgaagatgcgagccgttcttgcacagcaagacctcgatgatgcgctttctggatttgacaagaggacacaggattggtccaacgatgagaagaaaagggatcgtaaggctatgtcatatattcatcttcatctatctaacaatattttgcaatctgaccagtaagatgcacctgaagcaaaagttatttttgcacaagttgcaagatgatgggtctgtgatggatcatctctccgctttcaaggaaattgttgctgaccttgagtctatggaggtaaagtatgatgaagaggatttaggccttattttattgtgttcattgcctagctcatatgcaaacttcagggatactattctttatagccgtgatactctaactttgaaagaaatttatgatactttgcatgccaaagaaaagatgaagaagatggtaccctctgaaggttcaaattcacaagcagaaggcttggttgttcggggcaggcaacaggcaacaggagaagaacacaaacagcaaatcaagagataaaagttcaagtagctaccatgggagatcaaagtctagaggcaggtataagtcatgcaaatactgcaagagagatggatatgatatctctaagtgttggaagctacaggataaagacaagagaaccggaaaatatgtaccaaaaggtaagaaagaagaggaaggtaaagccgcagttgttactgatgagaagtctgatgcaaaattgcttgttgcttatgctggttgtgcacaaactagtgaccagtggattcttgatactgcatgcacctatcacatgtgctcgaatagggattggtttgccacctatgaagctgtgcaaggtggtactgttttgatgggtgatgatacaccatgcgaggttgcaggtattggaacagttcagatcaagatgtttgatggctgtatcagaacattgtcagatgtgcggcatattccaaatttgaagagaagtctcatctttatgtactcttgatcgcaaagggtacaaatattctggtggagacggaattttgaaggtaactaaaggctctcttgttgtgatgaaagctgatattaaatctgccaacctgtaccatctgcgaggtacaactatattaggtaatgttgcagcagtttctgattcattatctaattccgatgctactaatctttggcatatgcgtcttgggcatatgagtgaaattggtttggcagaattgagcaagcgaggattgctagatggacaaagcatcaagaagctcaaattttgtgagcattgcatctttggcaagcataagagggtgaagttcaacacatctacacatactactgaaggtattcttgattatgtgcattctgatttatgggggcctgctcgtaagacatcttttggaggtgctcgttacatgatgactatcgttgatgattattcgcgaaaagtttggccttatttcttgaagcacaaatatcaagcttttgatgtgtttaaagagtggaaaactatggttgaaagacaaactgaaaggaaggtgaaaatccttcgtactgacaatgggatggatttctgttctaagatatttaaatcatattgcaagtctgaaggcattgtgcgtcactacaccgttcctcacacacctcaacaaaacggcgtagcagagcgtatgaacaggacaattatatcaaaggcccgttgtatgttgtctaatgcaggtttgcctaaacagttttgggcggaagccgtttccactgcttgttatcttatcaatcgatcacccagttatgccattgataagaagactccaattaaggtatggtctggttccccagcaaattattcagacttaagagtatttggttgtattgcttatgctcatgttgataatagtaaattggagcctagagctattaagtgtatttttcttggttatccgtctggtgtgaaaggctataagttatggtgtcctgaaaccaaaaaggttgtgattagtagaaacgttgtctttcatgaatcagttatgttacatgacaaaccttctactaatgttcctgttgagagtcaggagaaagcaagtgtgcaggtggagcacttgattagttcagggcatgcaccagaaaaagaaaatgttgctattaacctagatgcacctgttattgaagattcagattcttctattgttcagcagtctccaaaacattctattgcaaaagataagcccaaaagaaatattaaacctcctcgaagatatattgaagaagcgaacatagttgcttatgctttgagtgtggcagaagaaattgaaggtaatgtcgaaccttctacatattctgatgctattgtttctgatgattgcaatagatggataactgctatgcatgatgagatggagtcgcttgaaaagaatcatacttgggaattggtgaaattgccaaaggagaagaaacctatccgttgcaagtggatcttcaaaagaaaggaaggtatgtctccaagtgatgaggcaagatacaaagcaaggttagttgctaaaggttatagctagataccaggtattgattttaatgatgtcttttcccctgttgtgaagcatagttcaattcgcactttactcagtattgttgcaatgtatgattatgaactagagcaaatggatgttaagactgcatttttacatggggagttagaagaggacatttatatggagcaacctgaaggttttgttgttcctggaaaagagaacctagtctgtaggttgaagaaatctctttatgggttgaagcagtcacctagacagtggtataagagatttgactctttcatgctttctcagaagtttagaagatcaaactatgatagctgtgtttatctcaaagttgttgatggttcagctatatatttgcttctttatgtcaatgatatgttgattgctgcaaaagacaaattagagatagcaaagttgaaggcacaattgagtagtgaatttgagatgaaggatttgggtgcagcgaagaaaattctcggtatggaaattactagagaaagacgttctggcaagttatatcttagtcagaaaggttatattgaaaaagttcttcgtcgtttcaatatgcatgatgcaaaaccagtgagtactcctttagctgcacatttcatattatcttcagatttatgtccacagtcagattatgatattgagtacatgtctagagttccttattcaagtgcagttggttcacttatgtatgccatggtatgttctcgtcctgacttatcacatgcactgagtgttgtcagtagatacatggctaatcctggcaaagagcataggaaagctgttcaaaggattttcagatacctacgtggtacatctagtgcttgtttgcagtttgggagatctagagatggacttgttggttatgtggattcagattttgctggagatttggataggagaagatcactcacaggttatgttttcactattggaggatgtgctgttagttggaaggcaagtttgcaagcaactgttgccttatctactactaaagcagagtatatggctatttctgaagcttgtaaagaagctatttggcttagaggtttgtacactgagctttgtggagttacgtcttgcattaatatattttgtgatagtcaaagtgcaatatgccttacaaaggatcagatgttccatgagagaacaaagtacattgatgtgagatatcactttattcgaggtgtgattgctgaaggtgatgtcaaggtatgcaagataagtactcatgaaaacccagctgatatgatgacaaagccagttcctgctactaagtttgagctttg

SEQ ID NO: 7637 - DNA, 35256 bp, Oryza sativa
cgccgggccggatgtcacgccgcgcatgtcgccggcgcaggcggcgccggcgcggcatcctcggagaaaagccgagaagaggtccttcttatcaaaggcacgtaactttagttagttgattgattattatctaatttaataattcatttgcaactttagttaattaattatttaattctgtaattcatttgcttcttcgagttcatttttttttaaaaaaaattgcatgctttgtgaattgcaggtgtacaggtgcatgttcccaagggtgagggagtgatgcagaagctggatttgtattattaatccgaccttaattaattactgtaaaactcccaatcgtatacgtatttccgacaggaaatgtactgtgtaattaattaatttgttcgttcttgttctttattacagtcccctggcacaaatcaaatcacaatatgatgagattggcacatgtaacttacctgcctattcttgtgcggaaattgtaaattttgattttagacatccggaaaattttgcgtgtggtcccctttgcaatcttatcctctcgctcaaaccagatcattttgaaagtgaaacggtgaatctgaccaaacttcttatgcaattttgtgaacttttatcaccagcatcgaattgttttctgttgcagagactcgaaagattgttctcctgtacggccacattttggcccatgggcctcttcaaattctgagaaaatcaccagaccctgaatctaagcccatggttacctcgtggtcttgaccgatggaataattctattttgactcccttattacatccacggtccatcaacttggtagatgggtgcaatttagtacaataacttaaaaaataagtgctctagtgcaacaactttgacaggtatatgcaatttagtatgagaactttataagtgatcgtataaatgcaataacttgcaaggtaggtacgattttgatacaataagttaaaaggttaggtgacaacttaattatttggagcattttttatataaattcaatttttaagtactaattttgacaatatactagcacagatttgtataagtatatttattttttatcctaataactaataactgaaatccaattaaactagatgtagaaattattgtttttggttgatattttagaaggggaagaaaaccaaaaaaaaatcttaaaggtaattggatgtaaattgtactactatgtgtagtataattcttaaagattaaattcaatattataaggtaatatccgtatgattactatgtaatggcatattgacatcgtgaaaaaaaactcaccttgcacatgcttagccaagttgatacaccaaaatactaaattattaagttcttatattagaacgcactcacttattaagttgttgcactcggatgttcaattctcaagttcttgtactatatcgcacccacctgccaagttgttgtaccgtgggtgtaatttactctaatctcttgctctcgaatcaccttccttaaccacaaaaccgggtataacgtcttcacaacttttaaaaccagtgcaaatctactccttcgatggtttgggaagcggtttctactgacatggaaacttgactgtgtttgtcagcatgtgggtcccagaaaccaaaccataacttaatgcggtaaaaaatgcaatacaaatttgattcttcccattgatttgagatctaggggtttctgaccatgatgatgtgccgccatatatttatcgatttttttctctcgtcaagaatccagtacaaatcctacgcattacagataatctgatggatggatcagaggacgccttgctggtagcagacgtcgagcgtgtgctgcgccatgatccggttcaccttctccgtggggtggaaggcgtcccagaagaggtacttgctggcgtcgtcgcacgtcaatggcgactcgtcgttgcacatgaaccccatctcgaacctccccgtcgcgcagcacccctcctccacgttctccagccctacctccccaaaacattacaacatacttgggtcagtggccgagccacctaagcaaaactcactataatttttcgtgttcttatgagaatagaatgtgccttcctctcgtaattaacagtagatatcatattttctaatgtaaaatttggtacatttagctagtactagttaaaattttcagagtaaaatctagatacctcgaggtagtttttcaaataccataatttttctcgtatcgtggtgtgctaactaaaatttatttcgatacaatctactactggtgtaaagcaaatgaaacaatatatgctttatccaatgcgaaatacaatttactactccctctgtttcttattgtaagtcattttgacttttgttaaagtcaaactgcttcaatttttactaaattcatagacaaatataataatatttacaatatcaaattacttttattaaatcaataattgaatatattttcataataaatttatcttgagttaaaaatgttacttcctcgcatattacttttgtcactaagaccaaagagaaattaaattatcttggatattacaaaattaaggaatgaatgcaaacatgcaaccaatgagtgtttagatgactcattgggttataatcaaacatttaatttatctcttcatttaagtattgaatgcataaagtttacaaataggaaaaactcaaatgtgaaatatgtctaatttttgtggatggatggagtactattttgactttgaaactgacttataataaaggaggtgactcaccgtacttttccgggtgggtgatgaggtcgagcatgttgtcatagacggggatgaaggcgaccttgagtcgcgggagctcggcgcggagcgacctcaccatggcctccaccttgccgttgtactcgcgcgccacccggttgtactcctcgacgcagccgccgccgccgccgccgaggagcgcgccggcggtgcgctccagcggcaggcaccccatcggcgagagccccgcgaacgtgacgcgccgcgcgccgaggcggtggatcgcggcgaggaacgcgcgcgccgcggcgacgaggtagtcctcgtactcccccacgctgtaccgcgcgaaccgccccgtggcgagcatgtagtagttctccaggaagtcgttggtgccgatgctcacgacgtggagcgcgccgcgcacgacgtcgcgcgccgccgcggcgcccgcgtgcgcgcgcagccgccgctggtactcccggtagtactccacctccttccacagcgggatcactgactaatcggaacacgcgcgcgtcaattaatttcgcacttttgtgtagatcgatcgccatgaattcgatcgatcgaggtgagctctgattatgaacatgcatttggcagatgagatttggagcaggtgagatttggagaagagagtgtgaatgcgtcacatgcatctgcatggatgcaggagtacttctcgttgtaattagtagtagcatacgattttggttgggaccgggacaaccgaaacaaaagcaatgctgctggattctctgggtcaaaacttaagtactggttttattgcaagaatcagtcattggtaatatagttttcacctagttaattactattactatattttaactttatatgtaggagtcattgaatcaatcaacacaactagagtgttgtaaaacagtaagagtattgatccaacaacagtaagatcttgtttattttgagacaacatcaatcaacactgagattagtgctgtaaccctatatagtatacttgtcggaaaccatctagaaatgtactactccagtgagcagctctacacagcaggagacaatctcagagaaatattcctacttggattaatgatgatttaataataaattcagaactgcatacatgccctaccatgattaggcaatcaaatcaagacagttcttctctagaagacgcaatcggatgaatccagctagcctacttaatgccggcacaagtggttgcagaaaaacgaagaacaaagcagggaaacacatgcccattatgtgcgttcttcagacaagccatcgaaagataactgaatactgaaaacgtacagccatttttctttttcattgttacaggtgatgacagtggtgtgcatgcaacagtgcccgggaaagagagatttgggtcccaatgcatttaagttttaacaacgagacctaacgtcgaacgaactgccttaaattgcagacattttcagacgactccagcaaagtacaattattcagaaacggcaagtctgaatttttcttagattgcaagttgcaatgataatgctgcgattgattctttggaaaagccataacttgcaattcacaatgctgttgcatttgattctttggaaaggattttcacaacttgcatgcataatgttgtatttggttctttgaagcagtgcataatgttgtactactatttgattcttagaaatacttgcgagttgcaatgcacagtgtgtattgctacctccgtttgtcgttttgatttttatctaacccaatcatcttctttagctttggtcaaatttattgaaaaatatagtaatacttttaacatttaaactatcaaatatatccaatcttaaatttaataaaactagtttaatgctataaatattgtcaatttttctataaaattgatcaaactttaaagaagtttgacttaatttaaaaaagtcaaaatgacttgcaatatatgaaacggacggaggaaggtcagcacgcatttgattctttagaagaatttcatatagaatttgatgggcgtgtgaattttgcaagtattttgctgaggattgttgatagtgatgatggtggtgtagctttgctttaattattaccaggacgccggcggtggcgttgtcgaggccggtgccggcggaggcgaagcagacgccgcgggcgaagtcggcgatgccgtaggccgggtcgaggtacgccgggacgagcggcggcaggccgagggactccgacatgaagtccggcgcgaggcggccgttgccgaacctccccgtcgcgcgcgcgccgccgggcatgtcgcgcccgtacggcgggaagtcgctccgcagcggcgtcccgatctggttgttgttccccgtgtccaccgtcgagtccccgaacacgatcaccgccgtcacccgcgccgccttcgccttcgccgccgacgccgcgccgcggctcgccgccgcgacgacgaggaggaggaggaggagcagccgtaccagcggcgacgccattgcagctagctactacgtacgtgtgtgacgcgtcgcgcggtgtaagcagtgaagtgagtgacactgagagtgagtacgtgcgtgtttgttgtggaaataaatagatcaggcgcgaggtgagctgtggtcgccgttcagtgggagacactgtatcaactcttctacagtgcaatatgaattccagcgtaatgtgagcgtagctttactggacaggcttgttatggttgatttacacacttacagctaattaattaaaaaaaaactgattttttgaatgacttagagagagataaaaagtaatgtgtaatagtaggaccttttcgtgcattctaaattgttctattttcttccaacgaaagaatcacatttttgggtttttgatgttaaggagatgggcattttggccacctaaatagtggtaaaaaaataaaaaaaatagcagcataaattaatatgaaatatcattgttcaaatatgtaagatccaattaaaaaaacaaacttaactaaaaatgtttagcatattgcattaatatgtctactatttgatcattgtcatcatcgtgttcaatgggtatacttgttgaatagtagttcacagcacgcagaatcttgcttgtgcgctaaaaacaaacaagatttgaagggagagacatccctctaaatatttttttaagaagaaatcatgaacatattaaaaattgaacatgagactttagggttgaaatcacaccccttatcactgaactatcaagtacatctcctataaacacatggttgcgttcataggaagacgtggagggtggtgttcatcttggcgtcggcgatggcgcggtggaggcgttccgtggggtggatggcgtcccagaacgcgaacttgctcgcgtcggtgcacgtcagcgggctccgcgcgccggcgccgcacatgtaccccatctcgaacacccccgtcacgccgcagcacccggccttcacgttctccaccccgtacgccgccgggtcggcgagcaccgcggccaccgccccgtacacgtcgccgtacacgatcctcgcgccgccgccgagctcgccgttgagccgcgcgatcatgtcctggaggccggcgttgaagcgcccggcgacggcgttgtactcctcggtgcacgcgccgccggtggcgcgctccagcgggaggcagcccatgggcgggaggccgttgaggtcgaccttgcgtgcgccgagcgcgtgcagctcgcggacgaacgcctcggcgacgccgaggaggtagtcgccgtacgccgccgccgtcgagtactccgccgcgtggccgcgcgccacggcgtagtagttctcgaggaagtcgttggtgcccatgctgacgatgtacagcgcctccgacagcgtcgccgccgccgccgccgccgccgcgtcgtcgtctccccggaagctccggagcctcgccgcgtactccttgaagtagtccagctccttccacagcggcagcaccgactgcaccatggatatcagccaagaacaccatgaaagtggagctaagctagcaatccttttaggcttacgaaaagatcggaggtggcattgtcgtagccggcgccggcggaggcgaagcaggcgccggcgccgaggctgctcatgttgacggccgggtcgaggtaggccgggacgagcggcggcagcccgaacgcctcggagatgaagtcgacggcgaggcggccattggagaacctgccggtgggccggccatttccgcctccgctgacgccggcgccggcgagctggaggtcgcggccgtagggagcgaagtcgctcctgacgagcgtggagaggtagttgttgttgcccgtgtcgaccgtggagtcgccgaacacgatgatcgccgcgaccttgctcttgccggccgccgccgccggctcgccggagaggaggaggaggaggacggacagctgcaagagggcgaccgccaccacaagatcacgcggcgaacgcatcggatcgatcgttgagcgagctcgctggtggcgtgcaggttttcttggctcgccatgagtcgcttttggagaggtcggcgagctaccggagaccggccggggaagagaggtgaagcaagcttaatttaccgggttcaggccaactactgatggagactgcattggaagctttccattccatttgctcttcgtcgtatcgttcaggattacattaattaggacggttttttggaaagtaatttgactaatttcacgagaattccggaggaatttgacagcaaaatgatcaaaaggaagccgccaagcagagtactactaatgaacagaacatttttctttttttttttgaaaatttaaaattaaccatgtagcttttcatttagaatgtataaataaacattttagccatgccacaagctcgagacccgcatccaaatccttgtaaaataaaaaaatcacttaaaaactatattttaaaaaaataaatttgtaacatatcatattaatccaaatgcttgcaaaattaaaaatcactttgaaaaccatataaaaaaattaaaattttgagcatttcatcttaaaatcatattttaaaaagttcaaaaatatcaaaataatttgaacataaatcttattaataataacaaacggtctgaaacctgaaagtaatccaaggataaggagaaaggtaaacaggccgaaacaaacgcgaggcccatatacatcgaaggaccctatataccagcttagccatcctctcgaagcttccaactccggcgaaacccaaaaccctactccctcgtcctcctcgtcgacggcggcggcgatgctcccgcagagccagagcagctcgctgcagcggctcaaccacgtcgagcaggtaatcaatccatttctcccctcgagatttcccctccctttggttgttccctggaccgtcttcttgtggggggtttcactggatcttgatcttgatgcggcgagggggggatttgcgcgtgcagatgatagtccgggcggtgaatctggccgggacggtcatggaggagctggggaacgccactgggccccgcaccgagggcgtcgctggccactgccgcgagttcatgctcgccatgaaggtacatctcaatctcctcgccctaagatctgaaatgcttacctttgatcttgcctgcttggatgtttggtgatcttttgcacctacagattgtttccactggtaatttattggggccccaaaataactcttgtattacaccagaatttgtttcccttctaaacccttgtttgggtatgttatggatgctagaatcaggttacagtatgaacaaggagctaattgaatactttttcctcaacaaacattgaacatttcataaggttttgtatgtgtggaataattattagaactaccagaatgaacctgactttgtttcaagatttttgtgatgatcattctggaatttgttctgtacagaaaaacagatcttggtgaattgtttagagaaaaaaatatcaagtcttgcctccaattcatccaattactattgttaccgagaaaataaaatttacacaacatctaccgagaagttacaagagccacctaaatcatcaaaattacacaactttcctgataaaaaaatcagcatgttttcctgaaaaaaatacagcttgatgagcaattgaactcagaacagtaacatctacccagaaattacaagaaccaccaaaaaatagaaacatatttccttccaccgaatctgagcaaccaagtgaccaacacaacaatattcaccacgatgagatgtctcctgcaagaagtcgaaagttgaacagatcgttggatccaagaacataggtgaacagagcgaacatgtgaaaccgattgggtggcacaatctggtgccgactagatatccccctcccatattgaagccaagatgaggccgatgggatctggggagcaaggttgtcgctgtgggcgatggtgacggcggatccaagtggattgaaaccttggatgacggtggtgatgtggagacgtagggattcaagcatcaacgtaagggagcaccatcggaacagggaagatggagtggcggcagggcggaggtgtggatttacgaggcacatcgttcctaccttttgtttcatgaatttacgaggtgatgctcgacagggcaatacgttcaacaggaatcaacttaaatctgatttaccaggaggagaattacagacatttcacagccttttaaaaaagaggagaataatagtcatttcacagatttttggtcccagcagcttcaaaaacaaaaacaaaaaagtgtagtgccatgcaacaatcacaactgagccttagttgttaagggtgccaccataccagtgaacctttctctgggtccatccaagctctttctactcttcaccaaaatacaagtcaaatgtgtgaaatgacaattgtattgctgtacatgttcctgctcttctctttcactaactttacatttaagacacaatgtgcattgtaaatcatacatggcagactcatttgttattatgtctggagcaggaaattcaaacgacattgcgtgaggaaatcaaaagtgcttgcgaatatcgcccatttgagaagtgtgactacagtgcaaggattgctaatgagatttgttgcaaaaaggtggaatatgtacttgagaagctggatgctatgcaaaagaacattgaggaatgttctactactagttaattgataactagttatctacctacctactggtgagtgctgatgcatcaggcgacttccccattcgaattcctcattctccatctttgctgtagatgcatcatgtgttccattgttttgacagtaccagccctcaagaaatggtagtactgttgctgtatgtgtcatttatttgatgcatcagaacattatatggttatttcataccggtccaagtttgaactgtgctccatttaggttctaagtttgttatagtattggcaccattgtaattgcaactggcaaatcgttttaagaacattagttacttgcaaaggcagcttttacagttttaaactctagatctacacgacttgcgatagtgtatgctgtattgttggctatatcccttcttttgaactcccagcattgatccatatgttatgctccatatggataaactatttttgagtgtcttgatgttagatactcttccgtataagatgttttgacttttttcctaatcaaacttttttaagtttgactaagtttatagaaaaatatagcaatatttctaacacagaacaaacatactatcaaaatatattcgatttttatatttaatgaaactagtttggtgttgtagatgttcctaatttttttaatgaacttggtcaaacttaaagaagtttggctaggaaaaaaaatcgaagtgtcttataatatgaaacggagggagtactatttagaaggacaacagtcaccaaactagactatttttttaagtagaaacctaataaactattttttaaaactatgtgactgtgtagtgttataatctttgtcatttcatctacatggagatcaaccttgttatatgccccaggttgaatagagtttttttttcctcatcatatttctactagtagtattctttgtatgtactcgtatccttcaagaattgagaggtgtgtaatgtaagtttacacagctatctgtgtttctttcaggtttacagtggcacaagtgtgactgagcggtttacaaaggaacatgagtgtcggtgtagccagcttgcaaatgcacaaggcatcattgaactatgaaatgtaatttaccttcggtttacagtgctttggtttaggtggttgcacagtgataaactgcaagtaaccacttcagtcttgcagaagtttacagggcagaatctgaaatgaatgcttgctagtactcgtatgaaatgaaaggaatggttgcacatgcttgcttgctattgctagtagtacacatgagtatttgttaagatctggcatcgaatctgaatctcgtattaaagcagttcttgttgcgtgcttcgtctgtagaataaggctacgctatttatgtgtgatttgctaaactttgggcgtttattttataaaaagttattttggttggatgcatgatactacctattcatattaaaagttgttttgattttttttctaattaaatttatttaagtttgatgaaatttataaaaaaaaaattagtaatcatctacaacaccaaattagtttttttttacaactaacatttaatatattttggtagtatgtttgatttgtattcaaaatgttgctatatttttctataagtttggtcaaacttaaaataagttgattatgaaaaaagttaagtgatttataacataaagcgtaggtagtaatttgtttttgtagatttgtcgtgaaagtctttccataacattttgtggcatttttttgtgaccgcaagactcgcctctctcggtgtttctacaagcaccgtactgcagcatttacccgccgcaaataatgtatagtaatttactctcatcactgtttctttttttaaaaaagagaagcatggagacggttccgaacctttcacataaatttgtttttcttaatagaaatttggcagtacatataatataatataatataataatatagcttaaaaatcgtaaaaaggaagacaaaaagctttagtatatatcgagagaaagaaaaaaaatcacaacctgaaatgttaaaaaagaaaaaaaaatcacaacctgaaatgttaaaacagcatttacgaaaaccgtaattctggattatagaaaagaaaaagaaagagagaagaaaaatgtattaaatttattcaaagtattcccctccaaaattcacaaataaatttcctaaattataaattagagaggataagtcgccaatcctctctcttttgccttcactatccatccctcctccgcttcttcctcctcagcctctcatccaatttttccattcccagaaatcgagcgaggaagctaagctaaaccaatcgaaggccacggccatggctgccgctccagccaccacgtcactgctgagcgcgctgctgcagcttcccctggccccgttctccgggaggaggtcgccgccgccgccgtcggtggtccacgtggcgcccccgcgctcgccgacggcggcggtcgcggcgaccaaggggtacaatgtgcagatcgtggtggacgagaacgagggggaggagtccatcttccggcggttccggcgggaggtgatgagggccggcgtgctccaggagatcaagcgccgccgccgctacgagagcaagaaggacgagcgcaagcgcaaggcccgcgaggccggccgccgcaaccgccgcaggtgaaaacacctcacctccccccctttgtttgatgcatcgatattgtctatgaaatgatgtaatcctttttgtgaattgtgaattcttgaaatcgatataacctgcagataaaactgtgcttgcatagtttgcatcagctgttgatggtaggagtttctgttgataatttggttgttcagttcagagtttcagactgttcagagtcggtgtttgcaggaaaagaaaaattagcaagatagattgtgctagcactgaatcactgaaacaggagtaaaaacatctaaatggtggtagcactgatgcagaattgttgctttggttcatttcattacttccttaggatttttttaatgataacatgttgattgggtttgtccaagctttgtgtaattctatcccttagggaacacaagctgagcaaatccgatgatcttcagctttcagactgcatttgcatagctgaatacgtcattgtaatgtgaaaaaacttcaaggtcatggaatgtcttttgttaacctgacctgtgtttgtcgaaaatgttgtgcaggcgtatgatggaggagcctaggttcccagaagacgatgctgattcagaggccgcgaggagggctcgtgacgatgaaaaggataactgggagattgacggaattctgtgagtgaaacaatggagttcatagccattcagatgcaaagtttccatgttttgagttattgtttttttggtccgcaaagcacaaactatatgagttgtcggccttaatttcctcttcaattgtacggtttgaatgtactaaatcttagctaatgcagcatccttttttttttttacctctgtaccttttccagtttgtttgcaatacattttgcaaatatgagcctataattataaaagagtaaatattatacaatgttatcctatagttgagtaaaaatggagaattcataatcctacatgaccatttttcatcctgttacccagtgttaaacctgcccaaattatgcacattaaaaacatagaagttttatgccttaaaaattttcaccaaaaggagcaggaaacatgtgtatatgccttaaaataactcagccagaagatcaaaacaaactattcccacccccacaatttatgtttttgcagccaaaaaagatatccactctggaagaacaaaacatcatccaacagtacaagagtacaacaccagctgaccgtccagcttacaagcaaatgaagcaactattctttttttctttttcgcaaatcgcatgtaaacatgtctacatgtccttccaaaagtcacctggaatcaaaatgtatataaatccagccctctcaagaaagagaagcttaatgaggcaacaactgaatagatccttggacatttcagttgtacaattctcggtaaaatgcaggtaactgaaacgggatctgactccaatatttgatatcaaaccgaacagagttcatgccattgtcaacaaacaagccttccacgatcttggccaggggttcatcatcctccatgcatatgatctcaacaatcttaagatgctcacatgtaaacgatctttctgtaagctcatcaccaatgatatgttcatatggatgcggataatactgcatcagataaaaaagaacttgtaagttgtatcccgaaaagacgtactcgtgaggaaatggtttaaaataaataggatcagcatacatttgaagaaaatcatttaccttttcgagtttcagagtaagcttttccagttttggtgagctctgaaggaaaataatcaacacgtagaagtctgaatctagacaccattgtccgagagtcaggtcgacaagattgataaatttcgggcataactgaggattgttttttattgtcatctgcacgattcaaatgattattagaccatgtagaagagcatgctatagatacaaacacatgtgaaagatagaggagaggagagagaagaaaaagattttttttagaaataatacctttttaatagagaattgcaaaatagaggttaacagactaaaattacaagtttagcgcccatcaaacaagcaaagttcaacagggtatatatcgacaggggataaaaaaaagtaaataaaaaagagaacaaccactgtacgccactgtgtgcatgtaggacctatcgaacatcagagttcaataggccccctgccaatgccctttcatgtactttttattttttttagtggaccaacaaccttgcccaactgcggttgttcgacagggtattaaacttgagattgtagccgaacagcttctattttttaatttttcattaaaataatatattttcaaaacaaattcgaagaaaaatgggctacagattggactctaaaatattatatgtgtagaggtgggtcaaataataatggtgcatcatgtatttatataaaactattgtataggtaggctattaaagttgttatagatgatgtgccaatttttaaaggtagtagttgactatactattattaaacttgctcttagaaggtcacaatacacctataccaaattatatacaaaacttcctcaaagtcaggtagctcattgtgttcgttagtatatgttgggaactaacccttcaaacaagcaaaatggagcggtagattagtgcatgattaattaagtatcaactaaaaactttaaaaatggattgatatgattttttttctaaaggaacttccctaagaactttttacaaaaattgtaccgtttaatagattaggaagcatgcacatgaaaaacgagacctagaaactggaacacccatatatgcaaacttatcgccttttctagtctctatgaaagtaagataactaaatactactgagatatttaattatttgccactcttaaatgtggcatttaataattttccactgaatccacatgtcacagattatgagtagcaaattattaaataccacgtcttaaaagtggtaaatagttaaatgtcccactacactgtggatcaacaattgctgaagtaatccatcaggtggttgtgggagtgcatgttttaacaatagttgaagcattttccagaactaaaatttaaaatatacattattgttcataattttacatatatatatatatatatatatatatatatatatatatacatatttttaaaatatttgtggaactatacattctccatgggttcgggccacgctaccgcaccgtcgacgtagctcgaaggcatgaaactgatggaggggcggtccaacggattggtcacgttggaccgacatggtccaacggattggtcgcacgggaccatatgcttcagtgccggccactgcgatggcgcacgcgtgtgttggctccacgccacctcccctcccatcgttcccacgtgcctctaccacacggggaatgtatatttctttaaatatttttaaaacatatatatgtatatacacaaaattacaacaaaataatatatatttaaagatttcattcgcattttccatctctacgtcaccttttttatttctcacttatatacgctagtaacggcaacataattaaaagaaaaagaatcaccgagaagtcagagacaggttgcattttctattacaactgttaagtaccaagctaaacaagagggaatatgtaagatcaataagcattaccttacacgcatagtaatcgaggtccaaatttctaacaccagaaaggctccagagcaactggcgcatgtcataagcacaaaattcgatgagaggaaacaggtcaactgttgccgtcaccagcgacgcgacgtcgtccagtacgggcacgaagttctcaggctgatgcatgatcagagatgtcagattcggcgcagaaatgcagctctcctgcagagttgggaactgacatccatacatggtgagaacattcagggtctcagatgagatctcatcatctccaatgatgcagtcgtacaagaggagatcctgcagcagtgggcagccaatctccagctgctcgaagaagccttggtccaagaacacattcttgagagtgattctacccaagtagcatgatgtgaacaccgtgtgatcgaggtgcaattcgtgcgcatccacgatgatcttgaggaaactagcttgattctgcaacgcgtggctgatccacctgttggcgtccgccgagtcgttatcgcggttgtttgggttggaaatggtgtatctgaggttgaaggtgtggatgacggcggcggggtcgcggcgctcgagcagccggttgacgaacctcttgaacgccgcctcgttgtctggtgtgaaggcggcgatcggggacatgctgagctcgcagtagttggcgttgatgcggggcacggagcgccagaggtcgcgccaccgccacgacagcacgcacgtctgaatgacctggcgcacgttcaggaaggacatgatgtggtggaggataccctcggggagggcgctgagaaagtctgggccagcggttgcggtggcgttccgcccgcgcttgccgcgcgggaaaccgccattcatggcggtcgatgatgacgcataggcgtttcgtcgaacaggtggtgcgctgcagaaatgggaaagaataagaattagtaagagaaagtcatgattcctagcaagccatagttcgactaggaggactcgagaattgagatagcatgacaatatcaaagatagttgggatttgtttattcactgcttgcctattttattctctaccgtaatttttggacggttgagatcgctttgaggttcgtgaaatgtaaaaccctaagcaccttgccctcctcccaactagatccaccccctagcacatgcgccgccaccacttgcctcaccggcgcaatgtgcttctgccgtcggccttccccttctatcgtcaccaccaatatcttgatgtctcatcttcctcaagtccggttagtttcctccaccccgcctcaactaccaagtctccagtgcctcgcacctttcaatatataccagtcacatctgtccctgcctcctaaccactccgacaggtagccccatcgtcagggtaggtccaccaccctcctcctctaccacagctgaggcgaggtgacatcgtggccttgctaccccaaccaccgcgtagcttccacatcccaaaatttccctctaggtcccaaagccagtgagttttctttgatctccttcttttccctacccgtaccttgatttctaatcaagccacctcgccagaggaggtgttgccagagattgaagacgccttcgactgagattttccaagatcttagctaatcgattagtaaaaatgaaattcaaagagggaagaagcaacaagatgaagagcatacctcgtgcgatccatgcgtgaatctcacgtcaagcgttgagtccccagccctcaagtatctgttttaaagaggaaattacaagaaccttgatcctcctccaatttgaggacctggtttcatgatctgaacgcgtctgacacgaatctcaaagcaatcacccggtatcttaccctcaatctttctttactcttatctataattgccaaggaaatatgataagtctggcatgatgataagcccccctcgcatcagagaagggtggtttgtcctgatggcgaaattggcattttaaggctgatattatgttatactaataatggtatatgtgtaacacatttttgcgtatcgtaccacattccatatataatgagatggctaagtaaaaaaaaatcaagaagtaaataaaatactactttatgcttgacatttgactattcgtgttaggaaaaaaaactgttttgttgtgacttgttttatcaataaaataagtttatgtgtcattattttttatatttacactaaatttttaataagatggataatgaaatataatgtaatatttaaaaatggatcagggagtaataataatttcctctgtaaccttttataaaagtaaactttgtgacttcttcgatagagcgactaaagtgcaaattagcaagaaataaagaagtgcttgcttacgacattgtgacaccggcttttgcaagaatatattactcccttcaatcctaatttgatcttcgccttagattttttagtctttccaaattgatcaacatctaatcagtgcctattcatttatttataccggagtaaatggcatagtggtatgtatattcgtttatgtgtgtaggaggaagaacattcacattgtagaatatcctatgtgtattaagatggggtccacctaatatgcataaggcaatagagagatttgtgaaatgtatagggcacatgcctataatgggatccacacccatgggtattaaggtggatctatgctatgctatgctttttttttttttttttaatttgaggtacctgatatcaagggaagagctcatttgctatgcttggtgtttgagtcatgtgtttgcaatgtatagatgctttgttacagtgaaaagattctcttcatacccccttatatttcccctaaatggcatcactgtgtctgttcgtttatctgtgcaagagtaaatggtattgttgtttgcccacatacatgcctcacacgacacattgatcaatgagagctagttttgcggaagaaacacattgatcaatgagctaatttaaggaagaaggttttttttgccttggtctcggcgctatttgcaaatatgatgatcaaattaagataagggagtagtatttttgtaacaccctgaaaattcgaccaacaaaaatcaaagttccaaaaaaatatggaccttcaaaaactttttaaataaattgcatcatgccgattttgtttgattattttatttgatttcgacttcggggtttataaaacgcgaagaatgaataattaattaggaatgaaccaagcaaataattgaaattcaatttaaataaagatttggtgaggatagaaatgagtaaaatattaccgcgaccatatttatatccctcagatttaaaagcgatggaataagaaataactctagttaaattcaagtaaattacaataataataataataaaatatggaataaattaatctcgaatggatccatgggttggaatggcacaaatattgaatatattttatttatgcaaaaactgggaattaaagaatcaaatctaaataataaatgggccaaaatcgggttaatagaaaagggtcactattcatcggccgccaggtgttcgacgaggttccctagcctaaccctgccccattgccgcgccgacaccgccccgagccccgtgccgccgctgccggccgtcgccatcacgctgccccgcgcgcctgctgcccgagccccgtgccgcgccgcctgtcgccatcgccgtcgccgcgctgccatcccatcgccgtcgccgcgcggccgtcgtgtcgccgcgcccgtgctccacgcctcgcgccgcgcaccgccgctaccgccgtcgccgtcggccgtcgccgtcgccgctcgcccgtcacgtcgccctctcgcgccccgcgccccgccgcgccgtacgcccgtcgtgtcgccgtctcgcgccccgcgccccgccgcgccgcacgccgtctcgtcgccgcctcgcgccccgccgcgccgtgtcgtcgtcacatcgccacgtcgagccccgcgccgcgccaccccgctgacgccatgaggccgccgcccctctcccctcttccccttatctctcccccctcccctatataagccccactgctcccactcttccccttcatcctcacctcctctcctctacccactccaccacgccgccgcctccacgacgccgcgccgccgcctccacgccgccgcgccgtcgcatagagccgccgcgccgccgccacgaagccgccgctccgcgccgcaccttgcgccgacgtcgccaccgtcgccgtcgccgccgtcggtaagccgcgccccccttgcgtccatcgttgtcgccgcccgggagggcaagaagccgagagagagagggaggaatgagccgggagggagaggagagagagaaaaagaaggagaggagagagagaaaaagaaagagaggagagaaaaaaaaagaaagagaaagaaaataaataggcgtttgagtaaaatttagaagtttagaaaattcaaaatagttaagaatttaatcgtaggttgattatagtcgtaaaattgcgaaagttaattataggattaataaaaatatagttagatgaattcttactaattaaatacctaaagtactagcatttaaatataagattaatgaaaatataattggatgaattcctatagattatttttagtaatctccctaagaaatcaatttcgcggtaataatttacatgtgattaagaactcaataattcgatgagtcttaggacatgactataaattacaaaatatcttagggagaagaataattccacttcgcgaataaagtagcctatatagaattcacctcccgcgctcgtttttcaattcggtcattatttggattttgtttgaattctaatcgaattcaaattgttcttacgcacgtaactatagagaccgagggagccgcggatccgggtgaaggccaagacccacaagacctagagcaaggcaagtcatcactattctttgatcacgttgatcccaattgcgaaatcaatttttgtttacaaataagattgcatgcaatgatgaacatcctacttgtgattatgccatgccttgattattgtttacccttaaatctttgtaaccatgattacgtatgagtccctagtcaattatgacacttgcttagaaatgctactttagaatcttgcatactcatgtttatcaaatattatatgcttgggcaattacctttgggaagttaattgagatgcggcatgtggagacatgagcaccacattgccatgataatgatgacatgaaaggaattaaaaatatttgttttagaccggggcggacggtggatttgggtggtatccgggaaaggctagtaccgtccccggtcaattaaggaccgagccatgaagttaagcatgaaacgaccccgtacaaccacatttctcgaatggggatagacctagcagagtaaatagccgagcggaggcattatccatgcatagtggtttctcatgtgtaaggcaggggctctataatggtgtcgccattgctaggactgccgtgtgtggagttgaacctagttataacttaattacatgggtgtaaaactttccttcccgggtgcgccagaactcctctcactgctagaaactgtgtacgcctagggtgcatgaggatgaaaagttcatggagcgggtactgccaatgcgaggttatcgaaaagctttgccgtgacgcgtctcatgtgttgagacaaggctcatgtgttgggcagtcgcggagtgtgggtaaagtgtacatccactgcagggtgagtaaaccaaatctattcgaatagccgtgctcgcggttattgagcaccgggacatgtattacacttggctagtctctaaattcttaacttgtgtgggatgggttgttgcatgacgaatttttatgctgttggagccacttcctgagaagggggaaggtgggcgtactcagaaaaccataacgactcaatggcgggaagctatccttgggatcacaatggatggtggaaagaaccgtcgttgtttaaatacaaacactggtactaaaatttgatcagtcaatgctaggtcttaggtttgtgaaaagaattacaaaacttgctttgcgcaaaagagccatagccatcctttgaaatacccctttcatatgcattgttgctgtggtggcttgctgagtacggttggtactcacccttgcaaatataaaattaatcagaagcgggagatgaagcttcggaggatccctatgcctactaccaggagggagatgaagacgatggcgctcagtaggtcttagtacggtcgttgcctgtggcaatggcatgccgctgcctaaactccgctgccttatctatttctgcttttggatgtattccggaccgctcggtccgatgatttaagacaatgcctgcgggcttatgatgtaataattagcactagactctcttgtatgtgcttttggtatttcagctatgaactcgtgtgtaccagactacttgatccagggaaatggtactgtttacacgaataattcctgttatgaaaacggggatccacaattttggtgatagatattttaataccaccattatcattgtacaattgtctatcataatctaattagtactccctccgtttcaggttacaagtccgtttcaggttacaagattgacggagcgtggggctcctcaccgggagaccgcgcgggcccccctttgccggttcggccaggggcgctgggtgaggttctaagcccttgatctgtggaatggttcgcgagagagcaaatgcgcaagacacgggcgatgtagataggttcgggccgctgagaagcgtaataccctactcctgtgttctggtggatctgtgtatgaaggagttacaaagagctggagagcaagagagttcaaactctagagaccctctccctactctttttccccagtcccctctacgagctcaggtcttctccagtctttttttccgtcccctctcttggtaggcatggtcctccttttatctctcaaggggataccacatacaccatttctacctacccttcttttgggtggggacccatcctactttgaccaaaacttggctcgtacttttgcctgacaccgggataaccctgtcctccctcattaatgggcggagatttgcaatggctgttgtccgaatgaccctccgatgggatgggtcataccaacctccactccgccggaagcaggtgcaacgtggaagcacggttgtttgccgatgacgcgaccggcgtcagaccagtcacagaccggtcattcttgtccaccacgtgtcagtttagcatgctacacgtctgcccttcttcatacaatgacttccttacaatggttgcgatgaagcctggaatgtatctggccggggctgacgtgccaactccaggagttcccacgccggcttcggctagggacgagtgcctggaggctctcatcattccgacgggacggggcgaggcgtgtgtcaggccgcctgttgccccctaacccgcgatctgaccggtctgtgaccggtcacacactgcgaccgatcacggaccggatgagtgtgctgcgctacattaaatgcggcgtggggcgctcgtccaacccgcaataaacgcggttaggtgagcgccgctgtgctcacctaacccacacacgtggcgccaaaccctcagggggtcggggcgccccagccctcggggacgaaacgggagcggcccgacccctcggggagatagagggaggggcggcctcatcaccctcgggcccaacccccccaagggggtcaggccacgtgggtgaccgcggctgccccaaacctctagtcaagatatccccggtcccatgtcaccgacagtagcccccggcgttatgccagggcgatcgccctcctcgaggaaaacgctcgggtgtgacgccactcctcaggcctggtgacaggtggggccggtctctacaggcggacaggaatccagtggtcgcaaatcgcgcgcatcggcaagggaaaaaccgaccgacaataatgagcggctttcttcaagaccgttacattacttgagtagcgcgcgaattgggacgagccggttcgtttcgcctggagatgtgatgatggtgcatcggtcggcgagcgtagttaacgcgcgcacgatatgtcccatctcgactgccacggccgcacatccgccttgtgcgccgcaaacgggcgagcgggattagtggaggagtgggcgcgagaaacgagggggcgagatagtgggcgcgggaagcgaggagccgggcatagcgtttggcaagggtataaagacgccgaggaagagattcgtttccttcctctcgccattattccccttgccttcgccgcttgcgctctaacttctcgtttcctgtgccctaccctcgccgcactcactcgctctcaaacccctcctccgccggcgttatggcacggggctccgcaccgctcgacggtagcgtgctgccgccttctcgcatcgtgagcgagaggcaggccgggctgccgcgccgatttatgccggaatctgccaccggccgggaggtggtagagctgggcgagggacgcccggcgccacactacccggggcggtccgtcttcttccttcccttcgcaatggcagggctggtcccgccattctcttctttcttcatggatgttttggagctttatgatctccagatggcgcacctcacccccaacgcagtaatgacgttggccatcttcgcgcacctgtgtgagatgttcatcggggtgcgcccatctctccggttgttccggtggttcttcaccgtacagccggtgtcgccaccgtcggtagtcggtggctgctatttccagccgcgggggccggtgttgaaccgctacattccctgcgtccttcgcaagaagtgggatgagtggaagagcgactggttctacacccctctcgccgacgaaacgcgcctccgacttccgagccagcccccggcgcaggcctccagctggcgggcgccggtagatctgggagacggctacgacgctgttcttgaccgcctggctggtttgcgatcccaggggctcacgggggccatggtgttcggcgactaccttcgtcgccggatcgcgccgctccagcggcacgcccggggcgcctgggagtacaccgggcccgaggacatcatgaggacccaccaggggcgcaaatgggactgggaccctgaggacttcaggatagtggtccaacgggtgctgaatctcagctccgtggaggcatccctcatccctcaaggggtccttcccctctgctgcgatccagagcgcgccaacatcctgaccatcatgcaggaggtcggggcgtcgggggagcgggccccccgaggccacgatggcgcgggcgggagccgcaggggggaacaatctaccccgggagggggtcgtgcttctgggccccgtgacgggggcccggggggcagccgccctaccgacgcccgggggaagaggaaacaggaggataccccctccccatctcctccccgagggggcggggcggtgcgtgccagcagcaggcgcctggagggtgctgtgccgacgtcgcagcccgagggggagcgaaaaaagaagcgactccgcaagatgggggggaccgaaccatgccggggaaacctcatctcccccccaaggtggtcgtttagccgacctcctcgcaggttcgtccctgcgcccactgcggccgtattcattctcctatctcccaaggcaagttttcactcacccgtttttcgtcttctggtttttcttctgcatcagcgagatcccgtcgcgcccttcccgccattccaagttcagccggtctgaggccgaggagacggcgaccgcggaggcccggaggcgggaagctgaccggcgagaagccgcaaaccgtctccgggaagccgaggaagctgcccaggaggttgtccgggctcgccaggctgaggaaaccgcttgggaggaggccagactccaccgggccgaggagtccgtccgggagacagaggcggcgcgcgcacgccgggcgggctgccaagcccccgatccgactccgcccgaggcgacgacgacttccgaagccacccacgacgaggccgcgggcgcaccgctcgggcccgacccctcgggcgacgctcaggacgagccagcttcgggggacgtccctgagtccggcacgtcgatcggcgggccgagcagtgcggcatccttaccgaggcggctcttccccatgccttccgctgcaccactgagcgcagagccccttctgcaggccttggccaccgcgaacaccacggtgttggacgggttaagtgcccagatggagatcctgcaggcagagcgggcggagctcgacgcggcgtgggcgcgtgtcgaagaggggcgacgctcggtggaggccatggtggaggcgggccgcaaggcacaccgccggcacgcctcagagctcgaggcccgtcgtagggacctggcggagatcgccagggaggtggaggaggagcgggagactgccctcattgccaccgccgtgtttaacgcgacgcgggacgacctctgcctccaatacgggagccggggggcggagctagagaagaagctcgacgcgtcccggcagcgcgaagaggcccttgaggctcgcgccacggtgctggaggagcgcgcctgcgccctggacacgaaggagagggaactggcgggtcgcgaggccgccgtcgccatccgggaggcaacgctggcggcgcacgaggccgcctgcgccgaagaggagtccgcactccgcctccgcgaggacgcgctcactgagcgggagcgagctctcgaggaggccgaggccgcggcgcagcggctggcggacagcctgtccctccgcgaggcagcgcgggaggagcaggcgcgccgtaatctggaaggcgcccgcgccgagagggccgcactggatcagcgggccgctgagctcgaggcgcgggcgacggcgatctagccgcccgcctcgcagctgccgaacacaccatcgccgatctgcagggcgcgctggactcgtccgccggggaggtcgaggccctccgcttggcgggcgaggtagggcccggcatgcttcgggacgccgtctcccgtctagaccgcgccgggcggcaagcgggcctctggggcgagcggaccgcgaagtacgccgccaaccaggggggcctcgcccagcgcctctcagagatggccgggactctccagcggctccccgaggagctcgaggagacgatcaagtcatcctcgagagacctcgcccggggggcagtggagcttgttctggcaagctaccaggccagggacccggacttctccccgtgggcagcgctggacgagttccctcccggaaccgaggacgacgcgcgcgcgcaggtccgggacgccgccgaccacatcgtccactgcttcgagggtacggcccctcggctcgcgttcgtcctcgactccgacgaggagggcggcgacggtggtatggacgacagcgacgacgaggccggcgacccgggagcctcgaagtgagcccccaggcccccgccaatcttaaatagtttttcctttcttcttccgaggccttcgggcccccttcttgtataaactaattcaatctgcaatcaaataaagaggaaatttttgtgtcagctctgtttgttgtgtgtatgagacgaggatggtttgtgccgcggtccttctgtgtcttggcttgaacgagggctcgtgcccaggtcccagcctcaaatggcgcgggtcggggctagtgcctggggagatccgcgtgtcgagactggccaagccgggaacgtggtgaccgagggttatggattacccgattgtgggcctttgccgattcccccccccagagttcaccacgccccggggcacggctcggttctgggccccgtttggcgattttagccggcccgggccaccgagggcaggatcgagcacgagcgtgctaattcaagccaagattcttcgaaaggaaacaatgacacagacacagtccttaggaaatcgaaaatgcttttattgaaatacggaagagaaaaaatataagcttatgcatgtggtagcccccggccaaccctgcacacccgggggggtgcggggttggcccgagcccgagacctgacacccgacccctactaggggtagaagcgacgaaggtgttcgatgttccacgggttaggcagctctgtgccgtcgcccgtggccagccgaacggagcccggccgggggacgccgatcactcgatacggaccctcccacattggtgagagcttgctcagtccagcacgcgtttggacgcggcgtaggacgaggtcgtcgacgcagagtgatcgggcccggacgtggcgctgatggtagcgccgcaggttctgctggtagcgcgcggctcggagggccgcgcgccgccttcgctcttcaaagtagtcgaggtcatctctgcgaagctgatcttgatcagcctcacagtacatggtggcccgaggggacctcagggtgagctcggatgggagaaccgcctccgcgccgtagacgaggaagaaaggcgtttccccggttgctcggcttggcgtggttcggttcgcccagagtaccgctggcaactcctcgatccacgagtcgccgtgcttcttgaggatattgaaggttttggttttgaggcccttgaggatttccgcgttggcgcgctccacttggccattgcttctggggtgggcgggggaggcgaagcagagcttgatgcccatgtcttcgcagtagtcaccgaagagttcactagtgaactgggtgccgttatccgtaatgatacggttaggcaccccaaaccgagcagtaatgcccctgatgaatttaagtgcggagtgcttatcgatcttgatgaccggataagcctcgggccacttagtgaacttgtcgatagcgacatacagatactcgaacccgcccggggcccgtctaaacggacccaggatatcgagcccctagacagcaaacggccatgaaagaggtatggtctgcagggcctgggccggctgatgggtttgcttggcgtggaactggcacgccctgcaccgccggaccaggtcgaccgcatcgttgagagccgtcggccaatagaaaccctggcgaaaggccttgccaaccaaggtgcgtgaggcagagtgggctccgcactcgccttcatggatatcggcaagaagctcgacgccttgttcccgaggaatgcacttcaggaggactccgttagtcgcgcgccgatagagggtcccttccaccagcacgtagcgcttggagatgcgctggacgcgttcactcccttcgcggtcctcgggtagagtcttatctgcgaggtacgcctggatctcagcgatccaagcaatcaatctaagggagctgtgagcgcttacctcgggtcccgaggcctggactccgacgggcctcgggggccgttcaggcgcgtccgtctcccctagggggtcgggtcgcgccgatggctgggcaagcctttcttcaaaggcgcccggtggggtctgggctcgcgaggaagtgagccttgagagttcgtcggcgaccgcgttatcccgtctgggcacgtgccgaagctctatcccgtcaaaatggcgctccatacgccgcacctggcgcacgtaagcatccatctgcgggtcagagcactggtactccttggagacctggttaacgaccaactgagagtcgcctaacaccaggaggcggcggatccccagtccagtcgccactctgagtcccgcaaggagtccctcgtactctgccatattgttggttgcccgaaagtcgaggcggaccaggtatttgaggacatctccgctcggcgaggtcaacgtgacccccgcaccggcgccatgaagagacagggagccgtcgaactgcatcacccaataggcggtgtgaggcagctgcgaggggcccgagctggcctcggggacggagatgggctcaggggccggggtccactctgccacaaagtcggcgagggcctggctcttgactgcgtggcgtggttcaaagtgcaaatcgaactcagagagttcgattgcccatttcaccacccgtccagtaccctctcggttatgcaagatttggccgagggggtaagacgtaaccaccgtgacccgatgcgcctgaaaataatggcgcaacttcctcgaagccatcagaatagcgtaaagcatcttctgggcctgagggtatcgggtcttagcgtcccggagggcctcgctaacgaagtagacgggccgctgcacctttcggtggggccgatcttcttcactaggggccgcatctccagggcgctcttcgtccgagaggccgcgcggggcgcactcggcttctgtgccgacgacctcggggtcggagggcgacaggcgcggccttcccgcagtggccccggggccatcctgggggtcgggggcgcctggcaccgtcggacaagcgggcggagggccagctccggccgtcgggggccttaggccaccgttcggctcgggggcctctcctccctgctctctcccgggtcgagtcgacacagggtggggatgcgcggagcgagggtcgtcctcgtcgcgctccacgaccaacgccgtgctgaccacctgcggggttgccgccaggtagagtagcaacggctcatctggctccggggcgaccaggactgggggaaaactgaggtacgccttcacctgagtgagggcccgttcagcctccttcgtccagataaacggcacggagcgtttgaggagcttaaataggggtagcgccttctctcccagcctcgatatgaaccgacttagggcggccatacaaccaatgacgcattgcacatccctaagcttgctgggggggcgcatccgctctatagctcgtatcttctcggggttggcctcaatgcctcgggcagagaccaagaacccgagaagcttgcccgcaggcacgccgaacacgcacttgtcggggttcagctttatgcgggcggtgcggagactttcgaaagtttccgctagatccgagagtaaggtctcctggttgcgtgttttcacaaccaagtcatcaacataggcctcaacattacgtcctatttggctaaccaaagaaattcgagtagtacgttgaaaagtaggacctgcattctttaacccgaaaggcattgtcgtataacaataagttcctatgggggtaatgaatgcagttttttccttatcctccctagccatgcgaatctgatgataaccagagtatgcatctagaaaacacaaaaggtcgcaccccgcggtggagtcgacaatctgatctatgcgtggtagggggtaagggtccttaggacatgccttgttaaggtcggtgtagtcgatgcacatccgaagcttgccgttcgccttgggaacgatgaccgggttcgccagccactccggatggatgacctctcggatgaatccggcctccagaagtcgcgccacctcctcgcggatgaaggcttgacgttccggggcctgccgccgcactttctgccggaccggccttgcgccaggccgtacggcgagacggtgctcaatcacctccctggggaccccgggcatgtccgccggtctccaggcgaagacgtcggcgtttgcccgcaggaaggagacgagcgtgtcttcctatttgtcgtccagaagaccaccgattcgtgtggtcttggacgggccgtcgcccagggcaacctgcttgatcgggacctcgtcgcacgtgatcatccgctgcctcggggcggctgggacggaggtgctgagcctctcgtcgccacccgcgggcttggatgccgcggcgaggtggtccgcgtgctgctccatgcaagcaagcgcgactttgaggtcgccatggacggtgatggggccaccggggcccagcatcttcatctggagataggcgtagtggaccgccaccatgaacttcaccaacgcgggcctccccaggaccgcgttgtagggcagactgaggtccgccacatcgaagttcacccgctccgtgcggaagttggcggaaccgccgaaggtgaccgggaggtcgatatgacctagcggccaagtgtgccccggcgtcacaccgatgatcggctgggacggccggagcaccatccccggggccttgatggcatcaaaggctacgggggaaaggatgttgagggctgcacccccatctatgaggacacgccccaacttcacgttgcaaacggtgcgggaaaccaccatcgcgatctgtcctccccgggcaacgcacggcgggtggtcggtctggtcgaaggtgagggcaacctccgaccaccgcgcccgccgcatcgcctcatgggtaggggccgcggccagaagctctcgcttcatggccttgaggctccgacgagaagcgtgagcgcatgctcccccatcgacggtggcgatggtggccccaggctcctggaaccctaggtcatcgtcgccatcgtcaatatcctcggcgggggccttctgcttggcctcacttcgccggttgccggagggagccgccggggccttgctctcacggcgctcctgcctcctctcctcctcccacttccttgtccgctcagccaaacttttgaccgcacggcagtccgcgaggtcgtggagggaggtgttgtgcacggtgcaccacttgccggtcgggcgctccctactgggagcgccggcctccttctttttgtcgctcgcaggcctcccctttcgggtggcccgcgaagcgccctcgacggcgaggacgtgaccctcgtcgtcggaatgggccgatctcttcttcctcctcctgtcccgtcgccctgaccgagcagcgggcccgggggcggccggagcttccacaccggaaccggaggagttccaggtccatgcctcctccttgcgagccacacggtccgcgagctgaaaaagctccgcagtggtctggggctccttggaggcgatcttctcgagcatgcggttgtgtcgcacgccccccctgaacgcgtagatcaccgcgtgtgcagggatgcacggtatggtgttgcggacttgacaaaaccgctgaatgtacgagcgaagagactcatcgtcccctcgctgtaccgcgtgtaagtccgcttctttacctgggcgcggatatgtgccctggaagttcatggtgaactgctggcacaaatcctcgcaagagtggaccgacgcgggtggcaagttcattagccaaccccgcgcctgtcctttcagggctatggggaagaaattcgccatgaccctgtcgtcacccccggcggcctcgatcccagtcgtgtagatctggagaaactcggcggggttgacgcttccgtcgtatttttcggtgatggtgggccggaaccttgggggccaacggacgttccgaaggctcgccacaaaggctcgacagccggcaccgccaaccggggacacggggggctggcccccgcgcccggaccgaagtggcgctccggacgaggaagcgccctccgatgcgtgggcagcacggcgatcattgcgccggcgctcgatattgaggcgggcatccggcccctcacgcacatcttcttgggtcggaggcattgacaagggaatggcggacgaacggtgggtaacggccgccgctcgccgcgccctccgcctcgacgacacggagccggcagtagcagcgctagtggccttggtggcggaggaccgcccgccggcgcctaggcgctgctgcgccgtcatgaccaagttggccacatcatctagccaacgtcgggttggagtctctggatcagggacgacgggcgggtgacgtaggagcgcgcccgcagcctggagcgcgccctggggcgtgctgccatcgccgtagacgaggaggcgacgctccccgtctcgccgtccttctccatcgctcgtgggcggcgaagtcgcggatctttcgtccccctcgagcgcctcctcccgcctaagacttcggcgagaggggggcggtggagtacgagctcgacgacgcgggttctgctcgctgtcgtcaccgctagcgctcggagagaggttgtgcgccactgcccgttcggccattgggctgagcgggagaagcttggcgcacacgaaagagaacgagggcttagaaaaacacacgcgccccctacctggcgcgccagatgacggagcgtggggctcctcaccgggagaccgcgcgggcccccctttgccggttcggccaggggcgctgggtgaggttctaagcccttgatctgtggaatggttcgcgagagagcaaatgcgcaagacacgggcgatatagacaggttcgggccgctgagaaacgtaataccctactcctgtgttctggtggatctgtgtatgaaggagttacaaagagctggagagcaagagagttcaaactctagagaccctctccctactctttttccccagtcccctctacgagctcaggtcttctccagtctttttttccgtcccctctcttggtaggcatggtcctccttttatctctcaaggggataccacatacaccatttctacctacccttcttttgggtggggacccatcctactttgaccaaaacttggctcgtacttttgcctgacaccgggataaccctgtcctccctcattaatgggcggagatttgcaatggctgttgtccgaatgaccctccgatgggatgggtcataccaacctccactccgccggaagcaggtacaacgtggaagcacggttgtttgccgatgacgcgaccggcgtcagaccagtcacagacc

SEQ ID NO: 7638 - DNA, 4587 bp, Oryza sativa
caactccactccagactcaactcctagagttaaatttaggggttggagctgtaccaatcaggccctacttgtacaacttcatatgatctttggggaaacactactgagacaactagccatctactaccgtcgtaaaatatagctatttaggatgggatttgactcatcttagaatatagaatttgaagagacctctgctcagattcgttattataggatgagtcaaatttcattctaaatagcaatattttaatattttagaacgagaacgcggtagcatcccagtatgatgcagcatgtaaccgaaaatgctgccattgatgacaaagacaacctggaagattactgttgcactttgtaactgaactaccgaagctgatggcagcggtagtagaattcttgaattgtctgttcatgatgccctgcaagctaatgcattcagttggagtgattaaagtaggcaataataccatgagtaatgtcattatttgtatcggacaaaaaaaatgtactacctctgttctaaaatctatacataatataactaaaatataaagatagaatcgaatagaaacaaatctgagcacgtctgttcaaatttatcgtattaggacgtgtctaatataataattataataatgtatcttatgttttgggacggataaagtaaattacttgatcagcacactctggtgacatgacagctgtaaagttgactactgaattcagtggaaagaccgtgagcattattgttcacggctgaacacaaatctgtgggccacatcgtgaccttctccggggcccacagaacgcaaccgggcccttctttgggcccaaggaaaaatgggctgctcttttgggcccacgtgggccattttgcctccgttttgggccggccgtgaaatggctagagctgaaattgcaggtgttgatgacgatcgaaagctggatgctaattcaaaaaaaaagaaaagaaaaagaaaagcttggatgctgcacttgtaactgaagctggtgacagcaatagtacaaccttgaattgtctcttctgatctgctgatgcatttctagataatgcatatccagcagatttgggtgattaatccaagtaatgatctcactccactgatagtggaaattgctggcttcagcatcaaaaactgcattgtatgtttgttttttcgttcttttttttggcattgtttcagcttctttatatgaagtacaaattctacactccagcttggccttaaagtgatcgaacacctagcttgcacggccatggcgcccatggcgcaagatgtcgccgagtacctgagcatcttcttggctctcgtcgtggcccctctcctgctgctcagggtggcgaggcgggcgcgcggcaatggcgccggccggccgaggcttccgccggggccgtggcggctgccggtcatcgggagcctgcaccacctgatgggcaagccccacgtgcaccgcgccatggccgacctcgcgcgccggcacggcgcgccgctcatgtacctcaggctcggcgaggtccctttcgtggtggcctcgtcgcccgacgccgcgcgcgaggtcctcagggcgcaggacgccaacttcgcgtcgcggccgtggagccccaccctgcgcgtcatgatggccgacggcgagggcctcgcgttcgcgcgccacggcgcgcactggcgcctgcgcaagatctgcgtcctcgagctgctcggcccgcggcgcgtgcggtcgttccgccgcgtcagggaggaggaggtggcgcgcctcctcgccgccgtcgccgccgcggccgcggccggggccgacgccgtcgtgaacgtgagcgagcgcgccgccgtgctggtcacggacacgacgtgcgcgccatgatcggcgacaggttcgagatgcgggacgagtacctggagggcgtggccgaggtggggaagctcctgctcgggctcagcctcggcgacctgttcccgtcgtcgaggctggccagcctcgtcagcggcacggcgcgccgcgccgcagcgagccaccggaagatgttcgagctcatggactgcgccatcaggcatcaccaggagaggaaggccgccatggacgccgacgaggacatcttggacgtgctgcttcggatacagaaggaaggaggtcacgatgccccgctcaccatgggagatgtcaaggacaccatacttgtaagcaccatggtttctctcttcactctacttattaattaattgtctttcatttcatcattgtgatacttcattgttactgctacatatatgtaatgttgattaatttatctgacatctcttattaggatctttttgctgctgggacggagacatcaacagcaacactccaatgggctatgtccgaggtggtgaggaacccaagaataatgcaaaaggcacaagccgagctacgtaacaagcttcaagggaagccaagtgtgaccgaagatgacctagttggcctaacctacttaaagctcgtcatcaaggaaaccctaagactgcaccccgccgcaccaatgcttgtcccaagggagtgtggggagtcgtgcaaggtgctagggtacgacgtgcccaggggcactaacgtgctcatcaacgcgtgggcgattggcagagaccccaattactgggatgacacggagacgttcaaaccagataggtgtgagaataacaagtataactttagaggcaccgatttcgagtacataccgtttggatctagacgaaagatctgccctggtccggcgttcacacatgccatcttggagctcgcgctcgccgctttgctgtaccactttgactgggagctcccctgcggagttgctccaggggaggtggatatggccgaggagacaggcgtcgtcgttcgcccgaagaacgacctctacctgcgtccggtcgtccgtgtgccgccgggagctgcctcgagcggcaatggtggcacctagccgtgcaccgcatctactacctagccttaattatgtgaaaatgtaacctggttggatcgaatggattaagtgctaaataaaatggtttatgtgttcatgtttgtttgtgttcgtcacatgtcacatgcataagagagagaatcagactatcagagaaggcgaggtccagaagcaggatcaatgttatgcaccttgcaatgtcgatagcaattggcattagtcctaaactgctcagtcatcgtgcaggatattggtgcaggtatcccatagagtcatactctggttctgtaatcaccaggcattcagaaatcaaaaccgtgaaaactaaagacaggcatattcatgctccacataattctccaagaagaaatttggataaaaatattgatataaatttttaaaagtacggaacaatggaaactttcatctgataagcattcttttatcggaataaatatatcagtggatacgtacgatacaatgaacagatcctctcatgctttgtataaattgtattacatgctactacaatacagtgaacaggtcctttcatactttgaattacatgctacaatacatctcaccatactttacatacaatcaatggtctgagagaagggtcaagcactcaagcttcctggtgcacacattaatctacacctcaattgatgcttcaccgttgcttgcctttctccattttgaggatcgttgcttgtttatgatttggacgtaagggtgaatagtctaagtgtctaaccacaccatgagcaataggtcaaccccttgcatcatatgatatcttggtatgattgagtataagactatgagagggaatattgccctcaagatctgttaaaagacatcaggagggaaacgcccaggcatagaattgttctgctgagcttgcttcagatgcactctaagtgcataattatttatctgcaatgttaaatatacttatgtaagaacaatcaaaatcaccgggagtagtgttcgggacaaaagaatcaccaggagtaaggagtagtacctcaagagtttttatctgttcctgatactgcaaaaccagttgtttcaggctatgaacctcctgagtcctctcgtcaaactctttttgacgttcatgttggatagcaaccgccctcttcagaacagcgttctctctcagatatattgccagttgctccttcagcatcacattttcctgcaggaaagcaaagcataactgcttaatttgcctaggagtacaagtactatggatgaaacgtgcatatgctgttggttgcaccttgtgcaaattatgcactgcttcagttcctgctcgctccattatggatttctccaatgcctccagggctcttgaggcacgagcccgcgcatcatctatgtctgatgcactcatcatctctctaacaaatagctcaacccactcagaaccatgatgatttgtctgaaagttttctgtagcatgtgggtttcagtgagcacatccaaatgtccattattaacaacacctgtccaagattgcaagctgacatttagcaggcattttttggagaaatttattcacgaaagaggcatagttcatgaagacatggcaaacataagttggcaat

SEQ ID NO: 7639 - DNA, 2385 bp, Oryza sativa
taagcctttaactacagcaccgtcagccatggagaaattacctgcaattcagcggtaggcctcgcaccacgcgctcgctcacacgatactgcatgcattacattatactccctccatttcagattataaaatattttgactttagttaaagttaaactgtttcaagtttgactaagtttatagacaaatataatgatatttataataataaattagtttcatcgaatcaataattgaatatattttcataataaacttgtcttgattgaaaatgttactatctttttctacaaacttggtcaaaattaaaacattttgattttgaccaaagttaaaacgtcttgtaaccttaaacagagggaatagtattctcttcctaaaactcaacctaaatactccctccgtttcgttttatttgacaccgttgactttttagcacatgtttgacctctcgtctaattcaaaaaaattaaataattattaattcttttcctatcatttgatttgttgttaaatatacttttatatatacatatagttttacatatttcacaaaagtttttgaataagacgaatagtcaaatatatttaaaaaagtcaacggcatcaaatatttagggacagatggagtaatattattgttgagcggtgttcgcctggtatgtgggcgcaggagttgcaaaccagcatcagtgtgtcacttaccttgtttgccgttgagcaaaatttgctaagatgaaaatcatatctgaaaaacccgtaattagctaccaaaatcttcagctcaatttccatttgtattatacagcatcaggatatattatgccggcggcggctagatgatgtctacaccgtagggttgcatgtgccggccgcaaccacccacaggttttatctgatgcggtgaaggtcagtgtgaggcaggcgccattgcaccgaccgaaacacacgaacagcgacaacagcaaacagatactagagcaaagcccccacaaatttaactagattggatatttagttatgctgtgtgttcaccaacaagcgcgggccgagcgacagagacatatgctatcctccaacagtagcatagctatgtactcgctccatttcagtttaaaagaggtttttgacttggctcacaatcaaactactttaagtttaactaaatttatagcaaaaagtagtaacattttaaacccaagataaatttattataaaaatatattcaattattgatttgatgaaactaagttagtatcgtaaatattactatatttatctataaacttagccaaacttaaaacagtttgactttgactaaagttaaaacgtcttataacctgaaacgaagagagtatttttaaaaccacaggaggggaaaagagaagattgagaaaatacgcaaaatgaggtgagccattagcacatgattaattgagtattaattattttaaactttaaaaataggttaataagattttttaaagcaaaattcattttttttaaaaaaacacaccgtttagtagttcaggaaacgtgtgtgcggaaaacgaaacaaactctctctctccggctgccgaaggcagcctaacaagtttgaatgtttattatccattttcagtttttttttaaacattaaggttttactacaccagcgaataatctttttataggtcgtataaattgataacctcatacataagtggatttgcgggttagccacttatgttcatcagtgaataatctttttatacatcgaataaattgataatccgatatataagtgaatttgtgggttagtcgttgggtgagccaccacccggctctgccactataaaatctcccgaggaagatgacgaggagtcagtcaacagttgactagctgttcgattcggccatggccaccgagctcactgagtacttgctgctcctgccgcttctcgtcgtaccgctcctctacctcgcggcgtcgtcgtcgcggaggtcggggaggctgcggctgccgccggggccgtgggcgctgccggtgatcggccacctgcaccacctcgccctcgccggcgcgcccacgcaccgcgccatgcgcgacatggcgcggcgccacggcccgctcatgctgctccgcttctgcgagctccccgtggtggtggcctcctcgccggacgccgcccgcgagatcatgaggacgcacgacgtcgcgttcgcgtcgcggccgatcgggccgatgctgcggctcgtgttccagggcgccgagggcgtgatcttcgcgccctacggcgacgggtggaggcagctccgcaagatctgcaccgtcgagcttctcagccaccgccgcgtccactccttccgccccgtccgcgcggacgagctcggccgcctcctccg

SEQ ID NO: 7640 - DNA, 11603 bp, Oryza sativa
caactctagtacattttgtgagagagctccacctaactctactcccaattttagtggagctgaaactgtttggctgagctccagctccaggagaggtggagctggagctggagctgtgccaaacaggcccgtagtatatcacaatgtgaactatatagtaggagcataatttatctcaaattatcaatcaaagattcatctgcgaacatgtttttcttagataatggaaggaacaatattcctttatctcaatgttccataacatatttgtgtgcgaaaaaacaactacatactagggtgtcgtcgcatggagtggcacacgaacgacggcatgtaggtataggtcattcttcctcctaacagtgatgcccatctcctcggtcatatctagctcacttggcttcaccccagcagggaggctccaatcgaagtggtagagaagggtggcgagcgcgagttctatgttcggctgcgcgaacattataccaggacacattctccgtccagacccaaatggcaagaactcaaagtccaaacccttaaagtcaatcttgctatcctcaaatcgctcaggcttgaactcttcggggtcatcccaatacttaggatctctaccaattgcccaagcgttaacaagcacagtggtaccttttggcacatcatatccaaagatcttgcatgactccctcgactccctaggaaggagcaaaggcgctggcagatgcaacctcagcgtctctttgataatgagctttaggtaatttaggtcggtcaagtcttcctcggtcacctttggcttcccttggagattgtcgcgtaactcagcttgcgctctcttcatcactcttgggttcctcatgagctccgacatggcccattggattgtagtcgctgatgtctcacttccggcgctaaaaaggtcctatgaaatttcaaaattattaacttaaattgaacatgccagaaattaaatgaattagaacgtacgaaaaggatttggaaagaaaattagaaaaaaacatttggttggaatttggaaatgatgttgtgcttgcttacaaggattactgctttgatgatccccatggtgagaggcacgtcgaggccacctcccttctgaatcctcaagaggacgtccaccagatcgtcgtcttccacgacgtcgccgctcgccgccgctgccgccgcgcgccgctcctggtgctgctcgatggcgcggtccatgagctcgaagttcttgcggtggttctcctgcgcccgccgcgccgcgccggtgacgaagctggcgagccacgacgacgggaacaggtcggcgaggctgaacccggagacgagcttgagcccctcggcgagggcctccaagaactcgtcccgcttcttgaacctgtccccgatcatggcgcgcaccgccgagtcggcgatgagcacggcgatccgctcgctgacgttgacggccgcctcgccgtggggcgccgccgccgcgacggcggcggcgaggcgcgcggcctcctcctccctgacgcggcggaacgactggacgcggcgcgcggagaggagctccaggatggcgatgcggcggagctgtcgccacagcgcgccgtagggcgcgaacacgaggccctccccgtcggccgtcatgatcctcacggtggggctcaccggccgcgtcgcgaacgcgacgtcgtgcgtccgcatcacctcgcgcgcggcgcccggcgacgtggccaccaccacggggacctcgccgagccggaggtacatgagcggcgcgtccatccgccgcgcgaggtccgccagcgcgcggtgcaccagcggcttcccggcgaggtggtgcaggctgccgatcaccggcagccgccacggccccggcggcagcctgacgccatcgctgccgccgccgcgcgtcctcgtgacccggacgagcaccagcacggccacggcgagggcgaggtagtggtagtaaccgtagcagctggttggttcttccatctcttcgctttgcttcgctgactatacgcagccaaagcagtatatttatacactacctgcgtatgtatacagctgtatgtatttatatctataccatagatagagatatggtatttctattcatatcttaattaccttatatctaacatctatattcatagcactctgaggaagcttctacactaacttggaaaaaatctgaccattaatttagcagatcacattgttatgatacagattgagaatacatttacactaaattaattagacactataaaagagttctttacattaactaaaaaaatctcactattaattgagcggatcttattattatgatactaccaagaatcgttgtgtactaactagggacttcgagagagcttctacattaaaaaaagatttcatcgttagttaaaacaaattgttcttaagtctattttctcaacttcacctctcttctttttcacgcacattctttccaaactactaaataaaaatttctatagtaaaattgttttaaaaattataagaatccattctaaatccttttctaatagttaatcaattatatgctaatacgtgcttcattttacgtgttggagaggagatgtcccctctcctcccgaacacattctaatgatctttactttaagtatgagggagttgctatatctctactacttaaatcatccttctccacctccacctccacctctacgtaaaaacctactaccataaaaaccatccatctaaaaagcagacttcttaaaaaaaaagctaaataaccccactaagtctaaattctctcggtaaatttaataaaaaatcgttgaaatgcatgagcctataactactactccctctatttcagattataagatgttttaaagtcaaaatgtttcaagtttaaccaattttatagaaaaaaatagtaatatttttcgacccaagataaatttattataaaactatatttaattattaatttaataaaactaatttggtaatgtaaatattactatatttgtctataaaatgagtaaaacttgaagtagtttgactttgaccaaagccaaaacatcttataacctaaaatggagagagtactaattaactaaattctgatcatctattaggcgaaacatgttactctctccatattttaatgtatgacgccgttgacttttcgactaacgtttgaccattcgttttattcaaaatttttgtacgaatataaaaatatttaaatcatgcttaaagaacatttgatgataaatcaagtcacattaaaataaataataattacatattttttttttgaataagacgaatggtcaaacgttacataaaaagtcaatgttgtcatacattaaaatacggatgtagtatttcgatatagattttattgagaattcatattaaataaagaatgaagttgaaaatagtttaattaggctcttttttttgaactcaaaattaattattacaaatataaggctgtactatatttgcactaccaacttattacattaccattttatcctaaaataaaaaaaacaaaatattaattttctttagtgggagatatagtttttcattccacacacccctctcgttccttacctgccatcttaaactacgtatatatatagccggcagggcaggtccctaattaaggagtagtacaaacttagtcattgttaatctcgacggaggacaagatccttcctgtagcatagagtagcaacgcacgcgcgtacagccaaaaccggccggccgccaggtcgccgtccacacgtcctcgcgtcgccggccggccggttgctggtcgggtggctgtcgatcgatgcatcgatctagccgtaaactgcccaatgcgtcgcatgtactccccctctttaaaaaaaaaaaaaaacaaaccctaggtgttttcgtgtccaactttgattgtccgtcttatataattttttttataattcgtatttttattgttgttagatgataaaacacgattaatattttatgcgtgacttgtctttttaatttttttcataatttttcaaataagacgaacggttaaaagttggacacggaaaccagggtttgtcttttttttttttttgacggagggagtagatgcacgcgtcgcatcatatccgccgcggtagcgtgcgatgcctccaacctgcacacgtcccgtacgtctcgatctgcatctacctgattcttcggatgattctctacagtagttcagaacaattcttgtaacgatgaggaatatggtaagagcctgaggtgagactggagtcggaggggttaggagtaaagacgaaaagaagattgagcaggaagtgattgatcagacggtgcgcaaacgcagaaactttctgtactatatattggttgtgttgtctctatttgtttatgtggctacaactagatatggtggaagagatgtcctttaaatatttttaaaaagaaattataaatttgttagagattaaaaacgatacattggggttgaaaccatacgtcctttactattgtgctatcaattacatctctttattttttagctgttgcttgtaatttcatctggttttgcactgtcatgtatcaatctaattgggcatacaatctattatatattaaaagtccatcaaacattttcaggaatgctcttaaatcatcacattatgctaataaattagagaaaatcttaagaattttaagaaaaaaaaattcaaccgttaattttcacttagggctcattcgaaaggtagaattggaaaaaaaagtaggaacaaaaaatacatataaatgggataagattgtttgtgtaaaatagatgattgaaaatcataaaaaagtgatgttcggaacaaaggaattgctaataagcataaaaatctttctaagcaatcacattagttgcttgcattgttctcaaattataaatcgttagattagattgatcctaagaatagaacgcccaactaaacccagctacagatcggttggctgtgcacggctgcgatggaggcctggagaaggcgcccgatcgaggcacggaagagactccgggatactatcactctctccgtttctataatataagagattttggataaatgtaacacatcttagtacaatgaatctaaatatacggtacgtctaaatttattgtattagaatgtgtgacatccatctaaaatactttatattatgggatggggaatagtagctagctgtacgttgcctatatgcaaatccaaagactcgtccttccagtgaaacatgccactctatacatcaactgccctacagctttgcaaagtgcatgcaaacagtgtcctacagcttaatttgcgaagcgtaagaacagtcagcgacgatcatctggcctgccatacaaagctcgatcacccgtaaaccacggcctaatataaccacatcctggtaaaacaaaccacacaaacacaatgatcgatgaacaatgcgggcacatgatctcacctaacaactactgagattaaaaacgaataaattgatgaggaatagatatctaaggctcatgttgactacggtttttttttaaaaaaacattatagatcacatatatcatacaaaatgaggtctagaatatgtatatctcctccatctttactgattggtatgaaagtatacgacaaaccgcgtcaatgtaaaccaatttgaaggaaactagtttgattatacaaataaaatatatttattagcaacagtagtaaatccgtatatgtggattagtaaggacggtgaagacgtacatgggaaaaaattgtatggcaccccatgccacaaagcatgcatggcacctctatcaagatcttgtcacctagcgtgcacaaatcttgaagcactgatctaccttcaaaaccatactagggcaaaaactaattaacagactatcactaatctcgcgcgcgcggaaggatggcggcggcgatgcgcgtgacggcgatgcacgtgcaggaaacggacggcggcggtgacgacacgatgacgtgcgtgcaagaaagggcggccgccgccggcaacggcgacgcggacgcacgcagcaacacggcggaaatcgacggagctagcgctgcccagattgatcgcgcggcagaggtgcgtgggctgatcggtcataactcgaggtcaaacttcgctgacgatgccatgaaagacccaagccatgcacatcatcggttcagttcagatgatgagaatcttgaagattgcatgaatgaagaaaatgattcaggcctggtttagttctcaactttttcttcaaacttttaacttttccatcatatcgaaatttttctacacacataaacttttaacttttctatcacatcgttccaatttcaatcaaacttttaattttggtgtgaactaagcacaccctcagtgtgtgagtaattttgattgatgtactttgttgtgctcagtagatacggaatgcatacaaatttgtgtgcactgtacgtgcacgcgaccgccggaatccttccgcgcgcgagattagcgatagccagttaattagtttcatgcggttttgaaggtagaagtgctccaagatttgtgcacgccaggtgacagaatctcaataggtgtgccatacaatttttttttccgacgtacatatcctactagtctatcttctttttatatgatgacacagattttagataattaattgtttcttgaaatttactaaataatatactgcatagagctaacaaatagactgagaaaaaaatatctaaacctttataagtttcttaagtacatggcctatgttgtatgcctgcgtatttgtagggactacctttctagtttagtctaaaaattttgaacggttttttgaaagtagagatgaactccgaatctccgatggaaacaaatgcaaaccacgtgaaagttgacatgtcaagctgggaacatatcctatacacacaagtttctcgtgcacaatttaataatattattgaaaatatgtgtttaatttttctagaattttctgtgaaatttactagttggtgtgcacgagaagcttgtgtgcataggatatgttcccgtcaagctggtcagtcatttatgattctgagacccggtttgaaccaaacgaagtccttatactgaagcaattgactttgttgttctgagacccggttatgattctatttctacccatcgtattgtttcgtttgttgtgaaaggtaatttactcattaaagaaactgatagaatcataacgactagttcagtagttcgctttggatttaagcttctgaagtgctcgacagcttaccaacctcgacgccatggccatggtgaaacctgcactcgccgacgattatcgggtgaaagaaatctctgagcttgaaagaagagatgcggttcggttgggtcggtgattcttcaccgaccccaagaggcatttgggccgtatatgccacagcaattgggccgtcgcccaccggcccaccccatcaaaacagtactcggagaccgaaccgcagcaccaacatataacacactaataaatgggattttttttccatccttcgaagtacagtaacatataatgcggtagtggtaaaaggtaaagaacaatagcgattgcagaattggatgaacagattagttcatgaaaggtggaagcggaacgaccttggatcggagttgggacaggataattaactgacagcgaatctgcagttggacagtaaacaagtcttcagaatgatttgatttctgtctgtttctaccaaagagtttctgatgaatgagtagtcaattaacttaactacttttaattaaccatcatctgaagccatgagggtagctagctcagattctttactggacaattatgtaatgtattgctctctcgtttccttcttgattaatgatcaatcagttcatctcctctcttgaaatcggcctgtgctctcctgatgctccatgccattgttgaaggcgaacattcaggccctgccgccgccgctgccgaagctctccaccgccgacgaacggtcgatctgcaggcacgccggcgagtcaggtttcagagtagactgttcatttcacttcctacaagtgtttgtgttcatcgtgcagatgcagaatcactgattcatcactcaccagagttctcaaggagattctttttctcatttgcaaaggtcatattcaaagaagcctccatatatgctggtgtgtgtacagtcctggtctcaagtctcaacgatgatctgcacaaataaaaaaaggatgaacaatgttagacaattatactgtcacttttcacatttcagatatcttccttcttttatcagtgtttactgtcaaaggttagattgctacaaataacaccatttcacttttatcagtgcaatggaaatagggagttctcaagcatcaagaaaccggcgtgccatattagctacagtttctgtataaaaacgcatgaatactttgttgaggtaaaacgtaaaagtcgtttttaagtaagcatgtttcacaaaatggtgcactaagcactagtctgagttttgaactgctatttggtggtggctactttctcctgctccgttagtatgttttccaattgctactcccttgctaaatggtgcgttacgtacacaagttttactatatagaagttttttttttgaaaaaaatgaaataattgtactcaattaatcatgtctaatagtttgtcttgttttacacgttgccaaaaatcctagctgaatatctggttcgaactcagcgactgttctcatctaggacactatggaacaggtgaatcataaaacacaagaataagaaaaactaattagtttcatatatatgaatgcacctaaaaaacagagaagtgtaatatatatggaaaaaaatataggagtgatcgttaaaatcagaatacacacagaagtcaatgattttctagaatcaaattgccgccaatattagaagctatagtaaaattgctcatagtaaaagagacgtctgttgcctacgtcaagacagagtgattaatccacgtaatgaccttcttgttgccttgcattgacttactgccagagagattggaaaaaaatgcccccaagtgttatcagattattgtatgttgcgtaacacaaagaaactgagatgtacttgacagtgcaaggacaaaagatatgaggtttaagtgttatcaaattattgtatgttgcgtaacacaaagacactaagatatacttgatagtgcaagggacaaaacatgtgaggttttaaccttgtgatccattttcaaacctcaacaccctcacaattttcttttaaaaaaaaaactaccgctaacaaaaatactaggtgctgattggaacgcgcgtgctaccaaatagcctataattagttatatcaacaaaacaccgtaatggcctgacataattgataacgacaacggcgaagttatgaacgtactcacggtgaaaattggccaatttctggttaaattaattagtgcccgttggagagccgtccaaatcgcgctgacacttcccttttgtaattatccgcagtactatatgactagacaaaatctgctgccgatctatgctcctttaaagaatggaatggcttgtcaccagcatcaactccccaaaattctgacatgtgagactattgtccattccctcttaaaattaaatgtacggtaaaaacagaattaattgaaacaaatcaaaattgtttattgttggcgaggagaagcagaggagtggatggatggtgcggatcgatactcgatcataagctcgttgcggtcacaggctcgtctcggtagacgtcgctacgctacggcaccgctaatctcgactccgtgctattaagttaatcacatcgctaatctcaggagttgggtggggcccctataatcagaggcacggtccgacaaaaccgacatgccaagagcaagtataatagtaagctataagcctactataaacttatgtagaggagagaagtaaataaaagagaaagatgttggttctcatgtaagagctggcttaacacaagctccaaaacaacattaaatgtataagtgagagatagagatagaagaagaaaatcatagctaaccttatagttaatctattatatgtgttaactttagtataggctaatagtaggaaatgtgctatattattatccttgctctaaaacaacgaatctaaacaagtattgactatttagattgttgtttcaagaggatgtttgggagggaggacaccccctaaaattttataggtagtaatattttggatgaagttagtattctgcaggcacacctatatactcctgtcaagtcaacaccaagtagtcgaagctctcacgagttgccatgaaaaaaaagaagataatactcgaacaaccctcaccatgtgccattccaggtgacagcatggggcacatatttcgaacatcaggtatggcaccttaaataatactatctttatattttaatatatgacgccgttgactttttatttaatgtttgaccattcgtcttattcatcgtcaaatgttttttaagcacggcataaatattttcatatttgcacaaaaaaatttgaataaaataaatagtcaaacgttgattaaaaagtcaacgacgtcatacattaaaatacggatggagtaaaaatattagttcaacagtttcccttttgtcttgcaccgaaaaatagggagtagatttaacttaaaaaataggtagtttcccttttgtctcgagaacggtgatcgatatcccatcaatatatcagaattgttttctcaagaaatatattgctaaaaagaaaacttaatctgctcctactgaggcacaactacaagtctacaacttcaaatgggggtaatgcattgtggatggcaaggattggtttattaatttacacaaagttaagttttattttctttacaaaagaacttaattgatgttagagctataatagaaatagactgttttgaataaattaactgtcttatctatctgaataaattaaacaccttgtctactcgtccaatgtttgtcataattttttatttttcctgttgcaacgcacggtcacctctgacagattaacaataccaatttattcctagtaaaatcctaaataaaatatttttaaagcacataaaaatcaactagtagatatatatttgtaccattataataccaccaataatagaaggggtcgtagatgcaccccctacataaatagtagtaagacgtagtactgattaattcaagtaatgatattttcttctttgactataccagatattagagcttaatcagatgttgcgtgtgtttgggaaacacaacaatatatgaacttgaaaccttgataccgctgacattttttttgtgttcattgcaacacgtgtatgcatggtaagcacagcaatatactaattccccgagatagctgataacaactgcaaagttgacaattgaactcactgcgaaaattggcaattcaattttctagctgaaatagcgcctgcgttgcaggttggag

SEQ ID NO: 7641 - DNA, 2593 bp, Oryza sativa
taagactttctaacattgtgcacattcatataaatgctaatgaatctagacacacatatatacctaaattcattagcatagacatgaatgtaggtaatactagaaagttttactccctctatttcacaatgtaagtcattctagcatttcccacattcaaattgatgtatatgcctagattcattaacatcaatatgaatatgagaaatggtagaatgacttacatcgtgaaacggagaaagtacattataaaacggagggagtaactttgaaagcatgccattgctgcattacttactgacaagttttgggacagtgcttgctttactctgttttgatgttgctgcaaagaatgtttacaccttcatgaatgggtgatttagagcacgatgaatctagcatgcaagattatattactggctgtaaccattggttgatttgctgaatttgttctttcagaatatcatcctagtcgaaggcctgaagctagacgatgtcaaggctggaatctacatgctgcattgcttacctctgaggctggttggatccgagggctcaccaatcaggtgcatcctgatcaagtgattgcttcatcactgctcctgataatggcgacactgcagatcatgccatctgatgctgctacatcctggctgaggccttgagagtgccaaggccagctcagtagaaaaacaataataagtgtaaacgtatatatatcgtttgtttgatcagtaataattcaataaagcacttaaagtaatttttcatgtaaaaatgcagcagatattaggaatgtggtgaaagaaactgacagactagtaatccctttgttctcaaatacgaggcgtattagctttttacatggtctacaatttgaccgtttatttatatcataatatattatcaactaatgcggaattaacatcatataaaaatattttttaaatacggatctaataacgctacatgtatgacgtcaaacctatgttactaatttaattattagtaaaaaaattcaatgttaaactttccaaaaaataagagtattttataactgatggtgtaacagttattgagctggtttagtacctatctctactattataaaaattgaagatgtttccgcggtccgtcatcatgtttgagtcggttttaattttatgttttagttttaatctatatttcttctctactattataaaaattgaaaatgtttttaccggtattttggtacgtcatccgtatatgagttggtttttaagttcgtttgcttttggaaatacatatccgtatttgagtcggtttctaagatcgttcacttttggtaatacagaaggaatcatataataaatctgtttaaaaaactcgcatgctaacttgagatgatcggattcctaaccacagctcatgattttctatatatatatatatatatatatatatatatatatatatatatatatatatatatatatatccaaacgaactcctacagtaaatttcgtcttaactaaaccatataataataataagattaaaatagttttcacccgttgcaacgcacgggtatttttttctagttaagtataagagtcaaagattagtgttatcattggttacggcatggtacgggacttattgtcgaggtctagtaatgaaaactgcttgatatatcaaacaactttactactgtatttctcttttcaatacagctcgaatcttaataaaaacatacaaaatgactcaggatgtaagtgcacatgcatttgcagcgtcaaattcctcttcaactctacaaatacacacacattattactgacgagagtggaacatacagattaatattaataagaggaattgcacaatggactaggctttttttttctttaccacagttgaataatgggccatatatttacttcatgttttcacttaggactaggttttctcacactttattctcattggactagtttagacttggatctttttttctcatcgatgctgtccatccacaactcgaagcttgaccatgaccatatgcaattgagtctcttggtggcatcctacaggactttgcgtaacaccacattcaccttaggagaatgggcataaggtatagggctgacggataggccggccgacaacgatcatctcgagccacgggttcaaagtgtcaagtttggtaacaaaccatgattcaacgcaaatggttttctaaaaactagtctaatatgctacttagataataaaacatgacccagagtgaaatttggtcataataatatactccctccatcctaaaatataagcatttttactatagtgacgagtcaaacgtttttaactttatctattaatagaaaaaaaatattaatcacgtaaaattgatattattagatttatcattagacaaactataataatatgtaactctttttatttaaaacatcttacttttatagatattgttggtcaaagtagtatcacaaaaaccgtgtcacagtccaaaatgcttatattgtgggacggatggagtaaatgtaaacttatatatgttgtcggtcagcaaaattccaataaagcaaaa

SEQ ID NO: 7642 - DNA, 28883 bp, Oryza sativa
  unsure (1)..(28883): unsure at all n locations
ccatattttggaactaaacacgtgcgtgtttagattccaacttttttcttcaaacttccaatttttcagttacatcgaactttcctacacacataaacttttaatttttccgtcacatcgtttcaatttcttcaaactttcaattttagcgtggaactaaacacagccatacacaaccgagatcggtaagctacagtataactcaatcaaacactaatttcgttttttttcttctcttgcgtggagttggattggatggggggtacagcgcagtacagtaccggcccggtgtcggtgcggtgggaggccgttaaagccatcgccagcctgtccctgcctcccagatccacgtcccctttcgccctgccatgattccccctcctcctctgacttcctttctccacactcacacactctcgctttccttgcgccttcgtcgttttcctctccccgcatacgcgtcgacgcacagcagcagtagcagtatgagtgcctgggtgtggggcccacaggtggttgtgtacgatagcagtacactacaccctctcttccaaaatacgtaggtttatttgtgggctcgatcattaatatcgataattactatttatgttttatcatctggtactaatcatataaaagttttacataatatcgataattaaatattgaatacagacgattataaataaatttattttgggaaggagcaatagagaacgtatagatcgacggggagacacctgcgctgcgggtagtgctgagctgtgcccataaactgccgcgccatgcgtccctcccctccccacgaaatcgcgccggtttttatctaccagccacgattttgcgctccagcctggcgcccctgtcgttttccgcacgggctaacgatacacccttctcctatcgctgccaggtggggtcggtgtcgtgctggggcccacgcgtcagtggcgttgggtcttcccgtcggcgcggggggtgtgtgggcgagcaaactgccggtcgtacagtccggcttgtacacacacggtacgggcggggcccggcggcgggttggacggttgcgattgaattcggcggggtgatggggggatgggctccggcgcgggctacgccttcggctttcgcgattgcaaccaaacaaaccccaacccccgtcgccttcccaaatgcccacttccaacaccaagggggatggatggatggatggatgcactcatgcacgcttgcatgcatggctggatagatggatgataggtcgatctatcatccacccgagttttctccttcccaacctagcggatggataagctcgtcgtcgttgtcgccaccgccgctctcttttcacattctctttgcaaaatatctatactgtttttattttaaaatacaataatttagtatgagatgtaatacatttagtgctgtgaatctaaagacagtgatgaaaaagaaaattagcataacgaaaatataaatatgaagtactttctccgtttcagattataagactttctaacattgataacattcactttctgtgaatgttatcaatgttagaaagtcttataatatgaaacggaggaagtatgtacgaaatccggttttaaaatgtaaactagtatgatggcccgcgcagattgcgcggctagcatcattatattttctctcatataatagcatatatgttttctcattatattattcaaatatattaaaatgataacataattttaatttttgcaataactttacaaaactactaatgtgtaatattcatattatattttatatacctgttagttattaattatttttaatatcaaattttagttatttgtaaattatatattcctatatagactttagactcgtcttttaatatttcatttttttaatttcgcattttctgtaaattgtatttctatatagactctatgcttttcttccagtattatttaattttatttctgaatttttattatttctaattgtatttatatgtggactctaaactcatctttcaatattctttaatttttagtttcgaatttcagttacttctaaattgtattcctatattgactttaaactcttcttcccatgtttttcttaatttcgaattttagttatttgtaaattgtatttttatacggactctaaactctacttttaattttattatgttcattccaaattttagttagttttaaattcctatacgtactctatactctatttctaatattccttatttttaattccgaatttcagttattttctaattgtatttctatatggactctatactctacttctaatattccttatttttaattccgaatttcagttatttcctaattatatttctatatggacttagtctcctcttctaatattccttattttttttaattccgaatttgagctatttctaaattgtatttctatatggactctagttttctcttctaatgttacttattttttaattccgaattttaactatttctaaattgtatttctatatggactctgttttttctttttctccgattaatgtaagaatttctaggccatgagaacgaacgtgggagctactttttctattactttaataatataatagattttgttggcagctcatgagtagtaaaattattttggcactataaactgaaaaataaaatggatggagacaccgttctcgtcttgggttaaccgctccaacactttcataattgagttttcaacggattttattttttttcctctctgtgtgtgtttgactgtacggaatgagaaggattattcaaatttcaaacggcacagggacccgccggcccccgtgtaacaaaccaaaccaaaacggccttcgtccacactactccagctcgaggaggaccgcgtggagctccctgacacgtgggacccaccaaacctcttgtccccacccgccatccaggtaccgaaaatgacgcgcctcgccagctgtatgccaccgtctccttccccccaccgcctatataatcccctctccctcttcctctcgccatcgagtccgacacgtccacatcgccattagagcagctcgaggaaggaggaggaggaggttgattcgatggggatggaggcggagtgcgataggataaaggggccatggagccctgaggaggacgaggcgctgcggcggctggtggagcggcacggggcgaggaactggacggcgatcgggagggggatcccggggaggtcggggaagtcgtgcaggctgcggtggtgcaaccagctgtcgccgcaggtggagcgccgcccgttcacggcggaggaggacgccgcgatactccgggcgcacgcccgcctcggcaaccgctgggccgccatcgcgcgcctcctccccggccgcaccgacaacgccgtcaagaaccactggaactcctccctcaagcgcaagctcgccaccgccacggacggcggcgagatcgaccggccgtgtaagcgcgtgagccccgggccggggagcccgacgggatcggagcgcagcgagctcagccacggcggctgcggaagcggaagcggcggcgggcaggtgttccgccccgtgccgcgccccggcggcttcgacgccatcagcgcggcggacgtcgtgcggccgccgcggcggcgggacgacaacgacgacgacggcgacgacgacccgctcacctcgctgtccctctccctctccctcccggggttccaccacgacagcgcgcggagccacttccaggagctcccctccccctcccgctccccttcgccgccgccgtcgccgccggcagcatctccatccgcatacccgttcaacgccgatctcgtctccgcgatgcaggagatgatccgcacggaagtccgcaactacatggccggcgtcgggctccgcgccggctgcggcccgggcgccgtggccgagtccttcatgccgcagctcgtcgacggcgtcatgcgcgccgccgccgagagggtcggcgtcgtgacccgccaataaaaccccccaaaaataaaaaaaaaatcaaccatcccggttcaaattcaccacaaatgcacggtgaaaaaccacctgttaattatgagatctgtgtagtattattagcactagaattttcctggttcatctttgtattttactttgagtaaaattcttctgctgctctgaaacagagcagcggtgaaggggaggtaaaaaaaaaatcagaagcgaaatgctagtgcattgctactaccagcacagcagcagcatcacggacaggttggccgttttctgtacaggaacgaggtgatggtgagatgtagcgacaggtttctccttccctttgaaccgtccgtgcaacgaagagtcgaagactacttgggcatcgatcagatgtgcgagttgaaagtgatagtagtagcagcatgctgtactagcagtacgcatattggacatttcagagcatctaacttttaaatgtggcaattaaggatttaccaaccacaatctataacatatgggtaatctttaattgccactttaaatagttaaatatttttattttggagctatatggccgtactcgagctgtaaataaccgatgatcttttctttttggaaaaaaaaaagcctttgtttcgaatgtataggaattttctgagaatctgaaagtacttatattcctcagaaccgtaagaacttgtttcttattggccgctttgcgtcgtttaaccgttgggcatttgtctctatcaactctatgtgcgtatagaatggatggattccgatctcattgtctctttccatcagtctatgtgtcacgtgtgtagagaatgatgaattgatttatactccgagtagaactcttttgctaagctaattcattcctattcccaaagaaaatgggcgtatgagtctcatagtaatacgagacaattcaatgcccaaaggaaattgatttctactgtagtgagctgtactgtccagcaaaacggttgtgtactgttgaccattcgaatcgatcgttggtgcagcgcacggtacaacgaagtaattcggccgcagcggccagaggagcagggagccaatatgagctggctcgtagtaaatcgagtgcaggacgagtagtagtaggagtgagctgtgacagttcacggttggcggtatttataccagcaagtgatgaagctagctgtacacagctgacctgaccagctgctccccccaaacatccctttcctgtgcagaacagtagcttaaaggattcctgacactgttgctgcagcagcagcagcagcactactagtagtagtactactagcaagttaattgcaaatctgcaatttgttcagcagcttgaaagcagatgcttgtttgttgaggccgtttttgccggtgatggttggtagtctggtgtctctgcaggaggcaacataggcctcggtaattctcacccatcgacagttcaggcccggcccaaattggccagatgagcccactgatcttaagcccaatgcaagtgaaacgcaagcatgattttgatcggaaatgcaaaatggtccatatattgcgaggccgaatttataccggaaaggcacacggacgttacatggacaagtcgtcagagtctcacacaaacaagttcaagaacggatcatacggatgctgccatgagggtgcacggcggcgatcaggcgggcggcgcgtcggcgtcgtcgatgttgctgccggcgacgtcgacgacgaagcggtagcggacgtcgttgcgctcgaggcgctcgagggcctggttgacgtagtccatcttgacgacctcgatctgggaggtgagccccttgtcgacgcagaagttgagcacctcctccgtctcggccatgctcccgatgaagctgccggtgatggccttccggccgagcatcaccatgggcgagatgaagctcagcggctggttgatcacccccatcaggatcagcttcccgtccagcttcagcagcgccaggtacggctccagcgggtggtgcaccggcacggtgtcgatgatgtagtccagcgagtcgccggcggccgccatcgccgccgcgtcggagctgacgaggtaggcgtcggcgcccaggtcgtccatggcctcgccgcgcttcctcgccgacgagctgatcaccgtcacgtggtgccccatcgacttggccaccttcacgcccatgtgccccacgccgccgagccccaggacgccgccgcggagacctggcgacatcagcccgaagtgcttcagtgggctgtacaccgtcagcccggcgcacagcagcggcgccgcctgctccggcgctagccccgccgggatcttcaccacaaacctgcacacaaattcattactttttttactagtttcttaccatctcactaaccaaatattttaatctttttaagacgtgacaactttcagattaggcaggtggatcaaaaatcacgggatgttttggtttgatgccagaatttgccctatcaaatagttggcactttaaatagtaccatgtatatgtttgtaatgatgtcaaaatttaccaaaggtaatacaactcttagagcaggtacaatagcaggctaatagcctgcttacctaatattttaacatatatgatagagagagggaaagcagagagagcaaagcggacgacaatccagtcaccggctcaagcacgagcgcctaggcgctctggccccctgcagctcgggacaaccaatcgaaaattagaacttgaacatgcagaagttaccaacacctgacaggatgccttggttaaagcatgggtgtagccaattactgtatctaccattgtttagttatctcttaaataatgtggtgaattttggagccggcagttaactttactattgaacttgctcttataaaccaactatactaaaatattggtagtgccaaatcttgaccatgatttgacgctaccaatgatttggtagcgcaccaaacaaaatgagcccaacatttcactgtctctgctagtttaccaactgactacaacgacgctatgcaacaatccaacttttgctctgttcaagaagcaattcttccaacaacaaatggactaatggaccggggtaggtgaggacttatcagttaatcaacactttatacctaactttggtgacttctcactttacactcaacacagtaccgacttctcgacatctctttcagtctcagatgacattttctccacaaaattttctaacagactggactttactttggatgttcggaaaagtccagtctagttttctctacctagaacactgacaatatgataatatgataatgatatcgtgatcagttggttggtgattacttgttggagtaaagctgtgtttagcactcacttctggtcgacgaccatggcggaggcgaagccgccctgggttggccggccgtcggtgtagacgtcgttgtaggaccaaatcctcttgttgcagtactgctccacattggccttgcacggatggcactcgcggcagcagccgacgatgacgccgacgccgacgacgtcgccggcgctgtacttggtcacctccggcccgacctccaccacctcgccgaccacctcatggctgcagacgagaagaggagagaattttcttggtcaccgacaaaatccaacacatgactgaatattggtacgacaatggaagtgtactggaaaaaggaattcttggtcaccaactaattaatccaaccaattattgttgcatacttagtacgacatgcagatggtgtagtagtactaaattactactaattaggcatcatttttcagcctggtgttggggatctatcgtgtgcttatttaaagcccatcagatcagggaaggttctcgctgaggttttctttacacgtgtctctgaaactgatggtgcatctaatctgtactatacctgtcatgaaaggtgttgatcaaaaaagaaaaatgctaaaagcgatgcactaacttatctttctgttccaaaggagtgtgatatagtggtgcatgtgcatctatgccttttgtaaatctgaaaaaagcactgaccagatttgctagttactagtgcctactcttttctgatatgtttgttatcccaatcagttaataagtttatcttcagtctactatagaatacaccatcaaatcaattgctagtagaagatctccattgacatgagccatgatccatctagataactgtgaataatcttacccagggaccatggggtacttggaagcaccaaggtggttcttggcctggtggatgtcagtatggcagataccacaatacaaaaccttcaccaccacatcttcaggcccagtcttcctggtaccaccacatacaggaaaaaaaaagaacattagttgatctgttgcataagatgcttcttcagttattccattctacaagaagacaactcaaggaaattattgatatatatataatcctccttttctttaaggaggcatggcacgagaattgcatagcaaatatatatattagaaaattataaagaatgcttctgaaaatatatatatgtggagccaggcaactagccaaaaagaactccatgcattctgtctgtttgccacaactgctccggattcagggattctgttcctttcacccaacaaaaccaagacgtgacgatgattgcaatagccaattggcggtaggtgaagcagttttggtagtacactagtactacaccactatactcttcatgttggacttatactaggagaggagcaggaatacaaaatagagtcaaactcacgtgggaagtgtggaatggatcgaatggaggagcccaaaaaagaaaaaagaaatccaattgctctcttcacctcttcacactttggccaagaggcagaaacaatctgagttgtactcgaggcagatgacatgaacacaaacaaattaaaacacgggggcatctaaacaactaaagcactggaacgccatcagttttcagaaattcagaaacgaaccatctgaacaactaaactgtagtagaacgcatgtaccagagtttcagaattgagacaaaagagaaactaaaacctaatccctccgtttctaccgaccttaagcaaaacttgcaagaacaagatcgagaaggagagggtgatcgatcatatcatatcatacctgagggtgtagttgtagggggtgaggtggccggaggcgtccctggcggcccacccggtgacggtcttctcggcggcgaggctgcccatcgtctctggacacgaacacgcgacgcacgaggcggcggcggcggcggcggccaatggatggatcggattcgggaggaggaagagaacaagaacaagaagtgcagtggctgattcgctctctctcgctgaattctggagagggggtggtgcgtcccgcagcgagtatatataattaaaggaaaacatcgcgttggacgggtcgtgactgagagggggaagaggggttggtgaaggctggctgcctcggagatcgtgccaggatcttctgtggccacacggcctcaatttgattcgtttttgtttttttttttgttttcgtgcaagacagtttttaaattgaaggggaaagtgccaaagtgggtatcgaaatgggaacaaaaatgttagtagtaggacaagtagtggaaatgtttggtcgcgtaggttttcctaccaaggttgggaagtggttaattagctggtgcgtacgagtatggatggagtagctatatcagctccttcataatgttttattccctcattattaatgttaaaatgattaattacctattcaactactttatccgtatcaaaatatagtaagctatcatactgggttagataccatttagtaccataaattcgtaattcgtagtactgaaacatgtcctggttcgtagtctattaagtggtgtctaattgactttatctagattcgtagtactgaataagatttaatcgagtactcggttattacgttcactatccttttcatatttggattctgtcgacatttgatgtcgcgattccggtatttgcatagtatggggatctttgatactaggatatacgcgagacttaggtaaaagagacggaaacagatttttatacaggttcgggcccctgaattgtcaggtaatagccctacaacctgttggccgaagccggtcgttgctcttattcaccataatcacaccagtacaaatattggggtagcctatctaactgttgtcgacatggcggtctgaagttcttactcatagtcgacaacagggtagccttcctcctcgaatccgcatccaacgagatcagagacagcgctatatctctcctaacagtagccataggtacctaggggactagctatgcctatctctgaagtcgatatctggcatcttgtcttggcgtatattggcttgtatgttgatcttctgtcttgatctattgttccgtgtcccctctcctcctaggaggccttgtatttatacccataggtgtccccttgtccaagtagaactagggaaaccaatatggatacaatccgagtagttcttgtcgtttccatgtagaactttggttgttttttcttatccggaactcccttcatatccgaagtcagttcccgtataagacatggtatgtggtgggtcatgccgagatttagtcaactactattaggtatgtggtatccataaccctaacagattccctttatacaaaagcatggatatactctatatagaggtgcaatttaatttagattttttgagcagattatcaatttgactacaaaataaactatattttgtaaaagtaactttacaaatagcttaaacaagttgtatacaaagcatatttttcagaacacggagcaaataattcgatttaataatctgattaataagcagaaaagaacataaccttgttaccatagggtaaactcctataaaataaaaacaatatcatatttattaatagggtgtaaccaaataagtcgccctacaccatttgtatgcttgactattactcctgatattatctccgtgctattagtctcaaccttatatagtgagctacaggacaaaaataaaatacagattgagtcacaaatctctctcttgctcacacctacaaatcgaaaattcaaaatgctcgaaagtcagaacaaacataaccatgaaaaagcgactttagttagtagcttgactacttcccctctaaactgtcacacctatcgtggattagtcgtggatttatggatgattttgcagtgattaattttacctcacaaacagtagccatcatgtccttgtagaagatctcgtttggagaaaaggaggaggcacgcaaggcacgcgtgcttcgcatgcgaagcgaggtgacgtggcactgtgccagtggctgagtggactaaccgggaggggagaaaagttgcagagaacgactccggggttggtggccgggcccatcgcggtaggtgggtggggcccacttgccatgtctggtgacgtcacggatacgtcatctgaacggctgtctgtgaagagagagactgggacatgccaaccttcaacagcacgagtggttcatggtcaactgaggatgatagaaaaagagaggataaaattaagctttgatttttattattatagtactagtacttatcatttgcgtatgttcccaaaaaataaatgttaaaatttcctcttgaatgaatgctaaggggttgttcagatgataatattgctaaaattttggcatgatttcttatgtattaaccaaatttgacaacaatttaaacgtatgtttttttttgacaactttgctaaaaaatagtatggttgaaaatggcatcaaagtaaatatgccctaaattttcatatgaatgacgagtgatttttttaaaaatattttgaaacgaggcgagtgaattggtttataggcacaaattgtggcacttggtgacgaaacaatttactaaaccaagcatttttgttttaatttgttgccgcgtgtatagcagttttcgtagtgatacaatcatacaaaagttgccttttgtgagggactatcagttgtgacagcaaatacgatatgatttcaacttcatatagtgttccacatttgatattaaaacatcaatttcggtttctggttttcagtggtgacacgttgtttgtatgcttgtggttgctacttgtgtacttacaagaaaaaaatttagacttacaaatttgcaagttgcaaccacaccaaaatctcaaaaaataaagaatcataagcacccaaaactgatagctacacatatgtgccggtatggattaattgtcgatgcttgggatcgttggatgcaacatacaactctgttctggtgaaaggtcaatttcagatcgtaacatatatcatatcgccaactaattcggccattctttgcacaccacagctagtttaatcgatcaatttgagtcgcacagctagctgcatacgagccatttcgctcttatccaagtagatatggaagaagatgcttatcttaggtagttcatggttcatggagatttgttgctagctaagtcaaggatgtgatcactatcataatcatatcaagtaggagtaacgataaatatattaagaaatccgctctaattatacctccgagcccatatatgccaccaactcgacattgctaataatgagaaggggtaggagatgccgatggacggtggcctaggcgcaaatagagagagggcgagccaaaggataacaataaaagcctattgggagtttagtggggcttctccccctccctcggtttaggagagtttttttcatagcaatcattttttacttttgtttttcctttttctttgttccctatccccggcaatggccttcggctgttgcgttgtaaaaatcaattttttcttcttctaatatagtagcgtgcaattcttttacgcgttcgtgaaaaaggacaacggcagcgtgagcctcctcccaactataccctcatcacataacctatcattattggcatcgttgtgccacctcctcgatcgagctctagcatcagttcgagttgtgatgaacaaaaactttcatgactccatcccccaatccctgcgtcctcatctacaaaggatgtactccatacattcaaaaaaaaccaatcctagatttaaatctggatatacatgtgtatatgtgtccaggtttaattttagaattaagtattttttttagcggacggagtagttgacgagcccacgaaggacactagtggatcggcgagcttgttggagagcttgataatggccttgagcactcatggtcgtggaggtccatcccttctcttaagcagtgccacatggcaggtcgcatgctggggagggaggagatggtaaatgaagcatgacaagtaagaagcatgtatgttttttgaaaatttattttctcaacttgttaactggattagcatgaggccaaaccaccgtcaaatgtgcgtatataggactgataccgccttaagataggtttgagtggggagggactagggtaaattcatccggtttgaagagtttccgtatataaaatgtttttgtctttcatttgtggggcatcaattggactagggcaaaagttaacgaagttatggaacctcttttaccatataaaaaagtattcacttggtaagcacggaagaaaaaaagtttgtcttaccttggtacggttattgaatgctaggtatatatgactccatccattaacattacgatatccatatgtattatagtctcttttattttcttttttttttcagaatgacaagtgcgtcggatcgcaggccaatagctcaatagcaaatttagatcataataacaaggattaagttcacttcagatccctcaatttgtcgcctagtccgatattcatccctgaattgcaataccatatatgatgtgtctctcaactcctaaaactagtgaaaataaaatcccaacaactcctaaaactagtgaaaataaaatcccaagacggtttggacaacggtctcgactgacgtggcacatacatggtgttgatgtggcacttaaaacagaaaaaaaagagattcacatgttaatgagtgtttggttaaaaataacaaaaattgcaatggactcatgccatcactccctccttttcccctattctctccctttcctcctcatcgtcggtgacaacattagtggcagggccggtgaggcgaaggtgcgcgtgagcacgggcgggggcggccgagggcatggagggagttgctcgatgcgacaatgttcttgcgcctggagagctacggcgaggccaaggcatgggtgtggcagaatctctcctacttttgcgccaactacgcgggaggagggtgtcatcacgacaattgggtgtccacggcgcgtgaggccacagagtgcaagcggtggcgactggcggtagcatggagaaggttgtcggcgttgacgcgggaggagggtgtcggtagcgtagtcatgcccttgacgaactcgcggaggtcttcgatgatgccatagtgctcgagctttgcggcgtctggcttcggcgtgacggcggaggggatatgtgggatcgcagggatggaggggacggggaggtcggtagtgaggtgcttgatttggttgactaggaggtcagcctgcttgttggcctccgctgtgatctcctgtgagttggttgtggtctctgagaagatctccttgaacttcttcgccgtctccaacatcattgccaacgagtgcgtggctgcctccgccgtctcccttctcccttactactgctacggctacttggtaccacatggcatgaccgtgccattgacgcccagtcgccacaccagcgccttgctcccatctgtgctaccaagaaaaaaagattgagagaaaaagagagaggggaaggagatgacctgtcactcacaggtgaggtcccccaatatttatatttttatttagaccgagttgtcctgtcatgtgggcctcatgcttgactcaagtcaccgtgtcaactaaaaccgaccactatgctgccgagagaccaaagttaacacggtattaagttgggagacggattatacctgctatttcggttcaggtatgaatttcagactccgcgacaaattgagagacctaaagtgaacttattcctaataacaacccataaacgcctcgttcgagagcgcatgatttaaggtccattcgctgccaaaccaggctaaaccctaaaccctaaaccatacaaatgcccataagcaaggcccatttagaaccatacaaagagaagcccagttacagcatttctaggtccatggaaatagctttgcacctgtgctgattcggttcatgtagcccacaatcttcgatatatgggctgcatgtattgtcaacgttttgcatatgcgcacgatatttttttccctctctctaactctcttccattccccagtcaagacaacaatcacgcctgtcttttgtttcgcaagtaaacgtacggtcctaattaacgattacgatgtgtggtgttcgcttatgcgtcttaattgcgaaaaacctttattttgacgaccttcatggtaatgccattttgttctcttttttttttaaaaaaagaaagtctagcagtgtcactccatatatgcattgaatcatagtagtcatattctgttgcatcatttatatacaaaattccaaatttagaccatatatataactacaaacatgtccaaactaaaatgagagtacagcaagtactaccactatactaaatgttgcgttctgacgtgttgttttttttggcggtttgtctaccgtgaaaaccttttatatcaaagtttctttgaaaattcaaactaaccccctcttaactttataataattaatattcgattaatcatatcataatcatttttcttattttgcatgcaaaacataagctcatcataaactccatatcgaatgcagtctaacacctgtagcagcgtgtagaatttggacattgcaatccaatgaaaacagagcaaaatccgaacgaaattatgaactctgatcgggcccatacatggccgggcgaaacgaaggcagcatggccctccacgagcaaccaagatctggtcactgatgcaacagtagtagtagtagagtaggagagacaatagtacatgtgtttggttacgagtactccgtagtagtccgtactaacacacacatgggtccaattctactgttactgaactggaatactccagctagtggttcaatactgatcacctagcgacagagtaaggtatgggtttatttgtgaggcacatgtaatcagtggcgcccataaggccagcatcatctatatggatccggatccgctacagtcgctactgtgactacaacttattctctccgataaaaaaaaacaaatgtaggactgaatgtgatatatcctaatatgacaaatctagataggtgactgtccacattcgttgttttatgatacatcacattcagaatttgtatttttttatggagggagtaagcgatagcagtgcacatcattggatgtaaatcggaaggtctacattacacattgtactgttcataacactgaagcaaaactactgtttgcaccattactgtaacgtggaatcttgaccgttgataggaaaaacgaacggccaaaattatatgcggtggttaacttgcagttccaactataactgcacttgatatggattcaatcgagatgttccaattataactgcacctgatatgaatccgatctatatgtagctcgtcagtgccaatgttaatatcaactcaactatgatgagtgaatattcatgtgggtagaaagatacatgtatgagttaatgagtagtcgagtatgccatttttaaataaatgacaccggaacccttcaccatcaaacattgtattctcatccttttttcaagagagttataaatagatgaaaagatgttgtaattagcagtcaaaacacgtgtagtaatccacactgtcaaatattttaaaatagagggagtaccatatgcatcaaacaattcaataagccatataatatgaacatgttcatttgacaacccttgaactcttcactttgtttgaaacacatccgaattcaaaagccaggtatttgacaccctccaactttcaaaattattcaatcgaccctctttggtccaaataagttgcatattttttgttgatatggtggttcaataagccaaaacataagataaaaaaggttggccctgcatgttaggtaccacctcatctctcttctccctctctttctttcttgtctcctccccgagcaaatgagattggcaccaatgagcttgagctccaccccccttctcggcgcgttgagtactggcaagcttaacctccaactctgtctcctcaagagccttctcgatcctccataagatcatgatagtgagctcgagcttaagctctccattcctaggcgcctacatctccattagattgcaccgacgtcatttcaagctcctactccctaccgcctctctccaagcttcctttcacattgcctatgtgcacctattctccacacgctgcctcctcctcaagctatgtcgcaccgcaatccacatcgacgccatctcaatgagctccaccgactcgttgtcacacaagctcggtgcaatgattgctcaagcttgagctctaccaccttcgttcttcataagctcgctgtagcagagtttgatctcaagggaggcagagcttgatggactggagtgctcgaggggcttggaagagtcaacatggaggcagttcatcgcctccttccatcgttgcctactcgcactgccttgagcactagatctagaagaagataatctattgcagaggtggatgagaaggagaggtgatcaacaatagtggaggagctatagctcaagctcacctccactgagatcatggggccacaccatgtagattagagggagtaaggtgagagaggaataggaagagaaaatagctaaagtgcactacaagataattgacctaacgtcaccaaattattacaacgaaaaataattcatggcaatatattatactattgcaatgataatttttcagtggcaaataactatattttattgcaacgatttacattcattgttttattcaatatttttgttgcaatagaaaagagctatcgccacaaataacattactgttgcaaaggtatgttctatcgccacaattttaatttttgtgacaatttgcataatacattgttgtgaagttacgtttcactattttttgttgccacgaacaacaaatttgttgtaatgacatgagattcttctctatctctcccccgcttatgtgacatctttgtacaagtgacccaatataccaaaactaggttaaaaccaacgtggtgctagggttgggtggagggggggggggttaatttgtcaattcaacggtagaaagttgcatgatattagatatccggtttcagagttcggagtgcattttaaacaaaccttgatgggtgaaatcttctactcagaactctacaacatcactgattcaccaatgcccccctttaataaaatatggagagaaccaagggaatttttataaagcggatgtgccaaattttcatgtgcagaataatgatttgcatggaaatatccagggatccgatctccacccctagcccagcgttcgactatgttcattgtattttacatgttcataattatagtggggactcactttttaagtacattttgcaatcaatgtgattaattgcagggtcggacatagaataaaaattgactgggggcatgcataactcatattacaagttaattagaaagctaagtgaaactcacaggcatgcataactcatataacaagttagctagaaagctaagtgaaacttcacctcataacaacttataaaaactttgagatattacatgataaaaatcgtccactaactcccctatcagatcatgacaaggatgattagatagagcattgaacctagagagtcatcctcatcacttattgactacacgagagggagatatcattatgtaccgagggagatagagagcagcaggcccgacgtgccacaacttcttcatgggatggagtgcgctgtgcgcaacaacgacgatgatgagcgatcaaggaagtggcgaaggtgaagtgcggcctgtggaagcactacaggtggggcgagatgatgggctcccttgtcttcctgttttctaatccctagtttgtggatttgctagttgggggatcgatagaaggggaacggacgttcgaagcttaaacgcgcacacatttgcgtcacggaaggagcgaaaaaaagggagtggggtccttctttccaattagagtggggcccataggtcatacaattagggacatatctaatgagtgtaactttttactggggtctaaggccccaattggtttgtacgttaaatccgcccctgattaattgtgtcattttctcaagacaaaaaaataaaatggctagtgccgtcttgagcaatagtactcataaaatggaccaccctttgtacagcttaaacctagagtacatgtatatgtatatactactccctccatcccaaaatataacaatttttagccctcaagatttgtctcaaaatataacatcttctccaccaacattttcttcccaatcaatacaactctccaccattcacttttccaacctacctccactactcaaccaatcacaatcctccaccattcacttctacctactttcttaataaccgtgtctaactctaaaaatgtttatattctaggaaggagggagtagtatatgtagattatgcgatctattgacatgagtgctaagcctaacatgatcaccctaatgcggaattcttaggttactgaccgttgtttgaagccattgatgcggttctccctgttcttgtcggtgtagaggtagtagtggtagcagtagcagcgtgagcactggcttgatcccgaaggggtcgccggcgatcacttgcgaggtagtggtggccttccggtcgccacctacactgtccctgaaccaccacacgttctccctccagcgctcaattgatcggatagggttttttttgggattttcggggagaagaaggtcgtgaagagatcgtcatctcaccacgacatcggcctcccctattagtatggcactgagggagatcgggggcaatccaaaatatgaaaagatttggcgctaccgatcaatgcgcgtaatcacgtaattatggaaattgaatcgcattaatcccgtaggcactgggtggaaaacggccatccgagatttcctctcgatttccatgccgagagataaactttcctaacagtatgtagggcttgtttggattagcttctagcaactacaacttctcacaaaatctttaactcctacaaatcatcactcagattttaagaatttgtggttgtaaaatttagaaaataaactagaatcaaaagctaaaaatctcaagttctttggatttttagactaccaactaacaattcaaacttaaactcccaagcagggtcatatactactatatagtatgcatttgagagtagcagcacgccgtaggacccagcagcaactacccatacattgacattagagtattcgacagcttcctaattagtatttaataacgtacgatgaaacaacgacctgattgtttcttggaaataatcgctctttttcttggttggcttggctagctgtttaccgctctctccgtcctattttaaatgtaattataagttaccgtgttcaattttaatcgtttattttatttaatttttttataattagtatttttgttattatgagatgataaaatatgaatagtaatttatacatgacttatgtttttaattttttttagaaaattttaattaagacagacggttaaagttgtgtacggaaaatcataactgtacttaattaaaataggacggaggaagtaaaattaatatatacatgaggtcgtccaagctagcgaccgctaccttgtgattgattgacatgtaataccaatttataggttatttaactaacttataattaatgtttatattgaacatgtatattacaactttacaactcgtatcaacttggtctcgctgtttccactaaaaaaatttgagcagcaccgataagatggttgtgaatcttttctctaattatctgtgagctaagcttgatagctagatagctagataggacaactcgtgattatataaaatttccatatgttagcgtggacctataaccgttcaataagccacttgttttacgtaataaaaaacaaaagccacttgttcgatcctcttgtcgtgaatgcgtgcacaaaactcgccggctgcctggcacattttcacccagttatagttattattgaggactaattgaatgattgtattttgctatggataaaataaatattataatattatataaaataaataaaacatatttttatgaaatgtattgtctataagtttgtataagtttatcgtagtgaatgttcacattaatttgattttatatgccactaatttaattgctttaataataagaagtttaaaggaataatttataaaactataacaggagtgatcgagttgacaaattcactaataacactactaccttcttctaaaacagtatagatatttattttcaaactatgtactaatctgtagctatagagagagtgcatgcctttgatatataaaaagaccatttcttcctcgtgtgtcttacgaagtgcagcagttgagtactgtgaaggtcgaggcaaagttgatgtcccgttgtcctgaagattgtccctttagcaaaatagcaatccaatcagcgttgtcttgttgtcaagcagacaaatttaatcatgtggacaagaagaagagatggtgatgaacaatacggtaggcagccatcaggaaaattaatttattcgtcttatatcagaaaaaaaaagtgagaaagatatctgtggaacaacgatggtgaagatagctctcggactgatcggttaattgatcgttcaggctttattattggtatctctattcctaaaaagataggatatatacttaggctgcgttccttacattgggttgggaacattacccccaagcacgaaaaacggagcagttcattagcacgtgattaattaagtatttgttaatttattttcaaaaatggattaatataattttttaagcaactttcgtatagaaactttttataaaaaacgcatcgtttagccgtttaaaaaacatgcgcgcggaaaacgaggacatgggttggtaaccccttgagccgaacacagccttactaaggaatttagtattaattatgtaaagagaaaaaaggttaatcgttcaggctttattgttggtatctctatttctaaacctaaaaagataggatatatactcgggaaggaatttagtgtcgtttatattaaaaaaaagatatacacttaggaaggaatttaatatcaattattaaaagaggaaaaatggtgagaaaattagtgctaaaggaaatagaagattggccaactggagcaccttgtagttccccaccatcagaccacgatgtcattaccggtatttatggcgaaagtgtatgtaaaacatggctaatgaataagaaataattcctccgattcacgatgtaatactttatagcattgcccagattcattaacatctatatgaatatagacaatgctagaaaatcttataaattacaatatgaaacggagggagtgctacttattgtgcttgctcggcggcgtcgccaggtagggtttacattaccggttgatcactaaatttcgagccccattagtatcacggttttcaataaatttcgatcggttttcgataaatttcaactgaatctactgtttaaccttcgaaattccaatcgaaagttaattccgagccgtgtcgaaacgttgaaatttcacggaattcgaccggttttcgtcggaattgacgctaggtccgttaatatagaagaatttgcatgaatcaaatagttaagaaaaaaaggttattaattttgaatttgcaaaaagaaaagttcatgtacatgatcttgaggacacgcatcccaaaattcatgcggtttgaatctagtctcacatttccgtgtttcttccaaaactgaattcttgtgtgctgggtaggttttgaaatggactgaattgtctatacacgtagcacgtagccatcaaaccttcgtggcccgtacgtctagtatgcaatgaaaatggtaacacgtatatatttttaactcgtggttgaaatttgcaaaccacggcggacaccatcaatctttttctcttttaccattttgcttacgtgtcagcgtgcattgtgtatgcctaactacaaaacgacgaattaaatcaaacaaaatttggacgaaaatgacagcgccactatttttatttactacgacgcttaggtaaaatcaaaccggtggcaaaatacttgtagcaattaattacgccaatggcacagtttgcatataaattgcgagacgaatcttttgagcctaattacgtcattatttgacaataagatgctacagtaaccatttgctaataacggattaattaggtctaatagatttatctcgcagtttacaggcgaaatctgtaatttgttttgttattagtttacgtttaatactttaaatgtgtgtccgtatacgttaaattttattttgccaaaacagctacacaaatcaaacaaaattttgacgaaaatgacagcgccactatttttatttaccacgacgcttgggtaaaatcaaaccggtggcaaaatacttgtacgaagtagcaattaattaaatctgtccctgccgcttacttaataactaaacgctgcgatttatgattccatgcgtgacgtcacgccttagccgctcgcgccttcacctcctccacgaacgcctccacgtggcggtccgacgagccgccggccgccacggccgcccgcgcggcggcgctccacgctgcggcgctggaccgcatcgcgccggcgtcgggccccgccacggcggcgtcgacggcgtcgcgcacggcgccgcgccgcacggcgcgcggaggcggacgcccatcccgagctcgtcgacgaggaacatggcgtcggtgcactggtccccccactgcgggaacgccaccaccggcacccccgcggcgaccgtttccgcgtcgaagttcaaccccagtgcgtgaagaagcacgccacggcggggtggacgagcacttgctcctgggggctccatggcaccaccatgccgcggccggcgacggcgtcgaggaacccctccggcagcagcgcgcggctgtccggccgcaccacccagaggaacggccggccggtggaggcgagcccgtgcgccatctccgccacctcgccggcggacagcaccacgacgctgccgagcgacgcgtacacgacggagcgcggagggtgttcgtccagccacccgacgcagtcgtccgctgccctgatcatgtcgccgcgcaccgcggcgtcgccctccagctcgatcagcgggccgacggggatgagcggcgggcggngcggcgacgtggccacgcgcgtgagcgcgtccgccacgtgccgctccagctcggtgaaggagttgacacacacccacgtccccttgtcgatggtgcggatctgctgctgtatcgcctccgtgaggctcatgtaggggttcgacgggaggaggaaggacggcacgtcggcgaccgacatcgccgggagccccggcagcgtgagccgcgcgtcgaggtcgtcctcgggggggaactcgacgaggccgtggacgcggtggtagtagagcgagaacacggcgcacgactgcacccacagcacggccgacaggatgccggcggnngcggngacnnnnaccgnnnccacgggggattggaaacgggttcccgacgacgcacgccaccggccgccccgccgcctcctgccgcgcgagcagctcggcgaacgccgccggcccggccgtcccgaggtgccgcatcagctcgtcgaggtcgctcccgtcgaagccatcctccaagaactcgaacctgatccggccgccgccgagcggcacgccgtcgccgccgaccgacacgccggacgactccacgagcttggcgccgatggcggacgtcgacgagaacgtcacgacgaggcccttcgccgcgatgcgcttggcgagccggagcatcgggttgacgtggccctgcccggggaagcagatgaggagcaggtgcggcgcgccgccgctcgccgccgccgccgccgccgccgtcaccgtggccgccgcggcttcctcgcccatggctaagcaagctaacttagctagctgcgagctcactattttcttctcgccttttctccgagcagctggcgtgcagtgatcgatctctcgatagctttggtctttgatactgtggcaagtgagatgaggcaaccaaatttataccaaaaatttgtgacttgcagatgaacacgatgacgtctgacgtggcgtcacacatgtaaatacaaggcagcggtttatgggctacctattttattttctttacatttaaaattgaatactatctggtcccgctgtatccaaagataaacgtgagtgtaggggaaaaaaagataattgttaattatcatacaattaaagcttaggccattttgtgtatcaatagtcatgaccctattaaaaacaaatagttcaaattaaagaagatattgtgggtttttttttttggttgtgtatcaatttgtcattaatgtgtgcaatgttagattattgtagttgcaggaatagactacgagtggctagtcactgtctcattgttttggtaaagggacatggcaccaaaaaaataatctactactatagctaagggcccatttgaatcgtaggaatgaaaaaacggaggaataagaaaaatataggattatgataggaatgtaagtgtaaaacagaggattgcaaaacacaggaatgatcgtttgattggaccacaggaaaaacacaggaatcggataagagagatagactcaaaggatttttaccaagaggttggacctcttgctaagtttcctccaaaacctatatgcaacaagccattccataggaattttgtaggatttggaaaacttcaatcctttaaatcaaagagctatataggaaaattttctttagaatttcaatcctatgaaatgtcttcataattcctttgattcaaacgggccctaattaattagatgcacaactgcagcaactgtcaggacatccatgctgttttgctgatattactgtcacattgagctgggtgtttatgatagacattttagaatggatccttaaaattttatcgggttttaaaattaatttgtttaatagaaaaacattttcaccatccaaaataaatatactgccagatacacgcatctgctttcttcacaaaaactgaatttagttttaataaccgtcctaactattccctatgtaaaaaatactctatatatatatatatatatatatatatatatatatatcttatacatattaataaaaataaaaaatatatcttcaactttcttaaactccaatacatttgtcctctaccttctcagatcaacctccaaaatattatctcctactatctcaaacttaatgtattaattgcttttaaaaaaagatcttcatagaacaaatggaggacagaaaaaaataaagtttttttttagggaccaaggaagtactactctataattaagtaactgtcagaagtaaatgcaagccgttcttcttttcactcgaaggagactgcagactattggagtataagggggtgtttacatgcaggggcgaaaagttttaccatgtcacatcagatatacgaacacatatttgaagtattaaatatggtctaataacaaaataaattatagatttcacttgtaacctgcgagacaaaattattaagcctaattaatctatcattagcaaatgtttactgtagcacatcattatcaaatcatagagcaattagacttaaaagattcatctcgcaaattagtcgtaatctatgcaattagttattttttagtctatatttaatacttcatgcaggtgttcaaacgttcgatgtaacagggtgaaaaatttcgagatgggatctaaacaggcctaagtacagcggaaagaagcatgtgcttgtttcccaacttgaaggacctcattaaattcaaatcaagtggtacttcggcggtcatgctatctcggtcaagcgaaagggcacatagttagattgacctgagtaactcctttaaatcctaaatcctaagtttaaatccttatagaaacgaatgtcagctgattagattgtttgatagctaaattatcaattcaaaaggctgtatatatatagttggatatagaaacctatccttctgttaaaaaaaaatctcgttcaaaaaagacttgattttttcttcacatctgacgcataccaaataaaaacaaaaaaaaaattactcatcacactgttagattccaaatttccaatagatttgtcacacactttcttaaactctaatatttttatatttatcccctactatttcaaacttactagtacgtattaattgctttaaaaattaagtaactgtcagaagtaaatataaccctttttttacatgcagactgcaggcatgtgtgagggaatcctttggggaaccggtttctagaagggcgatggagaagctagcaaagttgctattggatccactagtttcggcatgaagagcgacctcacgagctgactgaaaatttgggccgactcgattggctgtggaagaggataaaggatacgtggatgcgagacgccctcttttgtgttctttttagagttaattttagtttgggccaccttttattaccgatgtttcgctttagatcatcttaggactaatgtttttattttggaccgggtatttttacctttgtttcacattggaccaccctcactcttttatccatctacatccaacttgtaatatgtcgaagaaatagtcttacatatagctgtggtagttcattgacgagtagaagacggcgtaatcgagatcgttcatatgcttgagaagagagttgggtggtccaaagtgaaacaaaggtaagtttatccagtacaaagtgaaaatattgcttaaagggtagtccaaagtgaaacataggtaacaaaaggtggctcgaagtgaaatttactcttctttttattttttttcctgtacacagggagtacaccctagaccttaaaaaaagaaccttgctatacgtccgatttatttgttcgaccagtgtacgactaaacggaacagctcggcgcgtgatggcgtgaggcaagagcatgggttggtcatacggacatcgacgccatgcacttgcgtgcgttacagtcgtacaagagtcggacaaagtagtcttgtgtatagcatttttctaaaaaaaattacttcatccatttcaaagtataaaaagtctggacataaatgagatatttcgtaggacttcgaatttggacataaatgttccatccgattgtagatccttatattttaaaatggtggtagtaaatcttagctataaatttaaacatgtgatc

SEQ ID NO: 7643 - DNA, 9347 bp, Oryza sativa
aacatgcaaagatgccacatcatcatccactaattaacaagatgccacatcatcatccactaccaatcatcacatttaaatatcatgcaaacatgttatatctttatagtttttataatttaagagctttcaaatacaaacatgttaaattatcatccaacataatttacataatgtttcaatatatatctttattatgttttatgatatcctatatagttttatagttcatcctcatttagttagtgcttaaatgattaatctatggtccaaattatctttatcattttttcctctaattaagtcatatcacatcaattgtttttagcctttagatgattaatctactttccaaaccatctccttatttttcttcttccaaaaagtcataccaccttactctttacgtttgaatcaccattgtacatactatttaaatttaaattatcataaaccacattaacttacttaatctgatgttatctagctatcttacaacaggttatttttttttattgttatcatactaaatttcccgcagcaatgcgcgaggtttcacctatttttttaccacttctttaccactgcaccccattgtccaaatcagtgccacgagatacgatatcaggaaggcagtaacaatgattgaacacatttttcgttgatagttaagaaattcgtaggaagtgccagtaataatgatctagaaagcattaagcatcactgccataaaattcacaagtttgtaagataacatagcatgtcaaacatcacacaggaaacagtaccagtaaatttcatagagctccccagcattaatcgatatttagaacaacaattcagtatacggcaggagtcatgattttacatgcccgtgcttcgaactgtccaacattcgctctctttcctgcatcccagcctttgaagaccttcatctagaccccattgagagtgatcacaattttccgggaggaagcattgtcacgatgttcacagagccatataccctacacaaaataagtccatgaaataagtgctcaaaatttaagaagtgtgctctatgatctagacgggttttataattagttattttgctaggttacagctttgcaccggatattatcactgaaactatgcctgaatatgggatacaaagcaccgcattgccttaaaagataagtttaaactcgcgtgcaacataatcaacacaaatttcacatgcacgattgcatggtctcctaaaacttcatgacaactttttatctcctgtatatagattcgagaacttcatgatgaacttaaggtcgctatataaaacaacgaaacatttagtacttcaggtttaacctagtggctaaagtggtacttgttaggctctcaaaccatagagacaagtttatttggaaagttaacaaaaccagaatattttcggttagctccatgtataaatgattatgtatgaggatgtagtgccaaggaaggatttaatttggaagcttagaattcatttgaaaaacaaaatcttcctctggtatttaaagaagggagtgattctcacgaaggacaatctaacaaaaagaaattggaagggcagcactaagtgttgtttttgtaaccacaatgagacgatacaacatctcttctttgattttcatgtggctagatttgtttggagtaccctttttataacatttgggataaatccgtctaacaatgtttctaatatgtttgggatttggctaaagggtttacaatctaggctaaagcaccaaatctttatagggattgcggcgttgttgtgggcaatgtggatttgcagaaatgatgtggtcttcgacggctccaattttaactcttacttgcaggttattttcagggggacatactgggctcgacaatggttcttattgtgtaaagaagatgagcgtgatgtgatgaatgaaggatgcaaactgttagagacatctgtcatgcatttctttggtaaagatggatggaacatgagaaagcggttaaaggagttatgtggtcgttggtttgtttgggaagtcttttcactttgaaaggctttggagtctttgtgctcttttagttttataaattcccattatctaaaaatttagtactgcaggttgacaacaaaataaccagaaaataaaggatagtcaattgtgaaaatgatatcctatatgtttctattacctgccaagtgcccatattgagatgcccatcagttatagggatcctgaagcaatgcaaaagaagaatctaatttaatattttgttggctcacttgggagaaaattgacatggggaaaagaatgtagggattagggaacacatacgtcagggcacaaccaaacattgatgatttaatatgtgctggcatgtcatcaggtcctgcaatttgaacagcacagttatgactattgactaatatggcctgatctgaagaatagtacagtcttgactcttaacaaatcaaaaaaccgtatgctagagcaatttaataccatctgctactagttcagtacagcctaactggataccaaaagtaacctcttgtttctcaaaaaaaaaaaaaggaagtaaccacttaaataaccttctagagtgtgcttccaaggagcagatcggccctgaaaatagtgaacacacaatgaagtggctcttacatgatcccttgtttgatcatgatcaaagacaagacaaattgcaaccactgacctctggtacaattcggttaaggaaagtttcggtgtcagcttgtacatcggagtcatagttctcattgatggttagggaagcgcttgtgtgctgcactgtatagtgaaaaaaaaatcaatactacaatcgtacattcgtacattgaaaacatgtgtttacttggacatgcttatcagcttacgaacatgcatataattgacattgtcattactttaaagaaaatgaggatggtctattttcttatgatgccattaattgatgttgaacttatattacttccttgtataaattggttcacacggattcaaaacgattccagtcaaccacaaatttattctctcaagtcaatcccatgcacaagataaaaacaagtttttaacatatcatcatatcagaatagtttgctaaaaccctcgcaataattaaatcccacttaggccatattcggttaatccctaagagagagggagggattggaggggaataacttcacaccccctcaatccccttcaaaccgaacaaggcctgacggatctgaacaagcacgcatcacatcagcatcagcatgttcaggggaatttacctacaccgtatgcggttatccataaagtactttcagaaaattgcctagcacagcaatcgatcaacaacaaaatcgagctatctaagcaagagcgatgatgaatgaatgaaccgatcatgagttgagttgagtgtgtgcatctacatacagaacagatgcgccaagccgcacttgaacccggacaggtcgccctcaatctccctcagaatctgcaaaaggtctcagtcaagcaaagcgctggagcaaagagatgtacggacatggcgacggggagggagggagagaccttgggggtgatgaggtggcatccccggcgctgggcggggatgacgattgtcttctgcgcccacttggcggccatggaggagtgcgccgcgggcgggccggcgacggccaggccaggggatgcgaccggacggcgcgcaacggcggcggcgggttgtttcgcagtcgccggcggggagcagcgagcgagcggtaatggactggtggtggtggtggtgggccccgcgctctggaagcttcggatgggtgaatgccaacgcactagcattcgaggccgtcggatggatgatcaacgcttcacagaattcctggagaaaggtgcggaaaaagaaaaatactaaaatgagtaaatttcacgggattcctgtatgtttaaatccttagctctaattttatatttgagttataaatgttcacattttgtgattaggatcccgtttgtttctactgaaaaagtggatgaaaatttgagtactcatgacacgttttttaaactactaaacgatgtgtttcatacaaaaagttgctctaaaatattatattaatctattataaagtttataataattaaaacttaattaatcacttatttacagaagaaaagaacaccacctaaattgatatcatttactatatttcattttaaattcgttgttctatgataaatttaattttatgatacatcctattaaatacgtagttctataataatttaaccaaagtacacgtagtttttatggaatttacctttctcaaaagaaataatgtccgagcacgatgggccgcaatcttggcccagtcacagtaaaaaaaaatctcgtaaaattgagggggttttacgcattttttggaaaaaaatagcagtagccgcagcggaagcggacagcagcatcacaatcagcgagatgcaggcggcgctcctactcccagcgcggccgtcggcggcggcgccgcctacgctcttgcggcggggggcggcttctgcgtcctccgcgcgcgctcccactcccctccctgcggggcgcctcagcggcggcgtgctgagcgctgtgcggcgccttaccgtggcggcggcggggtcgtcgtcgtcgtcgtcgggccctctctacccgacgcctccccccaccgagcaggacatcgagcgggccaagttcgagcaggtgcttcgctaatgccgcacccccctttgatctgtctgtgcctggtagaggtgcctctgcttgaagtagggttaatcgtgtgttcgctgatattctcgagaaaactcatgttgctgtaccacttggggattggggatgtatctagtgttggattatgtagtggtcgcgtgttttccgatgtgcatttgggtatcatgaggtttagggttcaggcatcgagcgattagtaatctgatgtctctaagacagggaattgttacaattaagcgaaggtaatgatttttttagagatatcgtctgtaagcgactcgttctcttttctgtatattgtgatgacgttaatcgcgcataattgttggattcacttctgttagtttatcaaccttgctgcattaagttttccttatcgtgtgtcctgtcacatctattgctttctgattgaagtctttgtgaagcatctggttaaacaatataaatatataatgtgtcattcttcgctaggatatgatttataccttttggttactctattatcctaaagacacggcatcattggcatacttcgaattttgataccagcataccaccacttcttcctacttgtataacagaataccttcctgattatgaagctacgccaaggccatctttttgccttttagtttgatatgccatactcaatttggtttgtaaagatatttaatattcttgatggaccttgttggttaaccttcatgatatttttttttaagattgggaatttgctatttcttcatgcttgagaattttacataataatgtatacgccacaccttttaacttctgtatatgcttgttttagcctaattgacatttttttttgcccatttccgtggagtaaatggcaggttgtcaagagactggggaaaacagcgaggtatttcaagaatttgggtactcttgggttctggtcccagttggtgtccacagttgtttccgctggaattttgtcattttctacagttattactgggaaggtgacagcaccttttacattctatgcaactgctgctggtattgccgcgggttttatttcagtcttctggtcatttggttacatccgcctttctgaaagacttagaaaaacagcaagtgaacctgctaaggtactctctttctcaaccccattccctgttttataatgtctcaacactgcccttaactcattttcgtacttgtctgacttctattggacggctgaactggtgctttcacataagtgtgttatatgtctgcttttggagttatatattttaggtggttattttgtacggcaagtttgatattcttcttatttgcctttttggtaataaaataaaactgtgaattgctttccaggctcctccacgtgctgatgtaattagaagtctgaaaaatggcattgtgctcaatatgctcgggatgggtgctgcagttctcggcatgcaagcaactgttggggctttggtagcgaaggctcttactacctctgcagtaccttactatcaagcaacttcccctggtcaaagtcctgttttggctctagatgttttcctagttcaggtatttgatttgcacatatcctttctccccttgaaccattttctctccaaattttcagttgaaaataagcaccatggttcactctcatttttctgcattcaacattctggtgctggttttcaagtacttaactcatttctactaggaagtaatacgtttgtacacttgcagtttttttaagggcccctttgaaatggaggattggcaaagattcatttgcctaacgaattttcctatagagccctttgatccataggaaaacttccataagataggaaaacttccatagaatagctttcctatggtcaattccataggaaaataagcaagaggttagacctcttgtaaaactttcctttggttgagttttttctgtggtgcaatcaaagggcttcttgtgctctcaattcctgtaggattgaaaaaacatactaattcaattcctgcgtttgccctattcctacaattttcctatcttgcctttcaagggggaacctaaacgacatatatttgtttatcttggtaaagaacgctcactgagaggttcatgtttacatgatattctatactatcatctactttaaatgatttgtctgattctatatatttttattaacgttaaggatcatgtatgtgtaatagcaacgagataaatccagcgtactatgcctcactctgaataacaacaaaatataactaccctaaatatttccaaactttccctgcttttaatcatataatccttcttccatgttgagtagaaacttatattataaccatgttatcatttgctatgatggaaaatgaactactgaattgttgtttttggtcatcattgcacactccagtttatgatctgacccgttgtagtgccattaatcatgttgaacaatcatgatacgcaggcttcagcgaacatcatcctgtcgcatttccttggcctggcgagctccctggagttgctgcgctccgtggccatccctccagcagaagctgctgcggcgtgagcatatcagcgcatatgccaaaggcaagggctcccgttgatcatcttgctcttcatttgctgcttcgggctttggtattcgctaggagtagcaccgctcgtccgcctgtatgtttcttgtccagacaaaatttaaaaaaaatctagctttcactgcgtaaatttcatcttgcttgatgctgagtagcagcaggttcacatgaacagcagtacaccggggagctggtggtggtacacgtacggtaagcacacaggctttacgagttgaatttgtgagcgtacaatcgctaaggttgggccgagttgttgggtggtggcactgctcaccaggctgcaggctacggcacgggtggaccatggaatgggctgggccctgctcccgcccgtgcgactgtgtcctccccagcgcagcacgagcggcggttgcgctcacgccctagagtagaaatcaatgaaacccatgatgcccccccccccccccccccaaagcgaaagaaaattagtaccactacagtactaggagtatgtgttgaggaatcaggaaacttgacatgttgctaaatgacccagtttatctaggagtacttaattttgaagagtccgtcgtgtcaaaaataattggaagagtccgtacacatactagtggttgtgggtttgctctttgtacacataaatgtgttgcactgttgcttgtttggtgcctccaacgattttgcagtggttatatagtagtagcactactccgtctattgttagcatgcacttccaattatgcaccttgacaatccaaacagttgtttaaattaaaattcaaaatttcattgtactacacgtactactcttaaatataaggtgttagagaaaggtacataaggagattatcgccctcattggatggcaaatgctttggctgataagccatttaagcaaaataagctaaccaatttgtattgaagtttggctgaattggaggtagctttggctgatcagccaaagtatttggccaaccgatgaggccgtataagaggatgttataattagttgagaaaataaaataaataaagaattaatatagtaaaagattatgattgattgagaaagatgagtgctagtccctttaaatttgactaagtttatagaaaaatatactaatattttcaatacaaaacaaacatattatcaaaatatattcgatactaaattcaataaaactaatttgatgttgtagatgctgctaatttttctataaacctagttaaacctaaaaactttaacccagaaaaatgttaaacaaatatattactaactgcactctactgtgtccgtttgtccgctcgcgggggcgccggaatctctccgctctccaccacaggcagacacacacacggcacccctccctccgcccgaccacgcccaacacgtccgctcccgcagactccacaaccgcagttcagttcagttcagttcacgcacgcacgcgctgacgcgcccgtacaccaccagcccggccggggagagagagaaatcccgagagaaaacgagaatatcccgcggcgtcggcagatcggcagcgggtggttgagctggtactagtacgactagtcgtcagtggagtgccggcacgtacggattggaggcagacagaccgggtcgactcacctcataatcatttctttcaaaaaatctgcagagatcgtggctgtccgtcttgtagtgagaagcaaaaaaacggtgagattcgattcgcggctttggttggttggttggttggttggttagctactgcaaaaatcacaaaacaaaccggtctccggaagttgcaaggaagctgcgaaacgggtggctgctctggttgtatagtactcccctggatctcacgcacaaatttatgggcgtgtttagttcacactaaaattgaaaatttatttgaaattgaaacgatttgacggaaaagttgaaagtttatgtgtgtatgaaagtttggatgtgatggaaaagttggaag

SEQ ID NO: 7644 - DNA, 1746 bp, Oryza sativa
  unsure (1)..(1746): unsure at all n locations
attcgagctcggtacccctatctggatcccaaatgattttgtgagcatcacggtggtgtcactgtttctgctaattgtaagctgtagcttctctgacctaacatagtcatgtaatctcagagtatcgcagcaggagaaagagcggaggagaaggtgggcccaacgaagaacatcctcaaaaccagataaaaaggagcctctggaggtagaagataaagacatcaaacagaaggcagagaatgaagaagatgaggagagcgaggagacccatactatgcctggcatgctccctaccaatgttatcgaaatgcttgcagcacgtgagaagtatgtgtacttcccttgcaccgtattcagtttttttttgttttttttttttcaattttgcggacttaattggttactgtcgtccttttctccttcaggcaaaccttctcatctgactccgaggaagagataacaaatcagaaggttcagaaaaggaagaagcggttgaaatcttccgggtacttttttcatgtcttgcagtctcatatgaattatgtggaaatgttacttatgctagttcttttgccaatgtttgtcaggcctgaaacaattctgttgaaagacgttcgctcgacacagcatgtgaagaatgcccttgctttcctggagcaaaggaaaaaccaggtgccaagatccaatgcagttttaaagaacgcgaacaaagctttgcgcctcctttcatcgaagggcaattttttgagttgaatatggtaattgcgagagcaaaggattttctcaatttgctgttaggtatgtgcttcggaagacatttatgtttcagagggatggtcttttttgtgcttttatttgagatgaattggctttcacatcccaggcgcacaacgggcatatcgatgagcatgaaactgtacaatacgaatgtttgcaaatgtaatatgtatggtgcgtcagtatttgacaattctttgggcatgagtaatttcttatatggaatattattgttcattacttctttgctaaagaaaatgggaattgttcagttaaacccgttgacatgaattatttggaaacttagcaaccaatcaaatgaggatggcatggacatccggaggtttgcatccacatgatgttaattttacttctgacttcaattatttttcaactcgtgtaatattaatttgtactccatctgtccctaaatatttgatgccgttgacttttttaaagatgtttaactgttagttttattaaaaagtttaggtaattattaattcttttcctatcatttgatttattgttaaatatacttttatatatacatatagttttacatatttcacaaaagtttttgaataagacgaatagtcaaatatatttaaaaaagtcaacggcatcaaatatttagggacagatggagtaatattattggtgagcggggtccccttgtttttggccccaggatttccaaaccaccttcagggtgtacttaacttggttggccgtgaaccaaatttgcttaaaataaaattcttttctaaaaacccctaattaagctaccaaaatcttcagctcattttccatttgtttatacagcatcaggatatattatgccggccgcggctagatgatgtctacaccgtagggtgcatgtgccggccgcaccacccacaggttttatctgatgccgtgaaggtcantgtgaggcangcgccattgcaccgactcgaacacacgaac

SEQ ID NO: 7645 - DNA, 11006 bp, Oryza sativa
aaatttaactagattggatatttagttatgctgtgtgttcaccaacaagcgcgggccgagcgacagagacatatgctatcctccaacagtagcatagctatgtactcgctccatttcagtttaaaagaggtttttgacttggctcacaatcaaactactttaagtttaactaaatttatagcaaaaagtagtaacattttaaacccaagataaatttattataaaaatatattcaattattgatttgatgaaactaagttagtatcgtaaatattactatatttatctataaacttagccaaacttaaaacagtttgactttgactaaagttaaaacgtcttataacctgaaacgaagagagtatttttaaaaccacaggaggggaaaagagaagattgagaaaatacgcaaaatgaggtgagccattagcacatgattaattgagtattaattattttaaactttaaaaataggttaataagattttttaaagcaaaattcattttttttaaaaaaacacaccgtttagtagttcaggaaacgtgtgtgcggaaaacgaaacaaactctctctctccggctgccgaaggcagcctaacaagtttgaatgtttattatccattttcagtttttttttaaacattaaggttttactacaccagcgaataatctttttataggtcgtataaattgataacctcatacataagtggatttgcgggttagccacttatgttcatcagtgaataatctttttatacatcgaataaattgataatccgatatataagtgaatttgtgggttagtcgttgggtgagccaccacccggctctgccactataaaatctcccgaggaagatgacgaggagtcagtcaacagttgactagctgttcgattcggccatggccaccgagctcactgagtacttgctgctcctgccgcttctcgtcgtaccgctcctctacctcgcggcgtcgtcgtcgcggaggtcggggaggctgcggctgccgccggggccgtgggcgctgccggtgatcggccacctgcaccacctcgccctcgccggcgcgcccacgcaccgcgccatgcgcgacatggcgcggcgccacggcccgctcatgctgctccgcttctgcgagctccccgtggtggtggcctcctcgccggacgccgcccgcgagatcatgaggacgcacgacgtcgcgttcgcgtcgcggccgatcgggccgatgctgcggctcgtgttccagggcgccgagggcgtgatcttcgcgccctacggcgacgggtggaggcagctccgcaagatctgcaccgtcgagctcctcagccaccgccgcgtccactccttccgccccgtccgcgcggacgagctcggccgcctcctccgcgccgtggcggatcaggccgcgtcgtcgtcgtcctcgccggtgaacctcaccgggatgatctccgccttcgtcgcggactccacggtgcgcgccatcatcggcagccggagcaggcaccgcgacacgttcctgcggctagtggaggacgggctcaagatcatgccggggatgagcttgccggacctgttcccctcgtcgcgcctcgccatgctcctcagccgcgtgcccgccaagatcgagcgccgccgccgcggcatgatgggcttcatcgacaccatcatccaggaacaccaggagagcagagccgccgccgaagacgaggaccttctcgacgtgctcttgaggctccagaaagacatggactcccagtatcccctcaccaccatgaacatcaaatccatcttgatcgtaagctctcctccccgaactccggctacttccccctcgtcaaaaacgaaatcctcttcatgtaattcgctcgaatccaggacatgttcggcgcgggcagcgagacgtcagcgacgacgctgcagtgggcgatggcggagctgatgcgtaacccggcggtgatgcgccgggcgcaggacgaggtgcggcgagagctcgccgtcgccggcaacgacagggtaaccgaggacaccctcccgagcctccactacctccggctggtcatcaaggagacgctccggctccacccgccggcgccgctgctcctgccgcgggagtgcggcggcgcgtgcaaggtgttcggctacgacgtgccggccggcacgatggtgctcgtgaacgcgtgggcgatcggccgggacgcggcggcgtggggcgccgcggcggaggagttctcgccggagaggttcgagcggtgcgagagggacttcaggggggcggacttcgagctcatcccgttcggcgccgggaggaggatctgccccggcatggcgttcgggctggcgcacgtcgagctcgcgctcgccgcgctgctgttccacttcgactggaggctgccgggagggatggccgccggcgagatggacatgacggaggcggccgggatcacggtgcgccgccgttcggacctactggtgttcgccgtgccccgtgtccccgtgccagcgcagtagacagctggtgttatcttatctaagccaatatgagtaatcgcaattaatggcagaatttaccgataatggccgtctttagattattttttttctaaaaaggtcacatcgaatgttggacacatgtatggagcattaaacatagaagaaaaaaatcaattgcatagtttgcatgtaaattgtgagacgaatcttttgagcctaaatataccatgatttgacaatgtgatgatacagtaaacatttaataataacagattaattaaacttaataaattcgtcctgcagtttacaagcgaaatctgtattttgttttgttattaaactatatttaatattttaaatgtgtgtacgaatacttaaaaagatttggcccagcaactaaacacagccaatttcatgtgagcagtagtcaaatggtctccttgattaccgtcattagtcaaaatcgcagttcacatcatcacatattcacatggcgcgaaagattacgacacgctaccaattaccaaacccccaaacactttcccccctcaaagccaaacaatgattgaggcagccatggccggcggcgccatgccgctggtcgtgctgctccttgccaccatcccgctcctgttcttcaccatcaagcgctcggcgcagcgtcgtggcggcggcggcggcggcgaggggaggctcccgccggggccgtgggcgctgcctgtcatcggccacctgcaccacctcgccggcgacctcccgcaccgcgccctgagcgccctggcgcggcgccacggcgcgctcatgctgctccgcctcggcgaggtccaggccgtggtcgcctcctccccggacgccgcccgcgatatcatgaggacccacgacgccgcgttcgcgtcgcggccgctgagcccgatgcagcagctcgcgtacggccgggacgccgagggcgtcatcttcgcgccctacggcgacgggtggcgccacctccgcaagatctgcaccgccgagctcctcagcgcccgccgcgtccagtccttccgccccgtccgcgaggccgagctcggccgcctcctccgctccgtggccgaagccacctcgtcttcctcctccgcctcgctggtcaacctcaccgagctgatctccgccttcgtcgccgactccacggtgcgcgccatcatcggcagccggttcgagcaccgcgacgcatacctgcggatgctccaggacgggctcaagatcgtccccgggatgacgctgccggacctcttcccgtcctcccgcctcgcgctgttcctcagccgcgttcccggccggatcgagcaccaccgccaagggatgcaacggttcatcgacgccatcatcgtcgagcaccaggagaagcgcgccgccgccgccgccaacgacgacgacgacgaagacgaagacttcctcgacgtgctcttgaagctccaaaaggagatgggctcccaacacccgctcaccacggctaacatcaaaaccgtcatgctggtaatcaagctctccctctctctatctcaaaaaccttcgtgttacttgcagagtccctgatcatggatcacttcccatgtttcatgatcctaggacatgttcggcgccggcagcgagtcgtcggcgacggtgctgcagtggacgatggcggagctgatgcgaaacccaagggtcatgcagaaggcacaagatgaggtccggcgagcactcgccgggcatgacaaggtgacagagccaaacttgaccaacctaccctacctacgactagtcatcaaggagacactccggctacacccacccgcgccattgctactgccacgcaaatgcggaagcacgtgcaagatacttggatttgacgtacctgagggggtcatggtgatcgtgaacgcgtgggcgattggtagggacctgacgtattgggataagcctgaggagttcgtgcctgagaggtttgaacacaacgggagggatttcaagggaatggacttcgagttcataccgtttggagctggacgaaggatatgccctggcatcacattcgggatggcgcatgttgagcttgttctctctgcacttctgtaccactttgactgggagcttccacaagggatggcggcaaaggatctagacatgacagaggattttggagtcacaacacaacggcggtctaacctcttggtgcgtccaatccatcgtgtatcggttccagtagagtaaacatacttgtaagatatatttataataaatgtaattgccaatgtacgtatattagtttcagtttaattttgtttttttataattggtaaaagtcgagtttgacattatatgtttgtggagtgatatatatatcatattaatttatttttattttttttataattatttaggtgacatgaaaaaagatataagaagatgtatcctcaagtgatgaaaatctctctccagatatacaatttctatgtatgtcattacttgttcaatcttctataactagggggcagataacttggttcatttgggctcattatcctctaattttcctcttgggtggtgcatcagtatattctccaatgttaatgttctctctgaaacctataaaacgttttgcactaatcagtaatcaagtataatcagttcggtttccgcattttgaaagaggcatgaataagttgtgtccagtgtggttttgacgtgagatgcacggacacagcgcacgcagaacatgtgcacatccgtgcagggcttcgtacttgtagaacgcaaacctgttcgtccatgtcgcgttctcccagacatccgagccgtgtcgatcgcgtgagctgccatggccggcgaactcgcgttctatctgctcctcgtaggtctcgttgccgtgccattgctcatcttgctcggctccgagcggcgcacggcggcgaggacgcggctgccgccggggccgtgggcgctgccggtggtcggccacctgcaccacctcgccggcgggctcccgccgcaccgcgccatgcgcgacctggcgcggcggcacggcccgctcatgctgctccggctcggcgaggtggaggccgtcgtggcgtcgtcgccggacgcggcgcgggagatcatgaggacgcacgacgttgcgttcgcgtcgcggccggtcgggcccatgtcgcggctctggttccagggcgccgacggcctcgtgttcgcgccctacggcgaggcgtggcgccggctgcggcgcgtctgcacccaggagctcctcagccaccgccgcgtccagtcgttccgccccgtccgcgaggacgagctcggccgcctcctccgcgccgtcgacgcggcggcggcggccgggacggcggtgaacctcacggcgatgatgtccacctacgtcgccgactccacggtgcgcgccatcatcggcagccgccggctcaaggaccgcgacgcgttcctccggatgctcgacgagctgttcaccatcatgcccgggatgagcctcccggacctcttcccgtcgtcgcgcctcgccatgctcgtcagccgcgctcccggccggatcatgcgctaccgccgccgcatgcgccggatcatggacagcatcatccacgagcaccaggagaggagagccgccgccgacgccgccggtgacgacgacgacgacgacgacgaggacttggtcgacgtcctcctcaggctgcagaaggaagtgggcgcgcagtatcctctcaccaccgagaacatcaaaaccgtcatgatggtaagctcgacgccgccatggccgaacaccgaaagctcgacgcgcgcgccaaagatgtctccaccatttttctccctcgcttctttcacaggacatatttggcgccgccagcgagacgtcgtcgactacgctggagtgggtgatggcggagctgatgcggagcccgagcgccatgcgtaaggcgcaggacgaggtccggcgagccctcgccgccggcgccgccggccacgacacggtgaccgaggacatcctacccaacctcagctacctcaagctcgtcgtcaaggagacgctccggctgcacccgccggcgccgctgctggcgccgcgccggtgcgacagcccgcgcgaggtgctggtgctcggccacgacgtgccggcgggcgccacggtgctcgtgaacgcgtgggcgatcggccgggacacggcggcgtggggcggcgcggcggaggagttctcgccggagaggttcgagcggtgcgagagggacttcaggggggcggacttcgagctcatcccgttcggcgccggccggcggatgtgccccggcatggcgttcgggctggtgcacgtcgagctcgcgctcgccgcgctgctgttccacttcgactggagcctccccggcggcatggccgccgacgagctcgacatggcggagagctccgggctcaccacgcgacgccggcttcccctcctcgtggttgcacggcctcatgccgctctccccactaagtactgtaattaattatcaccaccatcaaatcatcagaatctaaaccaaaatatcttaagagttaagatgaaagcaaaccttaaccaaaagattaatttatcatcatgcccatgaacattggcatcagtaactgtaagttgatgaatggttcatatttgatacatatttccttttgttgactacttggatgagattctgaatctttttgtagacattttttgctgttgaaataactacacttttgacttgttgttcatggatggcatcgatattttctatctgaagaagactaaacctgatgctttacagtaagctgcactggacggcgaatactaatcccttatctcaacaatggtagagcaggtacaatagcaggctataaaccagctataaacatattttaaaaagataaagaaaaatagagaaaagtagcgggctatagatctgtagccagctgcagcacggactccaagacgtaatgtgtgtatgacaggtaagattaggtattaatagtatagtaaacaattgtatgaattggttattacattagctataaatgatttggagttagtattgggctatattattaaacttgctcttaatagcttatctactgcttgaccatggagtacgtcacagttgctgtcacatgaatacttttaacttttcttgcttgaaatttccaagctgaaagaaactcttacaaatagaaaccctagtgttttttttttaaaaaaacagattgctcaagtgagttcttacatttttttatttaaaaaaattcacttataaatagattggtagccaagttaagaccaaacagtagtagcaactagcaaaggcagctcagctcaagtttagagtgagaggtgagagctcagcggcgcgccatggcggcatctcggcttgcgctcctcctcctcgtcctcgccgtcgccgcggcgcgccacgcgctcccggcggcggggagcgacgcgcacccggggtacgacggcgcggaggacacctgcggggtcccggcggcggcggcggcggcggggaggatggaggagtacggcggcgggcggatcctggacatcacccacgcgtaccgggcggacctgccggcgttcgcgccgggggcggtgacggggccggtggtgcggctcagggactccatggcgaacgggacgctctacaacctgtcggagctcaagatggagtgccacatgggcacccacgtcgacgcgccgggccacatgaaccagggccacttcgccgccggcctcgacgtcgacaagctcgacctcgacctcctcaacggtacgccctcgccgccgccgccgccgccgccactttacttgttccccttcctgctcgcgcggcgacatggtcgaggttttgtgtggtgcacgtgatgccaccgatgccggctgcggtatccgtaaaggagattagtacagggggaatttgggataaatttggagatgaactcgaagacgagatggggaactatagataactattttgttctgctacctgcagcgctagatcagatcctctaccttaagtcacatgaatttattactaacatagtgacatgtgtgtccaataggtaattgttagtgacaaaggcacggtgacgactttaaaggtagatgatctcagtccgtacccaatacgtaatttgcacttacatatatatgtttttttttaaaaaagagaggcaaacttgctaaaatatgtttccacaaaaggtgtggagaaatactacgatttgtatagttcacaaataggataaatggtacttatagtacatatatcgctcaaaatatcaaatacttcctccgtttcacaatctaagtcattctagcatttccctgtctagattcattaacatcaatataaatgtgggaaatgctagaatgacttacattgtgaaacagagggagtacttctcaactttagtatgtgctaatacattaacatgttttacgtatctacgtgtacatttttctcagaattttgtaaagttcacacattataaaatttttaaatgggtgtagctattcctagatccagaaagaaaaaggctatgggtacagaactcatacagatgctgatgtggcatgccacgagtaaaccaagatttcttgtaactcccatatagtaaaatcaaacagttgagagctttgtttataagagttatgtaagatgtttttagttacaaacttacaatagtgaattgtccagtttgggagcagttctttacttttttttttgacgcaagttctttacatcgatatgaatctaagttaattgtctcctgtgcttctcctgtatacgtctatcgctctctgattacagttttgcctgagtggaaaaccaattctgtttggtttggcgtctagacgtttgtttggaattggaccccacctaactacatcaaaagttctcatcacaccctactcatttagtcattttgttattgcaaccaaatcgggtgtgtgctacatgcctacaattttttaaaataatttgaaacctagttggtgctctgtgtctgtcctttctcctaccaatcattaagatgagcatagaagccaaacctgtctttctgattttgcacgatctccctttgcatactgacagctgacaggatcaagtgaattagacagctccatttcagtgttaggtgctagtattagtctgccattgttccagttgcttctctcatgcagagttgcagagcacagcttcttgtcctgctgcttgcaaagatcaatttttcgttggctttgttccagcattgaagattcacctgatatgatttgatcaacaaaattaacagtttagctgaagaaatgttgtgaaatacttaatagtagctgtgaaatgcctattcaacaattctttcgaagtgcactctctgtaatgtaatgcattcctaaggaaattgcaaatgaaacttgagtgaaaatttgtcaggtagttatagatatttgaagttccccgcaaaaaaaaaaagaagttgatcgatttcctctttgctggacaggtcctacattattggttgatactccaagaaacacaaatataacaggtactattatgtatacttttcttttttccaaggagctacctgctctatcacgaatataattaataattatatgatatatctgatgaatttaccacattcagcagtgctgcccatgcccccatggtcccacagatatgacaaaaacatgaatatcacttctatgtcttgtatataaaatgcatcactgtttgcatgcactttctttatacagctaaagcaatggagtcgttaaatataccaaaaggtgttcgtcgagttcttttcaggacattgaacacagataggtatgtactcttttctggacatatattcatgcataatattcacaccttttcccatagtgcaggctcagtttttagaacaagtggtccgttgtccatatgctcattttcagcatttctcttttgcatctttacaatacagatatcattagttcatctatataaccaattaaactgtaagcaaatgatttgcaggaagctcatgtggaagaagggaggtgatctgagttatgtcggattcacagaagatggcgcacagtggttagttgacaacactgacatcaagctagttggtatgtaattctgagatatcttacacttaacagtggtattgataacttctttttccttgatcaagctagtattaagttacatttatggcctttttgtcggtgataaagatatgtatgcatttatcatttttttttgtttgatgagaatttaatgctatgctattggccgattggctactctgcaggtattgactatctatcagttgcagcatatgatcacttgatcactgcccatgtggtctttttcaaattcccggtacgacgctatccttgttctatttcagtacatctgtaaattggtcattctcacttctttaatctacttcaaaacaaatccttgacaaacattacagagctgagtactgactaa

SEQ ID NO: 7646 - DNA, 13586 bp, Oryza sativa
ttcagccatgaattaaaaaattgccaattttcaccgtgagttcagtagtcaactttgcagttatcgtgaaccatgcattaatgtgtttgaattgcaatttgcaatttgcaaaggtcagctttgtcatagatagccagaaattccggctgcctctgctgcatcacaattactacttcatccgtactaaaataaaatataagtaattttgaaccgatgagatacttttcagactatgaatctagacatagagtatatattgtatttctagaaagtgtctcatctgttcaaaatcttttatattttaagataaaggaagtatattgctgtgccagcatcatcagcatgggtgttgtgcttgttggagtgatcatacaggagttgcaaattgcaactcaaatcgttaacaatagtacagaaccattgcttaactgttctaaataacagcacatttactagctagtggatgcattccaatggattagtaaggacagacgcaatgtatcttgctggggtcaacagtagtgtaggccccaaatcaaatggtagttatcataaattgcatgatatgctatttttagagaaacaaattaaaccgtatctagttaatataaactcatttttatgtttgatatatttgttataacatgtagaagtggaaaacttgcatgttaatttgcatagtgatatatctcatatcaacttatcttatcatttttttatttacaactatttaggtgacatgaaaaaaacgagaagataaaaacacttttctgtagaattaagtcatcgaatatacgaatatgtttgagatagctaaatagataatatgttatgtatgggtggtctctgtatgttataagttgtaattaaaatgattatacagataatattcgtctaaatcacagtatttatgctctgaactcaactgcgaaaatttcatacaatcactattcatgctctgaactccacaacattcctaattaaaaggttgcatgtgcttgaatactaaaaaatcggcacccgatttttttacaactaagcacatataactaacggtagcgctaatccacgcgctgcacacggaatattagatcgagcgccacacagcgctccctccttccagttttttcgttttttaccacccacctttactccgcatcccacctttcatcagtttatttttttcgtttttttaccaccctatcttccgtggttcttttttctcttttccatcttatccgtgcttcatcaaagggcccggtaaaatattaaacatccagattttttttgtttttggttccttctctccagttattttgtttcgcgttttagtaaaatatttatcatctagtttttcttttccagttttctgtttttctagtgtctccccacgtttcaaaagtaacgaatttactccgtggagttttccatttactcctagccttccacatctgctccttctaaaataacaaatttactcgcatgaatgcccttactttttacttgcatgaatgtccccatatcgtgcgacaccattcctagatggtcgtaaaagaactactacctgcttaaaacactagtaattcttttactagtgttataaatattgtttagatttcgtggtctgcgagtaaaacaattaccaccttcctctcgatatagcccatgatctcgtagctactatgtagtaatatgtttactgatatgttcagtacactgtataagagtaaaagctgagacttcgtggtctgcgagtaaaacaattactacttttctctcgatatagctcatgatctcgtagcaaccatatagtaatatgtttactgatgtattcaatacacggtataagagtaaaaaatgatactaaaagtattgttaatctatatcacaaaatgaccgtacgaataaaaaaaattacaggctcaatcacatacaaatgataaaaattactcacaagtgaatcaaactagaaaagaaaaaaaatgattcaaccaaaaatccatcgtgaaactaggattctggtggctttcttggatcttgctataaggatggagatgccggtctgtgtcttgtgacaggtagtggagagggcaaccagatggcgagcggtagtcgatgatggaataatagaagggtgtagcggcatggtatagagatgggctcgacattgcgcagtagcagccatccatcatctagcaagcacgaaaaaaatgcaagaacattctcgttcatgttatagagacgacgagcaaaagaaaaatagcaaaaaacctccatcatcggcaaactccaccctatcctctgcggcgaaccacatggagcatgatgtgcaaatgtaggacctatgcagcccatcaattcagatcaagtaatattggagattgcacgttaatctgatttgcaaaaaaaaattggggcttcatgcgtgaaggtaaactagagtatgcagatgcaaatcggagtgctatttccttacgtgcttgttctgtcaatgtcgccgacgtggagcagccgccgattgttgctcttgacctaggtgaacgcctctttactagttaaggtgttgctcgacgtacggcagcgaggcccgaagcagcgccttcgcatcaaccgccaccggccaccgctcgccggccatcgcctgtcgtcgtcctcctccatggtgcgtcaccgatctgtgggctgggatgatggatcgatgcatatcccaaaaaaaaagaggaaaaaataaagtgggggcgagagtggttggttgggtacgggaaaaatagaatatatactggaatctgggaagttgtttttatcgaagtaaatcatttactccgataatagtgggagcaggatgatgggacgtggggtgggatcggaagtaggaaagttgtttttattatcgaagtaaatcatttactccgataacgatgggagcgatgggagcgggatgacaggacgtggagtgaggtaggcttagactaatacatgtttggtgctcgaaatgctaaggaacgtgctgcgctcctaacagcagtactacatatttaacaccgtatttcaaaatgcaagcacgccaaacacatgtttaactttgttggcaggatgctccttgagtggtgattctattgaactgttgtgaacaaactaattattggatgctgaattgatgagtacatacgtatacgtatacgtatataccaacaacctacctcagtacctctaattggcccgttggcttttgtttcagaaatcagaacaacattttctctacatttcaaatctaattcatcagtaaggatcatcaaaatcataatttgtgctaattagtaattttcatttgttttgcatagtagtgccgcatatcgatcagcttttacaaatcattgtgacatatacatttttcagtgtagtataaatatagtaaggcaactacacgattgctattggccagcaaataagagagttttttctcttttttttaataatggtatgaaacatcccggcctttgctcacaagagctatagtccattattacaaaagtagcacactaaaaagcttagtccaaagagttataaggctgatgattcctgcacgttaatgctaataagaaggcagcggaaatcacaccacagccaagctgtattaatgtccaaacctccaaatcgctttgcgcctttcaatttgcaattatttctcttgcctatgttttcattttgcaattatttttgtgctagacaacaaataataaatgaatcaacttctgtctatttataccatttccatgaagtgctcgacaactcacacccatggccatggtgcaatacgtcaccggctacctgtgcctctccttggctctcctcttgctcactctcgtcctccacaaggtggcgaggaaggcgaccggtaatggcgccggcaagccgaggcttccgccggggccgtggcggctgccggtcatcggcaacctccaccaggtcgcgatgggcggcccgctcgtccaccgcaccatggccgacctggcgcgccggcacgacgcgccgctcatgtcgctcaggctcggcgagcttcgcgtcgtcgtcgcctcgtccgccgacgctgccagggagatcaccaagacgcacgacgtcgcgttcgcgacgcggccgtggagctccaccatccgcgtcatgatgagcgacggcgtcgggctggtgttcgcgccctacggcgcgctgtggcggcagctccgcaagatcgccgtggtggagctcctcagcgcgcgccgcgtccagtcgttccgccgcatccgggaggacgaggtctgccgcctcgtcgccgccgtcgccgcggcgcagcccggcgaggccgtgaacgtcagcgagcggatcacggcgctcatctccgactcggcggtgcgcaccatcatgggcgacaggttcgagaagcgggacgaattcctggagggtctcgccgagggggacaggatagcctccgggttcagcctcggcgacctgttcccgtcgtcgaggctggccagcttcgtcggcggcacgacgcggcgggcggaggcgaaccaccgcaagaacttcgggctgatagagtgcgctctcaggcagcacgaggagcggagggccgccggcgccgtggacgacgacgaggacctcgtcgatgtgcttctcagggttcagaaggaagggagcctccaagtgcccctcaccatgggcaatatcaaagccgttatccttgtaagttgacaagtacttgttcttcacctcttccccttttcccctgcgaaatcactaatacgcgatcggtcgctgaaatctcggcgaggccatcggttttttttcttgccgttacctttccatttttgccagactcctgtgctcgagatctttgttttttccgtcgcttttttggctgttttttttctgttaccgaatggtgacgcgcggcgatcagcccgttccccatgatcctttttttttttcactcgcattacttttctgtttttagtaagtttatataactaaaggtggtacacatcaaatttacacaactaaaatttatatacccaaagtttatacattccaaagtttataggttaaaagtttatatacccggttcaaatttgaattcaaatttggattcaaatatatttatatatatatatatatataatatttctatacataaagtctatatgtacggaatttcatcaagtttatacatctaaagtttgtatacccaaagtttataagttaaaagtttaaatagcctgttcaaattaatttggattcaaatatttttttatatagaatatttctatacataaagtttatatgtatgaaatttcatcaggtttacacatctaaagtttgtatacccaaagtttataggttaaaagtttatatacccggttcaaattcgaattcgaatttgtaagtataaagtttattcacatgaatatatttttcaagtgtattagatttctttttatattttttaaatggtttaaaattgatagtgtggtagaaaggggagacgtgtgcggggagggacgcgggtgctgatagtttttttttatcgcttaaccctccctccagcgagcgatcgcgtactaggaccatccttttccctatggataatgataatagtattatctcccttaattttgataggacttattttattcaattttaacatcttcgacaccaaagctttaacttttaattggttgcaaaatagtacaaccttaataactactccatctgttcacaaatacagataattttaagcccttttgacttgtccaaaaatattaatgagtttaaagtactttttgtcttatcaatcatttatttttcaatcgtatcaccaatcactttctggatctataatccctatattcgtgaacggatggaatataagacatattttaccaaaccccttttacctgagtgcacttaaaattttactactgttaatgtaaaaatctataaagttttacctttaataataaaattaaataaccttaactgatgaatgggggagcatatgaaaataaaaaaaaaggtatgcacactgaacaaagaaagtaattgataagatattgttttttacgtatatgggaaatcatgttttttccatgcatataggaactttttggtgctgggagcgagacatcagcaagtacacttcattgggcgatgactgagctcataatgaatccaaaagtgatgctgaaggcacaagatgagttaagtaacgtcatcaaaggaaagcaaacaatatctgaagatgacttagttgaactgaggtacttaaaacttgttatcaaagagaccttaaggttacatcctgtggtgccactacttctccctagggaatgtcgggagacatgtgaggtcatggggtacgatatccccataggtactactatgcttgttaacgtgtgggcaatcggtagagaccctaagtattgggaggacgctgagacatttagacccgagcgatttgaggatggacatatagacttcaaaggaacagattttgaatttataccgtttggagctgggcgaaggatgtgccctggtatggcatttgcagaagcaatcatggagctcgttctagcctcgcttctctatcactttgattgggagcttcctgatgggatctcgccgaccaaggtggacatgatggaggagttgggtgcaactattcgaaaaaagaatgatctttatctcgttccaactgttcgtgtgcctatgtcgactgccctatagctgtttacacttaagagacaaaatatttgtctcatctgtacgcgcctatatgataaactatataacttttgatggattgatgtactcctactttgcatcctactcgttctacattattactttaaatttagttattaaactatttaatttatatatatgatcaagagtttaactcgtgacaataatttgataaataatatgttttaaatgctaaagtcctcctagcttgtcaattttgatggcggtcacctcattacacatatacatgtacttgcacgcacaatatctggtgtagactctgggatgccataaccatgaacaatatggagaaaggaggataatagtcgtgcctcctattgctggcagtagctctgctaacacacaatggcgttgtgtgaagagaagaggataagaggcgggttggagcctgagagttggaagggatgaggtggagaggggtgggacaaacatgagaaaagaggacttataattttgttttaaatttggtcaaatttaagaattttgactaaaaaaagttgaatgccttgtaatataaaacggagggagtaactattattaacagataaaattgtgtatagttgtattagtgccggtacgaaagtagtcgcgctgtccctctcattttgcaataatttctcttgcctatcttttcaaaatagggatagccgcactgtacctgactttttttttcacttacatgaatgaatgaacttctctatggaaactagtattttgatatctcgagcggatgtccacttgtctatttataaaccatccaaacaacaaagaaaaattctcaaatcgtctacactaacagcgtaaattttttaaatcattattcacacccaaatttattttttattctaaatgtgtaggtcgaatttaaacttagatttccgtcgctgatatatatccctatactaacattgttaatgtttttcagatttttcactaccatttacattggatttggaagaaaaaaaagtaacgaggggacatcccttaaagaagttagaatccactccattctttctctatatataacatttcttgttggcctccatatataacactcatagatcgccatggccgtggtgcaaatgcaagacgtcaccggctacgtttgcctctccctggctctcgtcctgctcactctcgtgctccacaaggtggtggcgatcgaggaaggcgagcggttgtagtggcgccggccagccgaggcttccgccggggccgtggcggctgccggtcaacgatcggcaacttccaccagctcatgatgggcacctgtggaccctcgtttttataacaggaatcaatcgtgtaaacagtaccatttctctgaatcaagtagtctggtacacatgagctcatagctgaaataccaaatactcatacacgagagtctagtgtgaattattacaacataagcccgcaggcattgtcttaaatcatcggaccgagcggtccggaatacaaccaaaagcagaattagataagacagcggattttaggcagcggcatgccattgccacaggcaacgaccgtactaagacctactgggcgacatcgtcttcatctccctcctggtagtaggcatagggatcctccggagcttcgtctcccgcttctgattaattttatattcgcaagggtgagtaccaaccgtactcagcaagccaccacagcaacaatgcatatgaaagggtatttcaaaggatagctatggttcttttgcgcaaagcaagttttgtaattctttttacaagcctcagacctagcattgactgatcaaattttagtaccagtgtttgtatttaaacaacgatggttctgtccaccatccattgtgatcccaaggatagcttcccgccattgagttgttatggttttctgaggatgcccaccttcccccttctcaggaagtggctccaacagcataaaaattcgtcatgcaacaacccatcccacacaagttaagaatttagagactagccaagtgtaatacatgtcccgatgctcaataaccgcgagcacgactattcgaatagatttggtttactcacacttcagtggatgtacactttacccgcactccgcgactgcccaacacatgagcctcgtcccaacacatgagacgtgtcacggcaaagcttttcgataacctcgcattggcagtacccgctccatgaactttatatcctcatgcactctaggcgtacacgatttctagcagtgagaggagttctggcgcacccgggaaaggaaaaacacatgcactcctacgttgcttcctgtcgttgtacccagtccatcatgattgttctcttatgggtatcctcatgtagtattgccaagccagtctctgaccatccggaacgggcatccaccatccacctggccatctgaaccgggcatccgccagcagactgcttgccgcatcacacacctaaaagaagaccactacgcatggatactgcctccgctcagctatctactccgctaggtctatacccatatgagaagtgcggttgtacgggggatcgtttcattcttaacttcatggctcggtccttaactgaccagggacggcactagccttttccggacatcacccaaatcctccatccgccccagtcgaaaacatttgtttagttttattttcctttcacaaattatgtcatcaatatcatggcaatgtggcgctcatgtctccacatgccgcatctcaattaccttcccaaaggtaattgcccaagcatatagcatttgataaatatgagtatgcataaatctagagtagcatttctaagcatttgtcatagttgactaaggacttatacgtaaatcatagttacaaggatttaagggtaaacaataatcaaggcatggcataatcacaagtaggatgttcataactgcatgcaattttatttgtaaacaaaacaatttcgcaattgggattaatatgttcaaggaatagtgatgacttgccttgctctaggtcttgtgggccttggccttcacccggatccgcggctccctcggtctctatagttacatgcgtaagaacaatttgaattcgatcagaattcaaacaaaatccacataatgaccgtattgaaaaacgagcgcgggaggtgaattttatataggctactttattcgcgaagtggaattgttcttcttcctaagatattttgtaagttatagtcatgtcctaagactcatcgaattattgagttcttaatcatatgtaaattattatcgcgaacttgatttcttagggagattactaaaaataatctatagattataatctataggagttcatccaattatattttcattaatcctataattaaatgctagtattttaggtatttaattagtaagaattcatctaactatattttcattaatcctataattaactttcgcaattttacgactataattaacctacgattaaattcttaactattttgaattttctaaacttctaaattttactcaaaccctatttattttctttctcttcctttccttttctttttccccttttttttcttctttcccttctcttttcttttctctctttttcctctcctctctttctttttctctctcttctctcctcccggctcctttctttcttttccttctcttcctctcttctctttcggctccttctccctctctctctcgccctgcctaccgagaccggctgaggaaaaggaaaaaggcggcggcggcacggcttaccggcggcaacggcaatggtggcggcgcacggtggctgcgacggcggtggcgcacggcggctgcgacggcggcggggaacgcggcacggccaaggcgcggcgcggcgcggcggcttcgtggcggcggcgtggcggctctatgcgacgacgcggcggcgtggaggcggcggcgcggcggcgtggaggcggcggcgtggtggagtgggtagaggagaggaggtgaggatggagggaaagagtgggaatagtggagtttatataggagaggggaagagataagggggagaggggagaggggagacgcgacggcggcgcggggcgcgaggtgggggcgcgcggcgcgaggcgacgcgacggctgcgtggcgcgagcgacgcgacgggcgagcggcagcggcggcgcgcggcgcggcgcggggcgcatggcgacgcgacagcgacggcgacgtgcgagcgatggcgacggcgcgcggcgatgcgacggcgatggcgacggcgcgcggcgcggggcgcgagacgacgggacggcgcggcaggcgtacggcgcggcggggcgcgagatggcgacgtgacgggcgagcggcgacggcgacggccgacggcgacagcggtagcggcggtgcgcggcgtgaggtgtggggcgcgggcgcggcgtcggcgcggcagcggggcagggttaggctagggaacctcgtcgaacacctggctggctaccgaatagtgccgttttctatttaacccgatttaagcctattcatttatttaaaattgattctataaacctaaattttgtacaaatgaagttcactcaatatttgtgttattccaaccaatgggtccatccttgattaattttacctatattttatttttatataattttcttgaatttaattagagttaattcttattccgacacttttaaatttaattgatacaaatatagtcgtaataatattttactcatttctatcctcaccaaatattattttaaattgcactttaattatttacttagtcaatttactttttagggtttattcctaactaattatccattattcgcgatttataaactctgaaatcaaaatctaataaaataatcgaacaaaatcggcatgatgcaattttatttaaaaagtttttgaaggcccatatttttgaaactttgatttttgttcgtcgaattttcagggtgttacagcaccatggccgacctggcacgccggctggacatacgcgccgctgatgtcactcaggctcaatcggcgaactccgcgtcgcgcgtcgtcgcctcgtccaccgacgccgcctgcagggagttcaccaagacgcacgacgtcaagttcgcgacgcggccgtggagctccaccgtccgggtcttgatggccgacgggttgggggctgattggggctagtgttcgcgccctacggcgcgctgtggcggcagctccgcaagatcgccatggtggagctgctcagcgcgcgccgcgtccagtctcatcgtcgctatcgccggcgcggcgacgcagcccgtgaacgtcgtcagcgagcggatcgcggtgttcatctcagactgcgcaccatcatgggtgacccggttcaatgcaagctagggccaaggatcacataagattgtgatatgacaccaaaacatactaatttttcacatgaatgtagattaaattatcatttacctactatcttgttatatagaacataaaaataaaacgtacatctatactcgtgagaagctcgagctcggctcgacaaatctcacgagtttggggctggacttaggctcggctcgttaagagctcgagctgagctcgaatcgagtctgagacgagccgagctcgaatcgagtctgagtcgagccgaactcgagcttttttgaaagctctaccaaagcctggaggtaagaagggatgaaggaaggggaggagagggaacaggagaaaagaggctcgctattcagcaatcatagtgaaatttgatcgattttatgaatatgaacttggaacatggaatttggaattttggcttggttctaggttttagtgtagtgtggacaattcagctctggaccatgctagtttggcagttttgacaccgaaaaatttatgtttcaagcatgactaacagaatttggagttttttttttttgaagtgagtatattggcaaaactcccatactcttgaagacttatttctccacctcgtgcaataattcaaaagcaagtgaatatgtagtgtaaatcacttatgtctgaaaatctccacacacatacagttatactatatatgtttccaagctcatatctttctacggatcactctcaatgggtcaaatcggcttacaattacgtacttggcctagtttagcccaatgtatttagaattatcctttttatgtgcttctcgctggtgaagacacgtcctgctgcaatttgttcttcatcagcgacaccgtacgtccaggttgttgtgagatatttaactatttatcactctaactggcaatctggcactaattcagccatgaattaaaaaattgccaattttcaccgtgagttcagtagtcagctttgcagttaaagcgagccatacattaagtattgcattaatggtttgacttgaagtttgcaattttcaaaggtcagctttgtcatagatagccaaaaattccagctgcctctgctgcataataattactactacgaccgtactaaaatataagtatttttgaacggatgagatactttctagactatgaatctagatagatagtatattgatgtcctgaaagttgtctcatctgtttaaaatcttttatattttgagacaaagaaggtatattgctgtgctatcgtcatcagcatgggtgttgtgcttgttggagtgatcatacgggagttgcaaattgcaactcaaatcgctaacaatagtacataaccattggttaactgttctaaataacagcacatttactagctagcggatgcattcactggtgaagaaaccgtctttggtcggtcgcccgaaa

SEQ ID NO: 7647 - DNA, 9583 bp, Oryza sativa
ttgattaatctcgtattgggttcttatgtggaaacttctttcaatattgcttatttttaattccgaattttagctatttttaaattgtacttctacttagactctcctttttctttttttctttttctccgattaatgtgggaatttctagctcccacagcgaatgtggtgcctcctttcaaagctgttttaataatataatagatagatttctttctctaaaatttttaaactaatacttaatgaatcatacgctgatacattgttttaattttttttaataatcaccggaggggagaggttccccacctagatttccattgaagagaaaaatagggtacaattgaagtgttcaagctagctagcagctagcagttacaaatgcaaagagaaaatagaattggaaaatatagctttccaagactggactgctattctctctgggattttgaaacggtgttcctagaggtttgtttcttctaaacatcgtctcaaaaggttgagaagagattgcaagtttcaaaagaccacatcatgtcgatggttccacaggcaatagaaacacagcaagtagaaagttctgaagtgtggctgcaggagcggcggcgccggagacagcatttgtaaatttctaatgtcggaaatatttggatggattccaatagatgtctagaaacttatagacggtagaaacgttgtttattttgtatgccgagaggggttccaacccttatagacgggcaaacctcaaaatataaattaactagatgacacccccacgtattgctgcggaatatttacgtgttaaatactccctctgttttaggttataagacgttttaacttggttaaagtcaaattactctaagtttgactaattctgtagaaaatagtaataatatttttaacccaagacatatatatgatgaaaatttattcaattatagatttaatgaaactatgctggtattgtaaatattactatttttttctataaatttagttaaacttagagtagtttgattttaattaaagtcaaaatatcttgtaacctgaaacggagggagtagttactatcctggtaaggatgtgcattctaagaacatgttagaaatgaaggcaaccaccatttgaaatttaggttgtaatgtatatattaattgagaaatctcaatacatgtgtatcaaataattaatgcggttatacatttaggtttaatatatgagtgtgctgcaaaggaagagattagtcactcaaattttctaaaagaagaatcttcaatacagagtgaaaagggtgaagcagtgaaccatgcttccttttttctgccgttatgttggactatactaaggtagtacttccatgttagcgattgtccgtcaataaatgttaagataaaagatttacttagcactagtacaaatattatttaataactaagctgataagcaagcttaaaaaacagaggatgatataatgtaaatattttaatgcaccattagataccaaaacaaagctatggcgatgaaaaacaaaatacctgtctcatgatagaaagattagataacacccatgattagatcagctccaggagattaggagaagagatgaccgattgtcatatagaaccaaactgattgaggataaaaccggggaactgccatgagcctgacaatcgatgtgagataaaattggagaactgccatgagccttgacaatcgatgtgagataaattgcttgggtgtttgaaatcttgaatgttacaaacgattgtgagaaatttcatgagtctcgaattgcttgggtgtatgaaggccatgtttagattgtagccaaaataaaccttaccaaaagtttagcaatattatcaacatgccaaagtttggcaataaactaaacgttgacattttttttgataacgttgccaaaaaaaataatatggttgaaaatagcatcaatatgaacagcccggaatttcatgataaaatcttgacaatcttaaattgcttgggtgtatgaaaccggataactgacattgggtctcgacaatagatgtgagatgaaatttctcacaattgtctgaaatcttgaatgatcaatgaatgtggctaatcctatgctatgccactgcttaatttatagcttggttgactggttgtatggcttggcagtttctagaagatgagcagtccaccgaaagatagtgggccaataataatggtatggctaataataaaggtggaatggcttggcatgcatgtaaacatgcaggaaccggtagagtgacatggcccaagaaaatttggacttaaaaagacattcttgctgcacgctagaaagtaaacatcttggacatcaattttagatctaatggctagattaatttgaagtgatgtggcaagctgtgaaaagagaaaattagcactagttgcacttagtgagaatgaaccatatagatatataaaattaatgcccttctcgattaattccttcataaaaagttaagaaggatttagagaggattacttaatctccaacattccttccggccttcacataagaattaaccgaacaagctttttttttctaaggcgtggaagaactctttttcaaaagaattttcaagcggatcaagaggatgttttgagaatgaaaagatcgaatgctaattttaaataggacctctcatgttctttttatagagcatgcatgtgtcatacgttcaaaacacgtcaattataaaaaaaaaaaaagaggtggtacactttaactgtatgatttagtgcaagcgcaacaataatgttcagatgatgatgtaatgctgtccgttcttaaactgcaagatttgcagacacttctttgccgactaatctcaaagacaatataagtatttattgatcaccgcttttcatcgaatcaatcactagctagtaacacaccgacacaggtggggcctggcccacgtggggagagccggagagagaccagcaccgcgtctagcttccacgtgcttatttttaaaagacaaaaatacaaatccatgtactcgcacactcgttagtataaatgcacgcgcgtactttatttttataagcaccttcaaaatacttaccggtactccctgttttaggttataacttcaaatttaactaaatttatagaaaaacagaaatattttcaactaaaaataaatttattataaaaatatatttaattattaatttaataaaactaatttggtaatgtaaatattacaatattaaatcttgagttgaaaatatttctattttttctataaacttggttaaactttaaatagtttgactttaaccaaagtcaaaatatcttataatctaaaacggagtatacctttagattgatgaagtcgtcattgatgtcacactatcgacgagtatattatatatcactgaaagatgaattagtcgtaaatgtgaacatatcaagtctagaatttgaattcggatcaactgattccacttcgcaacatccatgtgcttttgaattccacgtgaaggagaaaaagggtttgaaatattggacttttgcaaatttatcttctaaaaagacttcagattccgttgattaattatgtttgaaacgagaagttctggggagttaaaactgctaactggcatggttcagaactgagtcaagcacaccacaacatcgaccagagcaagaattccgaattccacgtttcgaaaatttcttaaaactgatcaaatcaattccactataagtttataattcgctgaatcgtgagcctcttttctcctctttccatccccctccttttcccttcctacttccaggctccagcagaccagcacgcctcttctcctcttctcttcacacaacgtcattgtgttagcagagtcactgtcagcaataggaggcacacgactattatcctccctcttacgtattgttcatggttatggcgtcgcagagtctacaccagatattgtgcatgcaagtacatatatgtgtaatgaggtgacagtcatcgatcaaaattgaaaagcagattattcatggaattattgtcatgagttttctacttgattataaaaataaattgaataatttgagaattaaacttaaataataatttataataggtaggataggaagtaggagtacacatcatcaaaagttacatagcttatcatttagacacgtacatacgagacaaacatactatttataagtgtaaacaactataagacagttgacaaaggcacacggacagtaggaataaggtaaagatcgttctttcttcgaattgtagcacccaactcctccatcatgtccaccttggttggcgagatgccatcagggagctcccaatcaaagtggtaaagcaatgaggctagagcgagctccatgattacttctgcaaatgccatgccagggcacatccttcgtccagctccaaacggtataaattcaaagtttgttcctttgaagtctatatggccatcctcaaatcgttcaggtatgaatgtctcagcatcctcccaatacttaggatctctacctattgcccatacgttaacaagcacagtagtacctatggggatatcgtaacccatgacctcacatgtctcccgacattccctagggagaagtagtggcactacaggatgtaaccttaaggtctctttgataataagttttaagtacttcaattcaactaagtcatcttcagatatcgtttgctttcctttgatgacgttacttaactcagcttgtgccttcagcatcactcttggattcattatgagctcagtcatcgcccattgaagtgtattagctgatgtctcgctcccagcaccaaaaagttcctatatgcatgaaaaaaaacatgatttcccatatatgtaaaaaaatatgttatcaattacttccttcctttgttcagtgtgcatactttttttttattttcatatatactcgctccattcatcagttaaagttatttaattttattcttaaacggtaaaactttgtagattttgacattaacagtagtcaaattttaagtgcactcaggtaaaagaggtttggtaaaatatgtcttatatttcatcctttcacgaatataatggattatagatccagaaagtgtgattgaaccttcactaaattagggaagagaacgtacgttagggtacgattgtagatacgattgaaaaattaattattggtaagataaatactactctaagctcagaagtattcgtgtgcaattaagggagattagtacagtattaatcagcaagtacttgtctacttaccaggacgacggctttgatattgcccatggtgagaggcatctggaggctcccatccttctgaaccctgagaagcacatcgacgaggtcctcgtcgtcgtccacggcgccggcggccctccgctcctcgtgctgcctcagagcgcactctatcagctcgaagttcttgcggggttcgcctccgcccgccgcgtcgtgccgccgacgaagctggccagcctcgacgacgggaacaggtcgccgaggctgaacccggaggtgatcttgatcgcctcggcgagacccttcaggaactcgtcccgcctctcgaaccggtcgccgatgatggtgcgcaccgccgagtcggagatgagcgccgcgatccgctcgctgacgttcacgggctgcgccgccggggcggcggcgacggcggcaacaaggcggccgaccttcgtctcccggatgcggcggaacgactggacgcggcgcgcgctgaggagctccaccacggcgatcttgcggagctgccgccacagcgcgccgtagggcgcgaacaccagcccaacgccgtcgctcatcaggacgcggatggtggaggtccacggccgcgtcgcgaacgcgacgtcgtgcgtcttggtgatctccctggcggcgttggcggatgaggcgacgacgacgcggagctcgccgagcctgagcgacatgagcggcgcgtccagccggcgcgccaggtcggccatggtgcggtggacgagcgggccgcccatcgcgacctggtggaggttgccgatgaccggcagccgccacggccccggcggaagcctcggcttgccggcgccattaccggtcgccttcctcgccaccttgtggaggacgagagtgagcaagaggagagccaaggagaggcacaggtagccggtgatgtcttgcaccatggccatggtttgagctgtcgagcacttcatggaaatggtataaatagggagaagttcttttattttgggggggaacataaatagagagaagttgattcatttattatttgttgtctggctgctatctctagtttgaaaacataggcaagagaaataattgcaaaatgaaaggcgcatagcgatttggaattttggactaccatcccattggcattaatacagcttgcagttattagtcaaatattggctgtggagttcagagcatgaatagtgattgtaggcaactttcgcagttaagttcagagcataaatactgtgatttagacgactattatctgtataatcattttaattacaacttataggcctcatctttttgcgtatgcttatgcttatcaaccaaaatttcaaatttcaatattaaatatagagtttattttagggatttttcatcgtagtttatttttcagcctttgcttttagatcgttaagaacatgtatatataagttttattcacaaattacttttcatttgcaaatatgtcatatggcttattccacaaataagcgaaacaacggggctcaataacatacagagaccacccatatataacagattatctaatcagatatctcaaatatattcgtatattcaatgacttaattatacggaaaactggttttatctcctcgttttttcatgtcacctatagttgtaaataaaaaattgataagataggttaatatgagatatatcaccatgcaaacatgcaagttttcgacttctacaagttataacaaactaggaaggtggcccgcgcagcacttgtattatttgaaaggtaagatttttactgtttgtttaaaaattttgtctgatagattaagggcaaactaaagtttagatactgttattttataataatttaagggttctattttcttaaggtatctttaaaatccattcataaacttttgagtaggagattgattaagtacttacgatttttgaatcatgttctttttctcgagtaaataataaactattgcttgtagtatggctacaaatgaaaaagtgagagcaagatacttaaaattcttgtgattaaatcgtctcatgaaggtgcatgatacaataagaaagggagggaagcgtatacatggagaaaaagaagaaagggaaaaatggaaaaaagggaggggaagcgtaggtacccacgtacgtaggtgcgtaccgaaggtggagaggtggaacctcgtagtatttggtttgttctaagatcaatttaatctaatggtttataatattggacccatcgattaagtgaaaatcaagtaatagatactttgctttttttcttataatttctaatattttagagcatcacgtggcagcttgagggcattttaagaaattttaatggacttaccacatgtaattataatattaaccatgtaatatatatgtatgggatatatgttaatattcattctagcttcgtccatgtttatatatagtcatatttacaattatttatagtagctcttacatattcatcttacgactttgattatgcgttgatcaccaatttactgatcatcatgactcgcatgaaaaaattataattatgtactacttagggtttagggtttaggacaacttaaattgatgaattatcttatttatgtgatagctatttgagattataaacgaatgaattaacttctaaaaagttaaaaagatgtttaagaaaagcaccatttacgaacttggaaagcgtggagcgtgcaaacgaaaatccaaaagatggaatcagggaaaaaatagcgccttaaactcccttataacactcttatcctagtaagagttctattgatattcgttaatattgtgctcacatttgtaacataatgatttctttcaattgtacaaacaaataatacaaaatctgaatacaacataacacaatacattataattattatgtaatcaactatcgatttcggcttaaacagagctaagtgttaacacggtgcttaattcttctctcactgcatcacacatttaattttcttttcatgttattaacaaaatcggtagcgctgcagcggtcatgatcacctgagatgcctcagacatgacgctttgtcacacatgcgaaaggaaaaggtgtagacgtgcattatgcagcaggccaaaaagagaactttagacactttagttattaataatagatccgatgatttaaataatgggtcgtacttgttctagtataaatataaattagttaatctatattttaaattgttaatttaatgggtacacaatataacggtgtaaactttattttaaaacaatgtattatttgagaataatagtccaaagtaattataaaaatagatccaatgatttaaataatgggtctatctgtttaagtgcatgtatatattagttaatatagatcttaaattgtttatttgataggtacacaatataattgtgtaaattttattttaaaatagtgcattatttaaaaataatagtacaaagtaattagtacaccggtttaagtggaaactatcttacattattgatttaatgggtaaacatataatatggtgtaaattttattttcaaatattatagagctaatttagttacctgtgtttataaagagttatataatggtatattctttgtttataaaattatcaattgtataaatggaaaaaagtagtaaaaaaaggaaacaaaagggagggaggcgtacgtactacatacccgtacgtgacctacctatgcacgtataaagaggagaggtgggacccatagtattttgtttgttttaagatcaattttatctaacggtgtataatattggacccaccaatttaagtgaaaatgaaggggtagatgttttgtttttttttagaatttctaggattttctttaatttatcatagcgccacgtggcagaaggaagtttaatggacttttagtatataataacataaatgtgagtttatgttaaataaattcagtttaatttgtttccgtaaaaataacatacagtatcatgcaatttatgataactactgccatttgatctgcggcctacactactgttgaccccagcaagataaattgcatctgtccttactaatccattggaatcactggtggagaagtgctttttagtcccggttcgtaacccccctgtagtcccggtttttaaaccgggactaccaatccgggactaaagatcgttatctttagtcccggttcaaatgcccgggactaaagatcgatctttagtcccggttggtgttaccaaccgggactaaagaga

SEQ ID NO: 7648 - DNA, 15779 bp, Oryza sativa
tataagcatttttactatagtgacgagtcaaacgtttttaactttatctattaatagaaaaaaaatattaatcacgtaaaattgatattattagatttatcattagacaaactataataatatgtaactctttttatttaaaacatcttacttttatagatattgttggtcaaagtagtatcacaaaaaccgtgtcacagtccaaaatgcttatattgtgggacggatggagtaaatgtaaacttatatatgttgtcggtcagcaaaattccaataaagcaaaagtcttttcaatttttcatctacaatgaaaaatgcagcagatacgaggagtggtaaaagaactagtaataacactctagtagtagctgctgcggaatgagttggcggctcagggtgtaacccatttataggtcaaaataagtggactcgcggcgcttattttagcatataagtaggtttcgcgggttagacacttacaatccttagcggccttcttcagagtcatagcaaaaggtttgtttgtgtggagagatgttatacaatttatggatatcttcacagtcatagcaaaatgtgaggtaaaggatgaagaaacctccttttgggggtgatgtatggaatagcatagtcagatcaatctctttcccaagagcatattcttttgtttccaacgaaaatgattcagtttgcatcgcaagtttaaaagacatatctcaaaccttcattctccactttataagaacatgcttatcaggaatatatccaaatgttctgaattacttgcatctatagaattcagtgccccttcagtcaatgattgttggttgaaacctgtaataaattgggattcgtctttaagctttgaagaaattctacatcaaggcagccaagatgtcacatgcttcttctcactctgttgaaaaggtcctatatgcaacatggaacatatggaatggaagcaaaggaatggccatattattcctattttggaatagaagaccctctttgttttcttggaagtcctcttaaaagtgaatactcctctcttactacatcgtgtaaatcattacgagagatcagctttatgtgattggatagacatgctgtaaattgttcttttaatttttaatatattgagccgtacagtgtttctgttaaaaaataaaataaaatgaagaataaattcctttgtgaactatcttttattaccaaagtttcattctagaccatcttttatttttttttcacttttcgctaggtatttttggttttttattttactttaaccacccaaactttcttgttttgataaatacatttgagagatccaagaaattctgtagaagaaagttttttaaggaaattaatttttagagacataaagcaaataatccgcaacaataatctagcgaagtagctaaacagaacatagccttaattcacgactagacatttctaaatatgagagctttcttagagggttcccaattagtataggaataaaaagatcaattgatcgatgtagttgcttctttaatcgtatgaatgaaaaaaaaatgtggataaaacttttatatgttattagcagtttaaaagccaaatgctggaaatagagcacgatgaaaaaaaaaacaaaatcaactctaaacttaagtttcagctgataaattaagtttcgaggttgccactctcaagatctgatccaagggatcaaagatgtagtaataaatgtttcatccttgtttcatcaagttctacggagtactagcaagggtcagccacagatataaagaaatgaagtgccggggaaaatagaagtccatagatcgcatggtgcatggtgaaattaacccctgaaagtttgctgatcacaacaatattctactcctacttggttcagttctctgtcttgttagtaacatcgtacattactttacatgagtaagaaatgggcagatccgtaaaggataccgtatcacaggcaaactagaaaacgcagcttacaaagagtgcaatatggcggaaaaacaaaactattcttgaaagaatgaactaatcagtctattacctagcaactccattttgatgatttatggtcgatggtcgccaacttctctgatgcagatgctcaagatgacacctacgcacaatgatccatccagttgctgatatatgagcataagaatgaatgcatgttcagtagagcaccggatagttgtcagactccgcatcatattcatacggataaggctttcatgtttgtatctgcccagacttggatggttgaatttagtacttgatcacatgatgtcgcaaccatagttcatacataaccatgtggaacgcgtcgtaaggaagaggaggtgaatgccacacaaagtgtttctgtacctgcaatcccaattaaacatgttacagtatagtaccgcactgctgaaacttcagtgcctctaaacaatggctgaatcaaattatttacacgcaaacagacctgagggcagctaatgttctgaacaagacaagtgacacattacaatcttgaccaagtagcttatttgtactatgaatgtgatctactatatttattttccattacagttaagtacaacgctgaattacatgcttccttttgtaaataattcggcggcttcatagaaaaaaaggagggtcaagagttgcaaacctgaacaagagatttgtgcaattcaacaaactcttcctgtgatatagatttaagtatactttttagttgatatacatcacgctccttaagtacaacagcaaattttctccagtctaggatatcattgaaaggcaaatcgtagtagtctgacaaaataactaaaaggatgaaacaaaatggattagaactcaataatcagaagggtactgaaaatatcagttcccgtgaaataggaaaaacagcataagtagagtggcatgtattatgaatgtcactgggtagaaatactaaccaggaacacaaccgtagtgtattgaatcagatatacgggcactattaacttgagagccaccaggacaaatacagaactttgtgtggtagaactgcttctggtaaaccagctctccaatagctctactgatccgattgttactgatagcaagctctgtatcattctcccagacttgtgccaaaatgactcttattttagaattgcgatggccagcccaaaatccaaggattgtcctgttgccatggcaaaagcaacaaaagacaaattttgtaggagtgcaaatagatgttcaaaccatagcatcgtcacaaatttatggtcatgacaactttcattttgctacaaggtgattcgttgcacatgaacaaagtgctgaactaaatgtaaaaccatgtagtcttctgaattaatcataggttgtaagattcaaggcatgatcaacaagataaccacgtgagtaagtgtgagtgttttacagaatttctcaagtaaacagatatttttcacttgaaggcactattactagaaaagtctagaatcatacatggaggcacacatatatagtcagtctaggaaaaagaatcattcagaagtcccaaatgaacaatttttttatgaagacaaccatagaagaatataagatcacatatatagcataagaagcagtaagtgtcattccaacctgttctcaacatcatttcctccttcaggcagagcaaatggctgcaatacttgaggaagagcgatatccttatgcggtataaagtcaacattatagcttggagaacagacaactctaatagaattcttcaccatgaatggaagtccttcaaaagccctaacacctacatcatggcaggtgacaaagaaatggtccgctccaagtgtcctgttccagtaaggatacttgtttatcaagccttccacataatccttaactattattgtcatgttctcatatgaagtaccctgcaaagacagacatatgcacgtcaacaattataaaagatcaattacaaaagatatggacaaccaacatacaatttcagtcacatctaataacaggaaattcgttcctgtatcagatgaaaagaaaaatgcatttcaatgtttgtaagccgacaaatttccgaaaccaaagatcttgcaccagactatactgctgactagaaacctatcggcacatctacaatatcgttctactttcgcttcaataatgacatgcaggtataaacaacacattaactaatactactttgagaaccgttactatcccaaattcacagtgcaatgttccagctataggctgaagaaaggaattttacatcataaagcgcattctactattaataaattcatttgccgattgccccaaccacacagcaaccgagcaatactcaatgcaccaaaacggtgatgccatcctaacacgacaattaggccctgtttgatttagattattgagtggaatgttgtcacggattatctacttgattataggagtaaatcgaatattatattaagaaataaacttaacaaaatagcttgaaacaagtgatctaaagttctaaaccatacaatacagtagacgatattttttttttgagaaaacgtatttctcgaagcatggagcaaacaatctgtttcaataatccgatgaacgagctgaaaagaacatggccttacaatgctatggaagtgtaaatagaagtagagcggagaatggaccttgccgcgcatcttgtggggggagatggggacgaagaagaggtgcgccttgtcggggtcgccggtgcggaagcggctctcgcggatgttctggaagaagtagccctcgctggcgtacttccccgtgagcttccgcggcgtctggtagaacgtcttggggtcgccgtccgggtacatgtacaccttgaagctccgctccatctccgcgtaccccgccgcgaaggcctcggcggagtggtacaccgacggccgcgcgaaggaggaagggcgggagccgccgatggcgagggagggtggggccgcggcggggcggagcgagcggagggagaggaaggtgagggagaatagggcgagggcggcgagtagcaggagcgctcgggggaggggcgccgcggcggcggaggcggcgccggggaggcggccggccatcgccggagttggggggaggggaggctggaagagtgatgcgagggtggatcggaagggtgtgggaagttgagggtgttaagtgtaaaatcagcgttaagaatgacatgagattgaagggacattaggccctctttgtttagggttataagccaacttataagccgaaaagtctaagaccctttttctttcagcttaagattattataatctagattattgagtcagattactataagctagattgttataatctgtagtagaataagcggttagttgtttcttttctagattattagagcctagattattgggtttgcaagtctaaagagggagtggagtggcatggtgagtaatttttcacccaataatctggaaaaagctcacctaaatgagcttatcagattataataagctggactccagattataataagctgcttcaataagttgtatgtttctttcagcttactcccaataatctggattataataatctcaagctgaaagaaacagggcctaagcctgaacaaacaaatagttttttcgtttgtcttttttgaagccataagccactctaacactattaagccaaaagctaggttggagaagctttttttggcttacgtgaggtagatgcatgactccaccattaaacttaagacattaaatccaccagcttataatatataaatcatataagcaaataagctgacttaaaaatctaagccaataagcctaagcctaaacaaatagggcataattatttgtcacgtgccaattaatgatttgccactcgatatcgatatctatgatatgtgggtctagtggcaaattctttagaaccactcgtaaaagtggcaaaacgttaattattccaggatttgaaaacatgaattaaagatggttcaatcatgtttcaaaactcatacatatatgctcgtgaggatccatatagtatttgggaaaaggaacaacaatgtttactatttggcacattcacagattcactatccaactacgtgtgacgacgatcatttctctttgctcgtctcctatatttcttcattcgagatggttgtagcttgcatcaacgaagtaacccacgttatcatggatgacattgccatacggtgttgtgctctgatcattcaacaactttgatataaacaccaactccaatagtagtagggtattgagctaggatggagatcctctatcttaagtcacatgattttgagtcattgacatgtggaacttttttgatatggatctacatttcagtaatcctaaagtcacgtgatttaaggtagatgattgctatatgtggcggatgccggatggccttgagctcaagtccgaagaatagtgagcagctacaagcgaacataatagtgagcactaagcagtgagccatgcaagcaaggtgagctaacaatacgttatcccaattaattgcactgtaagctccatttatatatccatataagcaattaatacttactttcattggactgataatactcatcgagccatcgttttggacaagaacatgatctccaaaaatatcaataaatatataatgctattgaagtggagtaccttttaagagtaatctatgtatataatctccgtaattctaagataaatattttagaaattattcatattcaaagattttatagtttacaatcggccttgttaaaaacgacaagtattatcaggcctaaggtagtgatacaattaaaatatgttatatttgtaattagctggaaagataagactgacatgtgtcgtgcagatggtttgcttcaggctggaacagattagttttaaaaccacgtgcattcaccaccccctcttctttttctcatttggagaaccgtggagcactggggaagaaataaatttgcagattgattctatctagtaaaggcgaagataaaatcagtaacaatatggccaaagttccctgccagcaattaccacccaggaggccaggacagaattgaacataaaaggtaacaaaaaaaaacaactacataggagtatatcctaaaattatagccatcaatatatattgctcctatactactagtagtacaatgcatgatgtatccatgtttcagtaaataatttgaccactgtatccaaaggagccagaagctgggaaaagatcgagtaaaacagtttcagaagaatggcagttctatacttctatacaagctttctgaaccaatatacttctacatttcatagctcttcagaagctagcatacaaataaggaaaataatatataaaattgtacattaggggaaaagggtatgttagtgtgcatgcaagcctatgttcagatataagattcatggatgtgtctgaactcagaagaggactgagttggcatgcgtcgcaacatgcaatattgcaaatgaagtatcaccacattcagttactggagttgcgacgactgaggtagaagaacaatgcagtacatgcggctgctgcataagggaacacggtccacatgccctggtttcaaagcaaagcataatttgattagaaaaggtaaacaaagattttactctcaatttttcaggagaggggaggagatttaccacagctgccgcaacacttgcgagtgcaacaacaggccgttctctcaggaaaaacccaacagctagctgcaatgagacatcattagtgtcagctgtcgtaaatacagattgaagaattcttattcatgtatttaattcgattgatctgtaagatgtttgaatataacaatggtgtcagcctacagattaacaaggataaacattgtattgtaagacaaaacatttttttagttgccacaactgcattggaggaacatagaaataatttgcagattgattctatctagtaaaggtgaagataaaatcagcaacaatatggccaaagttccctgccagcaattaccacccaggaggccaggacagaattgaacataaaaggtaacaaaaaaaaaacaactacataggagtatatcctaaaattatagccatcacgccaagtagtaagtctctataaagttagatcaaacgtcctgagcaagtgacaactcagtaacttcagaagtaacagaaaattaaaatccaaattacctggataggaagagtaaatagacaaccacagcaaactccagcaaaataacagtctgctggtatgccctgtttgtaatcgtcagttaaaatatcgggtttatcagaaatttctgacagaatcactgtgagtgaagcctgggaaaatgactaaccaatgcgccagctagaaatcctgtaggattgcgaaccccaactgaaaatcgctcaactgcaccaaacatcacagatattagtgacttctcactgtcagtgattaatgaatgtaacccactggtgttgtttctggatgcactaagtgcagcactataatctggcatttcaggaaaatgctccttactcagatataaactcttgagaaattataatctcagatatataccaaatccaattaggttgccatacttttgcaccgcacgcgatatgcttagtgctttctccttcccaattccaatctaaaaacagatgtgcaaattatatctcattcagagtgaagaatactctttcagtctgttattctttaccaaaattatgaaactatgatataagtaaaaatggcaaataaatccctgctttataccttgctgcttatgtcttcagatgctcttgtttgcctaaaaagtttacctagatagaatggaaccatatcactaatacaaacgcccctgaatggaaggatgggtcaggtaacaaaagatggtccatgattaattgatgatcgattgactgacaaaaaggaactgtgcacgcaccagtaaacccataacactgtggaaattatataagatgcattcattgagaatgaattagcaagagactgccaggttccatccaaacaaaggctgcgtgctaaagaaatcccaacctacatcaagaaaaaaagtaatcatgttcttaacatgcaacaatcaattacgcagtgaacataaaagtttgcagtaagttattgaaacttagttgggcatggtcacagtgaagatgccagtacagaggacagacccaaacatttaaagcttcttcactaataaatagtccaaatccagcagccatgagcaaccaaaagtaaacccacctgaagaaatttattagcaattcgttatattttaaaaagttttggaaactcttttagtgtgactatggtacatgtgtatataaatgattcattttacatatttttcaccatccaccattaatcatcatatatgttgcaatggtgcaaggtggtaatcttaggtagttaggacaaaaaaaaaatccttggtagttggaaattatccccaaaagcatatgtatctagcatgtagtttccactcacaaataaattcacaatctgatataacagccaaaattatggatgctcatggagaatggaatattaaaatccaggaatcaacaatgtatttgtctttgtcttacttcagcagcacatatgcatttttttttttttgccgggttagcacatatgcatttcaggagtaatatgcaacaacacaatgttttaactgtgagtgaaacagaaagataacccataaaattgtgaaatgcacataccctggagtatattccggaacaataactttcttcccaaacagcgaaaaagtatatccgatggtcgctgccgcatccggcggcgccgaagcatcaacaatctgtggcaaactgaaagatggacctgaagaaggctgcctcatgaagagtgaaatcacagtagcagtagctgccacacccagagcaagtgccactttagcaaggaaagaagcagcagtgctgcttgatttcacttccattgcatcgattatctcgctctcatcttccccaccaccagaagaagattcagccccggaggccgatgcccttgcagcgcaggaatccatacgggagaaattacgcgaactgtttgtatttgcgagaattatcagatgaggaatttcgcaattgcgcagataattactgaaaattccaccaggcaattcaacaatttaatcctgatcctatcagaagcggttccacggagagagagagagagaaaaaaaaacccaacctcgtaatgcgaccgcgagcggcggaacggcgtgcgccggcggagaaggtggcgcggcggcggaggcgagggagagggagcggtggcggggagccgaagcggccggcgaccgtcgccatgggaggagacggcggcggcgacggccggcgagagtgtctcggtgtcgccgccgtatgtttgtgtggcgccaagcgggttgcttcgttggcacgaccgcacgagaggatgatgggctagaaatggaatatgccaagatgccatccaattcgaatttcatttttgtatttttttaaaaatttaattatcggtttatgaatttaagaataccatatttaaatcatttaaatatacgattagtggtcgaaatttaataaaaaaatagaatttaaaaaaggtgaatcatgccccatcagttgcactaataagctaaaaccaaagctaaaatttaaattttaagttgaagatattttaaggcactttctttttcagaattgtatttttagttactaataacacaatttttaaaggttttacttatgcattaattattatgtcttaataagttgttttggtttattaggggatatgggtaaccgataatgctagagacaggttggtgcactgatgagtgaattttactgttttcttccatttttttctgaagaatttaaatattttgttaattgcaaacgatcaagttttggtgcattttttgatatatatctctatctatctatgtgcaggttcatatacacatataatctatttagagaacattatgttacacagtacaaagtaggatacgaggagagaaaaacgcagagaaaacatctgttagtacaatgccatccatcaagatcgtcgtcaatggaagccatgagatggcagcagtatcagaaacagggaagcgacggcggcggccagcacacggcagccaccggcgccggcgctggatctcgccgccgccgccgagctgctgctgtcggtgggcttcgccgccgtcgccgcctcttccggtgggctggcaatggcgacaggcggcaacggcgggtccagcacgtcgcccggctccagcaccggcgccggcggcagcgccggcggcagcgcccccggcgctgccaggtgcaccagcgcgccggcgtccgccggcaggatcgcgtagctcaggttcaggctcagatcgctgcacggactccctgcaattcacacagagaagttaaaatttagagcaaatttcatcaaaccccatatttttataatatcgaagttgcataaaatcctgagcattatggccagtggcacatagcctcatctatttattttgacaaaatcccacgcctatacatatttggtaaatatttacttaccgtttcaaaacatgtaatgcatatgaaacttttagttttttatttcttcattaagtttgtcggtttaactcttcactactttgaaaagtattatttcagatgtattgaaatcaattgaaattcgaatcaaggtgggaatttttaaaacattagaccataaaatctcttatgttttacaagtcataatacctacgattttctgtaactttgatcataaaacgtgaggctttataaaatttacttttaagatgattaatttatattaatttcttgagctgaaaaactagttctagttggtgtctatggctttgtgggaggtaccccttccatttcagattataagccgttttgactttggccaaaattaaactacttcaagctttgactaagtttgtagacaaatatactaatatttacaatactaaattagtttcattaaatctataattagatatattttcatatatatttatttttggatgaaaatgtacttgaagtaatttgactttaaccaaattaaaacgacttagggcctgtttagttccccaaaattttttcctaaaaacatcacatcgaatctttggacgtatatataaagcattaaatatagataaaaagaaaaactaattgtacagtttgcatgtaaatcgcgagacgaatcttttgagcctaattaggtcatgattagccataagtgctacagtaacccacatatactaataatggattaattaggctaaaaaaattcgtctcacgatttccaggtgagttatgaaattagttttttcattcgtgcccttataatctgaaacgaaacggggagtaggagattgttgcttacggaagtaggtggcggcggtggcggggtactcggtgatgaggccgtcggccatgacgtggaaggcgtaggtggcgatctcgatgatggggtcggcccagtagtcgaatccgaggttcatgaactcgttccggagcacgccgacgtagacggtgaggttggcggcgtgcatccggtcggcgacgtcggtgaaccgcgtgaggaagaagccgttcacctgcgcgatcgacccgcggccgacggtcaccgccgtcgcgaactgcttgatctcctccaccgacggcgccgacgcgtcgctgatcgtctcgtccaccatcagcacccgcctgaacgccgggaacttcttgaacgccgccagcaccgacgtgtcgtccgacaccaccatcagctccggcaggtgcccgccctccttgtcgtagctcgcgttcgccagcgcccccgacacggcatccaccagcccgaggcctcgcttcgcgaggaacgatgcgtgctgcgttcaatatcacaattcatcaatcacaaaaaaaaaaaaaaaattgctcagcctcagctcaaccatgatgatgagatggattcaggttgagaagagaagcatggtgattgtttgtgtacctccatctcgaccatgatgccagagacattggtggccttggccaagtctaggaattcaggcaatgtcacgaacttgccggcgttcttcgcggcggggttcctcttcaggcctgcctgggtgtacggaccaagaagatcggctgacgaaattgatcggacaaacaaaacaaaagagcaagatgtttagtgaatgaatatgtgatcatcttggatgaaataacgcatgaaaaagaagatttcaggtgctcattattacgttttaatgtttggatttcgctccatgtgagatcaaaggagaagatgcccgacttgttctgaatttcactgacagtggagattttggtcatgaaactggtggacgccgtcgtgctggtgctgaggtctgcagatggctggcagaaggccacgccgtctttcgacatccggaccgcgcaatcgatgatgtcggcgccgtctttcaccgcctgctgatatgcgaggtcagtgctgcccgggtagacgccgctcgcgccattgtgggttatgatcagtggcctgcctccatctgatcgaattagagaaatcagtgcaaatgtaggaatggtggtaacttatagcttgacaatatgtgacggtgaacagtaaaagtattttgcaacttaccaccaccaggaggaggaagaggattgcccttggtatttgccaaacacgctgcaaaagatcatcaaaatgatgctgttattgatgaataatacagtatgacaattttcattctttcatcagtaaaatttctgcatatgttcttcttaccaacagctcctgatgcagtgggagggaaatccgttatcacgccgtcgacagagaagtttgcattgccaatgtactgcaagtactctgcactgggatcaaagctgtagttgtaactcatggagacatcattggcaaatccagaggcaaaaacttcaagcccaagggcatgtgcatccttgaccaaactagtaggcagccgcagatactggtccttgcccaatggccaaatgtattccttggggacaagaatccctgatgcaaaggccttgacggatttcaggtctttcaggatctctccatacgttttcttggtggtatgctcagcgacgtcttctctaagaaaccggaaaattagcttggtgttgcttttcttgagcttagcacccacgtttttcaagaatccaatttctggtgaggagatgtaagcgacactaaaatcttttggtaatcctaatatgtaatcttcggcacttaatttgtgctcctggagaaataaagcatactgaaagcaaaaaaaaaaaagttaaaaaagaacttgtgttagagagacaatatagcgtactaagaaaagtgcctcagtaagtctgtgggtaatagtgaaataaaaattacctctacattaacccataaatgtgggggcttgagtccgacaagatcttcaagggtaaacattcccatggctccatcaaatgtgcttgggcgagaaaagatgtcctggatcactgagggatgatcaaatcacagaataacaagtcagagaaaagttgcagcaaaaaaaaaaattatagcttcagaatttgctacaacctgctatgtggcgaaccacctccaaggctccattccaaccttatctattcaaaatacataagaaaattatgaatcattcatatatttttatattttgaaattgacttcattcatggagcacaaataaaaaaaatgaatttttatttaaagactgtatgcaatgtttcactttgaagactgaaattactcagtttttttttctgcttacatgtgacattctgatacagctcgtctgcggtgaaatccaaagcaaaccacccatggatttcctctccattcaccttgtatgtcttggccctcttagggaaggcttcggcgataagcgtcgagttctctaatgtcaatccagttttgcagaagcccaaaccatcactggacaattgcagatcacagtacagaaccacatcatgcaagctactcgacattgcaaactggtacgagaactggcttgaatcaggaaacaagccggagaaccctccacgagcaatgacaagaggacgctgacctgtaggacaccaccacaaagattagcaaatcaaaatgcttgatcaggtgaaacaacaatctttccaattgaaaaaaaaaacagcaaagagaacaagaagatgtttacctccaagagtctgccatttctgtactggatctttcaaagccgcatgggctccatgaaaaagtaggaggatcaagaacatgtgaggatatctttctcccatttggacaggaggagcaccctgcatcacataatatttttgtgaactaatcaaacagcggagaagattaaacaatattggagtaaaaaaaactataccaaaacaaatgtacaaagaaaccgctgaaggatcatacatgcaaatcaaaggtgaaagataacctctcatcaaacttatttctttttcagagcagagaacttcaaatttaaattcatgcaaatcaaaggcgaaagataacttctcatcaaacttatcttttttttcagaacagataacttcaaatttaattttgcagagcaacatgctcgagaaaaaaaaagatacatacctcacatgaaactg

SEQ ID NO: 7649 - DNA, 60800 bp, Oryza sativa
agaacccaatacgagattaatcaaaattcgaaataaaaataaaaaaaaatctaaaactagaaaaggaaaggagagtccaagtagaaatacaatttaaaaatagatgaaattcggaattaaaaataaggaatattaaaataagtttccatataagaacccaatacgagataaatcaaaaatcgaaataaaaataaaataaaatctaaaattagaaaaggaaatgagagtccaagtatgaatacaatttaaaaatatctgaaattcgaaattaaaaataaggaatgttaaaataagagtccatataataacctaatacaagattaattaaaattcggaataaaaataattcccacattaatcggagaaaaagagaaaaagaaaaaaaaggagagtccaagtagatgtataatttaaaaataactgaaattcaaaattaaaaataagcaatattgaaagaagaatccaatacgagattaattaaaaattagaataaaaataaaataatatctaaaactagaaaaacaaaaagagagttcaaataggaatacaattttgaaacaactgaaattgaaaataaaaaataaaaacattaaaataacacaatacgatattaactaatttttttaaaaaaattctgaaattagaaaaagaaaaataagatatcaattaggaatacaatttataaataactaaaatttgtgataaaaataaagattattgaaagaaaagaccatctaaaacacatgacgagataaattaactaacatgcctataaagaagtagagtggtggcggttgatacgagatataaaaattgttaataaaacatcaaatagaatcctaatgacgattaaaaggagagacgtcaggcaggccgtgaagcaaacgagtaaggcgattgccgggacttctagaaagtaaaaaaaaaacaaaccccattgataatcatattcgatttttaaaatctcaatgataataaaaaggagaagcagcaggcggggtgtataagagtacagttgcagagctgccgacggttaacaggacttctagaaaataaaaaaagaattctagaatcacaatgataataaagagttggcggcggacgggctatagaggggcatagtggcatcgtttgatgggacttctaaaaattataaaaaaataaaactacaagtccaatttttaaaggttttgaacttctaaaaagtaaaaaaaacccaatgataatcatgttcaattttaaaatctcaatgccaataaagaagggagacagcgggcgagccgtaaaggagtacaatagcaaagccgctgacggtttggcgggacttctagaaagtaaaaaatgaacccaaacgataattatgttcgatttttaaaatctcaatgacaacaaagagaaaagacagtggacgggccgtagagtagtataatggcaacgtttgatgggacatctagaaattataaaaatgaaacccaacatgacaataaactctaaaaactataaaatccaatttttaaaggttccaagaagaatgaatgaaaatagtggtagatcgagcaagcaaataaataaggagatgacataagagttagcaactggtgtgacttttaaaaactatatgattagaaacacggggatagtaaggtttggtctttcaaagtcttaaagacaatgaaatagctagatagctatttaataaattttaagtaaaataatacttaaaaatatatgattttgtttaggtgctagccgcgcaattgcgcgggccacccagctatttaatatgaaatttgttttagaaaaataaatgtacatcattaattgttcggaaaacgttacgcatggaaacgagaaagtgataccatctaaaacgttgtacgatttatgctaatgaatactcgaagaagatgataacttgtaacccccatatggcgccaaagcgaaccgacgacggcaaactcgatcggctatgggcctatggcagtggcaagtgataacagggctgcttttgtcacttgacagggtcacctccgtccggaatatccgtggattctgcgtcgccagggcggagctagtatagctaagggggtgtccatgaacccggttaaaaaaaattacctatattttatctattttcactatttatataccccgttagtttaaatttagacatctgtatcaagctaaatttgattcaaatcaaagtaaaacaagtaaatggaaccccttcgttttgttctagctccgccactgtgcgtcaccacatatggagtaggagtagatggagaaggttgcgtgctgcttcgacctcctcaaactcaaagctcacgacgaagctgaccgcggcaaaggcggatgacgatgaggcccgagcagcagcggcctccatctggacatgttccgtggctcgctctgccaccgcatactctcgtttactaacgctttatttagtcctttaaattcttttataaggttttttaaaaaataattaaatttataaaaatatagtaatatgtacaaaattaaattaatcttattaaatataccattgaatatatttttgataaaatatttgttttgtattaaaatattgatatattttttctataaacttaatcacactgtaaaataattaaaataacttataatataaaatggaaggagtagtattttttttctgatttactagtgataaatccctggccataataactttctattaaaaatgcatcattgttacgtaatattaatagaaatcaggattaatttaaagcttggtgagtcatataccacgactccattaccgtttatgtttgtactttctatctaagttttaattttcatttgtgataaaaaaataattttcatttgacaaaatgtaactcatctgctttgaacagaagacagcagcataagcctctaaacgtggaaacaaatgaaaatattaaattccattgacgggagaccagaaattagctctccgcctctccctccgtccttgaagttctacagctcaagttttgttttaaaatgaagctagatcacctaattagcttcattttaaaacagaacttaagcggtataactacgattaattaggggattgtgattggccgagaagagaagaggaagtaggtgaagaaaatgagtgaaaaatggttataattggttgcatgatccgctcaccattagtcgtagttgctgaaccgactttaccaatcattgaccaatatttccgatcaaaaccgaagtcgctacacatgtagcaaccaatatccaattgcaaacaacaaatatcaagcagtaacaatgtgcagtcaccagcaaggacgaagtgctactgtgctagcctccttgattcgccaccaccaagcgaatgggagaaaccatccctgctactaccgcagccaatggctgcggcggcaatggaggcggagtagataaggtgaagacgatgatggataggccaggttgggggtcagcggcccatgaggttcggaagtttttatgttcgattagtatcgatagacatgactccatagaacttatatgtacaccctcctagtcctctatctcctttctccagccaaaactgagccctggtccaagtatagatggccatatgatctgaggcccatggcttggcccaagcacggcacagcccgactagggtcgtaccgtgtcagcctggcccgacagccggaccgagcctgggctgcaccctcgaaacggtgggccggccggcacggcatgatcgaagaaaaatagtagaggaatccaaaatagacttaaataaccatataaggcaaggcccaaagacaagaggagtataaaacagacttatttttcagccattatggacatagccacagagtcgagggatgagaaatagactaattctgtggagaagcacgatggacccgagtcgtattggaccgtgtgtgtagcccgtgggctggcacgacacggcccggcgtgtaggtcaggccgtgcgggcccgaaaaggctcgaaaacctcggcccagacactgccgggcctaggccgtgctgtgccagacggcccatttggccatctatgggcccaagcaagccagttcaaccagagcctccctccacacatcagttgtgccctcctcatttgctggtttatcaactagtatcaaatttgaattttaaagcttagttttagagttaatgtggattttttatcatattcttttttaccttagtttttaatttttttataccctagataaagtagactaacaaatatttactcataaattatttttgatgcttgctcgtttttttcctgcactcataacacaactgatcactacttcgggtgcaaagttgtaaactcaactaattaccgtaagagggtcagggtttcaatcatttaggtggacgtccactcatttattgccgttctactatcttactgatggatcggctgtgggaagaggtgctcaattcacaatcagcctttccctttttcagatcagtccgcgtccaccgaagaaatcgcggcaaactcggcaaacttttgacgtttaccggacaggcaaagctaccatcacttcgttgtcgttgctgtatatccacgaccacgtcaaaactgatcccatggcgccaaactgaacaccgtgtcgatctccgacctcgtcgtcgccgcgacaaaaaccgctttgatcatcacctcgtcgtcgacgcacctccaccgcatatgtagcagtagacaagtagcatctgcatctgcgtgccatacacgattgctccagctagctgcacctgcacatcgccatggccatggccgacctggagttggagaaggttgcgagcttcttgctggcggcgctgctgccgctcgtgctcttcaagctggcggcggcgaagcgcggtggtggcgatggcggcatgaggctgccgcctgggccgtggcggctgccggtgatcggcaacctgcaccagatcatggcgggtggccagctcgtgcaccgcaccatggccggcctggcgagggggctcggcgacgcgccgctgctgtcgctcaggctcggcgaggtccccatcgtcgtggcctcgtcggccgacgccgcgagggagatcatgagcaggcacgacgccaagttcgccacacggccgtggagccccaccgtgcgggtccagatggtcgacggcgagggcctcgcgttcgcgccctacggcgcgctgtggcggcagctgcgcaagatcaccatggtggagctgctcagcccgcgccgcgtcaggtcgttccgccgcgtgcgggaggaggaggtcggccgcctcgtcgtcgccgtcgccacggcggcgacgcggcggcccggcgaggccgccgtgaacgtcggcgagcggctcaccgtgctgatcaccgacatcgcggtgcgcacgatcatcggcgaccggttcgagcggcgggaggatttcctcgacgccgccgccgagtgggtcaagatcatgtccgggttcagcctcggcgacctgttcccgtcgtcgaggctggccagcttcgtcagcggcacggtgcgccgggcggaggcgaaccaccgcaagaacttcgagctgatggattacgctctcaagcagcatgaggagaagagggcagctgctgcagctgccggcgccggcgccgtggaagacgatgaggacatcgtcgacgtgcttctcaggattcagaaggaagggggcctcgaagtgcccctcaccatgggcgtcatcaaaggcgtcattcgtgtaagcaagtatacattcttggtcatgttctatctgtgtgataatgttagtattatattagaatataaaattcatgctaaatggtagtaagaaataaatttacatgtacaagaatataaaatggatggtaactagtaagagttaaatgacattaacatatattgcaagtctttaattgcacctctactacttgttttatgcaacatgacttcatgaaagtttcaaaattttcccctgcattctataggacctttttggtgccgggagtgagacatcagctaatacactccaatggactatgtccgagctcgtgaggaacccaagagtgatgcaaaaggcacaaactgagctacgtgattgtcttcgaggaaagcaatcggtgtcagaagatgatttgatcggattgaaatacttgaagcttgtcatcaaggaaaccctaaggctgcatcctgtagtgccactgcttcttccgagagaatgtcaagagacatgtaacattatggggtacgacgtgcccaagggtacaaacgtgctcgtgaacgtctgggcaatatgcagagatcctaggcattgggaaaatgctgagacattcataccagagcgatttgaggatagcaccgtagactttaaaggcacagactttgagttcataccatttggagcaggacgaaggatgtgccctggtttggcatttgcgcaggttagcatggagcttgctctagcctcattgctatatcatttcgactgggaactccctagtggtgttgcgccaagcaatctagacatggaagaggagatgggtatcaccatccgaaggaagaatgatctttacctggttccaaaggtccgtgtgcctctatagtttggctcgtaactgcttcacacaatatgtgtctcctgtgacccgtacctgccaagtagcgatcatgagcattccattgtgtttcatgcccttatggtgttatgctgctcaacttttttaatgttttctcgaaataagtaccatcatagttgttcatgtaactataaattacgagtttaatttgtgtcgtagttaacaagctcgagttgtttgtgttgttttccctttgctaaaatgctaaaacattcattggagagggagagagtggtgtaagctagtcctaaagaaaattaagaacaccaaactcctaaggtacaatagacaattcagtaattagtagttgagttttgaactatgatgggttcaatactaacattcttaaaagtagaattgaaaaaaatatgtcatatttcaaaatcttcgcacttccaaccggaatggaaagcaaattgaattgactccaccattgatttttttcttaaaagaaaagattaactcctccatggtcacaacgtatgccttgcaaatcgcaagaaaaaaaaaaggaagaattaaaaaatctgcaagacaaaatggcaatacataggttggtggagaggatgcagaaattggaaatgttgcaagcagaagaaatttgaacatggaaaaagaataaggaacaaaaaatgttgaaaaacttgagaagaaacattaaagccaaagtgaaaaggttgaattaatcctaggggaaaaaggagagggtatatacctggaaattgaaataaagggatgaaaaatgtttggatggacaaaacatggaaataaatagaaaagagactgcctatcgaatgtacattcaagagaatttctctcacaaatctgtcaaatgtaactacataattgtaatgaaattacaacataactagtatataactacacaattcgaatgtaagtcggatgtaattcataaccgacaccgtggcttgaaatggaagggccatgcatttaagtctagggttgtgggatcaactcacatcagctactcgcttgtttctcgcatggagcacaaatcttgacacgcatccagtggcaaaaaattgacagattttccctcaattttctgttgaatgtggtacaacagatcctaattgaaaaaagaagatatttgtgttggaaaaaaaccatcaaaatagccacaagacacagagagtagcaagggtccagcctaaaatcaattgcctctctcataactgccactctgccagctgggctcaattcatcgttttcacagtttgagatcactcatttactccattcggtttcattttaattgacattttggacaatgacacggattacaaaatatatctttgatcttatttttctactataatatatacaataaataaatgcatgtttacttttattatagtgctttgaaagacaaatctatatatgttgttctagtttgtttaaagtaaatatttttaaagttattaatggtcaaagttataaaagtttaacctaaccttgtctaaaacatcaattattatagaaccggagagagtatctttttcattgattttcccgacaccaaaattctaaaaaagtcaagcaaagccagtggccaccgctgaactcaaaatagacgttattacataatctgataatcatcatgcatccatctatctcttgcagccatgcatgcatcagctctctttggaagttcatccctagcaattactcccatggcgacaaaatccaactcaccatgacaaagctgcttctgtcacttgccacctagtagtaaacagtaacacctctgcatatatgtatctgcatctgcgtgctgtgtgtgccatggccatggatggcatggagaaggtggcgtggtgcgcttgcttcctcttcctggctcttatggtggttaggttgaggacgaagcggcgtggcgacaataatggcggggtgaagttgccgcctgggccgtggcggctgccgctcgtcggcaacctccaccaggtcatggcgcgcggcccgctcgtgcaccgcaccatggccgacctggcgcgccggctcgacgcgccgctcatgtcgctcaggctcggcgaggtccccgtcgtcgtcgcctcgtccgccgacgccgccagggagatcaccaagacgcacgacgtcgcgttcgcgacgcggccgtggagctccaccatccgggtcatgatgagcgacggcgtcgggctggtgttcgcgccctacggcgcgctgtggcggcagctccgcaagatcgccatggtggagctcctcagcgcccgccgcgtccagtcgttccgccgcatccgggaggacgaggtcggccgcctcgtcgccgccgtcgcggcggcgcagcccggcgaggccgtgaacgtcagcgagcggatcgcggcgctcgtctccgacgccgcggtgcgcaccatcattggtgaccggttcgagaggcgggacgaattcctggagggccttgccgaggggatcaagatcacatccgggttcagcctcggcgacctgttcccatcgtcgaggctggccagcttcatcggcggcacgacgcggcgggcagaggcgaaccaccgcaagaacttcgagctgatggaatgcgctctcaagcagcatgaggagaagagggcagctgctgcagctgccgccgccggcgctgtggaagacgatgaggacatcgtcgacgtgcttctcaggattcagaaggaagggagcctccaagtgcccctcaccatgggcaatatcaaagctgtcgtccttgtaagtactctagttgttctccctttttttttcttttcctgtggatgctaatactatatctcccttaatttcgataggatttattttattttttaaaaaatctttaataccaaactataaatttatttggtcacaaaaatataacttaatagctactccccctttcgcaaatataaagtattttggccatctccaattgtcaatagatattagggattttgaactactatggacatgttttaattgcacctagcacctatcacttaattttgttcctttcttatcccccaaccaccatgaaatcatcttcgcttatttaatagaggatatcattgtcttgttttcatccttaatctcgctaaaaaaacatagcatccattatgatggagtaagacacaactttaaaatataaatccactaccgcaacaatacatctagtttaactactgtttaggtcagaatatataaaatttacctttaaagaataacttatacggataaatggagcgagtacatgaatttcctttttataaaaaagtatgcatagtgaacataggaaggaattgatacaatattttctacactttatgggaaatcatgtattttttaccatgcatataggacctttttggtgctggcagcgagacatcggcaaatacgcttcaatgagcgatggctgagctcataatgaatccaagaacaatgctgaaggcacaagcagagttacgtgatgccctccaaggaaagcaaatagtgtcagaatatgacttggttaaattgaagtatttgaaacttattatcaaggagaccttaaggttacatcctgtggtgccactacttctccctagggagggaatgtcaggagacatgtaaggtcatggactacgatgtccccataggtactattgtgcttgtgaacatgtgggtaatcggtagagaccctaaatattgggaggacgctaagacatttagacccgagcgatttgaggatggccatatagattttaaaggaatgaactttgaatatttaccttttggagcagggcgaaggatgtgccctggtgtggcatttgcagaagcaattatggagctcgctctagcctcattgctctatcactttgattgggagttccccgatggcatctcgccggccaagatggatatgatggaggtgatgggttctaccgtgcgaaagaagaatgatctttaccttgttccaaatgcccatgtgccggttgccccatagttgttcacacattcgtacttgttcatcttgcaacctctgtaataactgatgtaacttctttggagtaaagccaaaatgaattcaattataaaaaaaaaagagttcgaaattgttgctgcgctcctctagggcgcccctaatgcgcgacaagtcgcgcagtcacacgagcgcgtgaccaccaggtccactactactactcatagtcatacactactactactacagtactactacgtgtatatatgcatatgtatatatcttgtatacatacatataaactttgtattattgtatacatacgtataatttttatattaataatacaaagtttatacgtatatatataaagtatatatatacatgtatatataatttttatgtgtaccaaaaaatcaacgtataaaaaatatacacatataccaactttgcatacgcgtatacaaactttgtatatgtacatgttaaaaaccgtgagaaaaaaatatgaatacaaataagtttgtatacatatgaatacaaacttggtatacacacgaatacaaactttgcaatatgtacatcttaaaaaaaagggaaaaaccaaaaacagaagagaaacgaaaaaacaaaaaagaacagaagagaaacgaaagaaaccaaaaaaagggaaaaatcgcacctccgtcatggcgcgccgtccgccgccctctccacgcgcgacacatgtccagtcgcgcgggagagactggctgcccattagctttttcggctcctctgtctcctttccccactcaagtcgagccctgggcctcggccgaagtatgctagagtccagacctatctcactctaaacatcctggaccagttgtcattcagtttttatcatttgttggtttgtttactagctgcaatcaaaatctgaaatttaaaatttagttttacaattaatttggggtttttacatcataatctatttttaaaactttatattggtatttagaagcctaataatatagatgtaaattttatttttaagttcttcagtcgtaattcaacctatcactctgaggtcccgtttggatcatttcgtccctggactaaaattagtccctagactaaaaactttagtcccctactgtttggatctagggactaaaagggaagtcacgtggaccgagggagagagagaagagagaggctatcactttagttcctataagtacctctaaggacattcccaaatcccaacccatggtgtccataactagtgtctatggtgtcatgtcaacaagacatcacaataaaaactacactctacaacccatggtttcttaaagtgggccattaataaatacatcatctctcttctccaccaatcatatttattcttcatttattatgaagacactattctctcccaatgcaaaacttgatagtgtctagtgcatagattctcgtgttgaagctgtgtcttgcatgagactcagtttcttcctctcttcactctctctctcttaattaatatagtgtcatataagctaaaagtcctacgtggcaatgtagttaatgccatagacaccatcctagatggagggttgggactgccctaagagggactaatggattttagtcaaatatgcactttttaattcctttttagtcacccatgtttggattcttagggactaaaagggagggactaatggattagtcccatgaaccaaacagggactgaatcttccaaaagagtggtgcaaggttggaaactccctctgtcctaaaaactattcttttggcctttttttttctcaaaaacaccattgtttcaaaatggggtgaattaaacctttttgatactattttattattttgttatccttttagccatgaaaagtaatactacccgttttctctctcttctcgttttctatctgcgttaacgattaaacatagagtaaatttcctgtgtacccctgaaaactcactcaatccctttcatacccttgaaatttacccgatcccttctatacccctgaaatttcaatttgatcccttccatgcccctaccgttacattttccatcatttcactgttacgtttggttgcaaatgtcctttttgcccttgatgatttaggtttaaatataagcttcaaaaacaattaaaaattttgtttgagtgtacagtatgtgcattttataaaactaaagagactaaataattagtgcataaaattttgacataaattttgaaaataaaataaatgcaataaattaaaatttttatttgaaattttaataggacaatggatttttttatcgggagcattcattaaaagaatgttgtgaacattggtagttctatttttatatgaatgctcctcacttttatgactttttttttaaaaaataaatatgtatttttttatttcattatctatcaatattttttgggataaataatgcatcgaacaacaaactcataactataatagtcttatgcaagaagcttttatatttttaataatgtaattcatgaatttctttgttcatccaagggtaaaatggtcatttttatagaaaatagacggtcaactaacggtgaactgacgggaggggtatggaagggatcagaattaaaaggaagtaagtaaaatttaggggtatagaagggattaggtaaaatttgaggggtatacaagggattttctcttaaacatatagtagtattttgatctcctgcttatcatggctttaactagctaaagctaatgtgaaacaagagtcttttagagccaggagtaatggccatcctacttggaaggccaaaacatgaccaaaaaaaaaatcaaaaaatgaagatctttttgttaggaaaaagtaacataacaaaagccacgagataaataagcaaacgtccagcctctctcaaacctgccagctggtgtcaattaatcttttccccttttgtgatcgcccatttatcatttttatttattttccagccactaaaattctcgtaagcatagccagcgcccagcgaccaccgctgaagtcaattaattacaaaatcggacgaccttaattagagtacatcatcatgcatccacctagcatccatctcttgcagccatgcattgcatcagctatctttggaatttcataattagcaattagtaagcagagatttactcccatggcgacaaaaatccaacaaagctgcttctgtcacttgccacctagtagtaattaacagtaacacctctgcatatatctatctgcacctggacgcgagcgtctggcttagagtagcactcgatcgatctgtgttgccatggccatggatggcatggagaaggtggcgtggtgcgcttgcttcctcttgctggctctcatggtggtcaggttgacggcgaagcggcgtggcgacaatggcgcggagaggctgccgcctgggccgtggcggctgccgctcgtcggcaacctccaccaggtcatggcgcgcggcccgctcgtgcaccgcaccatggccgacctggcgcgccggctcgacgcgccgctcatgtcgctcaggctcggcgaggtccccgtcgttgtcgcctcgtccgccgacgccgccagggagatcatgaggacgcacgacgtcgcgttcgcaacgcggccgtggaacccgaccacgcggcggctgcggtgcgacggcgagggcgtggtgttcgcgacgtacggcgcgctgtggcgccagctccgcaagctgtgcgtcgtcgagctgctcggcgcgcggcgcgtccggtcgttccgccgcgtccgcgaggaggaggcgcgccgcctcgtcgccgccgtcgccgcgtccccgcgcggcgaggccgtgaacgtcagcgagcggatcacggcggtgatcacggacgcgacgatgcgggccatgatcggggacaggttcgggcggcgcgacgagttcctggagctgctcgccgacatcgtcaagatcggctccgggttcagcctcgacgacctgttcccgtcgtggcgtctcgccggcgccatcggcggcatggcgcgccgcgccgaggcgaaccaccggaggacctacgagctgatggacagcgtgttccagcagcacgaacagcggagggttcacgttgctgcgccggctgacggcgccatggacgacgcggaggaggacctcgttgacgtgctcttcaggatacagaaagatggtggcctcgaggtgcctctcaccattggcaacatcaaagcaatcatcctggtaaatgctactacttctgctgctctgatttatgaagaacacacattaattcatagtgttttagtttacatatagaaaatagatttacatatggaagtcatctatttctacattattatttgcagaagagtaattcatttttatagaagagtttgttagtctttttttttaagaatgtctattgcttagttgaggttgcatcttgttatttcatttttctagaagtgttagctagtcttttttttttctaagaatgtctattgattagttcaggttgcatcttcttatttcatttttctagaagtgtttgttatttcttttttttctaagaatgtctattgattagttcaggttgcatcttgttattccacaggacctcttcaatgcagggagtgagacatcagcaaatacgctccagtgggttatgtcagagctaatgaggaacccaaaagtgatgagaaaggcacaagcagagttaaggaacaacctacaagggaagacaacggtaaccgaagacgatctcacaaatctaaagtacctgaagcttgtcatcaaggagacgcttaggttacatcccgtgctgcccttacttctcccaagagagtgccgagaagcatgcaatgtcatcggatacgacgtcccgaaatacactaccgtttttataaacgtgtgagcaatcaacagggaccccaaatattgggacatggccgagatgtttaagccagaacgctttgacaatagcatgattgacttcaaaggtacagacttcgagttcgtgccatttggggctggaagaaggatctgtcctggcatagcatttgcacagtccaatatggagcttgtgcttgctacactcctatactactttgactgggagcttcctagtggtatgtcgcctgaagagttagatatgactgaggacatgggactatctgtccgaaggaagaatgatctttacctacatccaacagtttgtgtgcctctgtaggccgtagtctcttttgaagtgtttgtatgacaagtcatgcattatgatgtgcccaatgacttaataaatttgttgcttgaatcaatactttcgtatatttttcgaaacatttgaaatttagccaagaggcgaacaatacatgttattcaaacctgacttagtaataggaaatccacactatctaaatgatctacctcgtccactcacatatgtgctagtctgctagtagggggcatggcatgtgattgttgaatttctaataatctaagaatagattgtccttctttttatcctagaatatattgtccttgattgtgagcatcattttaattcatggaaatgctggctagaaaagaaatgtaaggagagggagaggtgggtggatcccacatctggagaagaatataataatatcaatgtgaaacacttgtgataattagtgtagtagagaaagtcgagatcaaccatgtaccttacctaccataacatggtatggacaaagggacaaggttgtctcaactactaaacatatcggacctagttacctagtgtgctaggtatacaaaatgatggaggttcgtgtttttcttttaaaactgtaggatgattatgttgctcggagtgttacctaagtttaaaatatattggaattgaatttagtgtccataacggacctcccgctatggttgtctccagatgagcacgacaggaattagccgaatctattgtctaggctcataaaaagttaatcgtcaaaaaaaggctcataaaaaatttaaaatttaatatgtcactgacaagaagcaattatgacatttcataatactattctgatatatgaaccccataaaactcataataataggtattctcatgcaacttgtagggtcaatatcgtgcctcggtaatgcctcatgtgtcatgtaataatatactagacaccatatgttaaagtgtatcttcatatcttctactactaggtatatccccacaataccttattaccttcataagatattcatacaaataataattgattgtctccctatcttaattctcttatattttgagactgagaaagtatctaattaatgtgccggatcccagatatctatatgtaacgctccgcttttcgtgagacgttaaaaactaatttggcaaaatcctaattgcgaaaatttcgttctttgagtgttgagtctaagttgtgccaaagatctccatttaaatccctcccttgtctcgataccctgttatcaaagatcgtctcctcaaaattaccatcccaatgtagtcccgaagctcgattccttctattcgaaatcccctcctggaaccccatccgtgaactttgtcgaatgcccgaatcctaactccgtccaaggattcaccttcgcgtcataagctctctccttggttccttcaaaccgattctcaaattcgaattcaacctctcaggttttgattcatctatctttctccctgtattggttcatcaatctacccttgttttctttctcgaacttctgacccaagtctgaatatgcaaatcgagatcacttccacccttgaactcaaaatcccaagattcaatccctttcgccctgagttctccccaaaatgatttccgttccgaaataatctcaaagtccgaacccttctattcagacttctctccaaaatccttacccacatatctcgttgagtagtcaaactcaaactctcaagttacactctctttctctaaattatccatccccttttcactcgtctccgaatattgttcccttccttgactccttcctattctcccgagaccgagtatcaacctcgaaattcgaatccagactccaactctaaaacctcccaattaaatctctctgtgaaagtctatttaacctccctcataggttggattccttcatcctttttccggtccacctcttccttctcttccatcccatctctctctgaatctcgatctatctatctatcgatcgatccatctatctatctactatggccccgtttggtagagctcctaactccaactcccaactccaaactccaactccagtgagagctagctcctctaggagctgaggtaggtaaaaaagtgtttggctagattactcagctccacatttctacatcctttgtcgccatttcatcgaacaccttctaggcgtcgccttgacgttgccgccgcagccggtcagcccacgagccaccgccgccgggaagcccacgcatctccgccgcctcccaagccgctgcgcaagcgccgccgcacaggccgccgccgtcgcccaggctgcctcctgccgaagcccccgcacgcgagtcgcctaccgacgccgctgccgcgtgccgcccgtcgcggccaccgcaacaccgcccgcagccgccgccaccgcctgccgccgccgatgcgccgtggcctgctgtccccgtatgctgccaacgcagacgccgccacaactggttgtggccgtcgtcggaggatggggaagaagatgggccgccgccacctgctggccccgccgccgcgccgcccgtcctcgtcccccaacagccgctctccgccgctaccgcagccccccgccgccagcctccggccacgcgtgggcgccgcccgtcgtcgtcccgcagccgccgccgcccgccgctgtcactgcccgtcgccgtcgacgctgctgcagcccgccgatgccgccgcactagctcgggattgggaggaagattgggggaggagagagaacgggaggaaagaaggggtgaaagggtagttgagtggcattttcgtgtaaatacactaaaatattagagggtagtgggtcttttggggtggagtggagctgtggagcagcaaaaacccagctccacccccgtagttcattttctaggagtagctctgccaactccactccaaaaaaagatgaatctggaccgtttggcacagctcccgctccaggtaagttggagttgggagctagagttgtgccaaacagggcctatacctatctatctgtttatctatccatctgtcaatccatctgtctatccgtccctctacctatcaacctacctttctgtctatctatctatccatggcattctaccgctatctcccttgttccatttttgaataatgatcttccctttttgaaatcctctgaaataatccttcatgccgccaaatacaaatccatcccaaaaataccaaaattcccgcttttgaagcccttccttgacccctcccttggatccaccttgaaccctcgtgtacaaatatacaaattgaattcaaattcaatctccacatcaaacttctctccaaaacaaaccttccggtaaaagtctattttacctccctcgtgatgatttgggccgaaacctgccgctggcccatctctccccagctccctccatctccacgtgcgccgcacatgaccaccgaaagagagagcgctgtctctctcccttccctctctcgaacgttctctctctctctccctcgccgcccccaaaccgctcgccgccgtttgaatccgctcgccgtttcccgtgcgctcgcgcgcgtggccgaccgtctgggagacgccatcgccaccctcggtcgtcgcctgctccgacgaccaccgcgtgtccgtgctcacctccaaacagtccccgtccttttgcagtcgtcgccggcgtcatcctgtcgagccctgcgccccacgccgcgtgcgtccaaagccgcgaggcacagctcgtgctcccgccccctctcctcccaaaaacggaagggacatgcctcccttttcaccgtccccctcccctttttcccttctgggctgggtctctctctctcccgcccatgtctccttgcgcccggaggcagagcaccatgacgcagacgccagtggccagctcgccgcccccaccttgaccgctccacgctgccagcccgcgctcgcgtttcaaatttcgccgtccgatccaccgccttcgccgcccaacgcatccacgccatcgccgctttcgcactgcccacgaaaccgccgctgccgcccgtgaacaccagccgagctcccttgaccgccaatgtcggtttccctcctccaaaccgacctctcctcctcgcctataaagcccgcgccctcccctctcgtttcgtcttcgcctcgctcgaaacacccgcgccattgttgccggccgccagctgctcgcccccgtctcgccgtcgcacggtccgtcctctgccgcctcctccctcaacctcggtcaccgtcgcgcggccaaccccggagcatcgccgccttcttggtcgccgcggccaagaacgccaccgccgcgaccaagggcgccaccgcacgcctccgttgccttccccggcacgcccgccgtgacacgatgccgcctcggcatcgcgttcgtcgccctgcgccgctgctcgtccatgcgccgccatcggccttcccatcctcaactcgccgccgacgccgttacctcccgtcggtgagctccctacctctcttttcctctgtcccagcactcgcgtagctcgcgtcgcgcgtgctctgtttccgccaccgtgcgcaatcgagagccaccgttggcctccctctcggcgactcctctagccaccgccgttcttgagttccctctctacctccccaagccgttgtttcagccgccggcctcccctctcgccctcgcgtcgcgtcgcccgattcgccgctgccgcgctcggccacttccgctgtgcctcccctgccgtcggcctccctcctctccttgattcccggcgccgccaccttcctcgggccccccctcgacctccccaacccctccccctggccgccgaccttcctcctcgctcccgcgccgtgccgcccctcccgccgccgcaaggcgccgccgcgagccacagcccggcgaccatcgggtcccgcgtcaccgcgtgtgcgccgcaaccccataccgcgtccactaagcccgagcgcgtgagccgcatcccttcccatcgcgcatccacgtcggcatcccggcgagcttcgccgccgccgccggccgtcgtcacgcgtcgtctccccaatccgagccatggaatcggttctccttgacctcctctagccaccggtgttcgtcgctcgcttcggcttgccgctgttcgccggatttccgccgcgcgccgtgagccgtccgatgccattcccgcccccccctcttttctctccccatccgacgtggctgcccacgtggcgttgaccgggcccgcccctgcccagtcagtcggtcagccgtccccctccccctctctcccctggctcgtggacttggcccattggccagccttcctcctcggcctaacaaaacaaaggaagtttacttttactccctcttccgagtccggtgctcacacaccgaagagctaaaggtccgcaattgctccctccaattgctcctctctctctctctcaccttcttattggccccactcgtcaatgagtcaaagataatcttgagaatgtctttccaatattccacaaatatttctctcttctataaattcagtaaattattttatcttatttcatgggttaataaatctttttcccttgatcccataaatcaattctctattccaaaatttcatgaatcattttccttataaatcatttcctttggtcccgcatgtcagagatggtcaataatattcttgagaatattatttctataaatttcatgaatcaatctccccttgttctacaaatatcttccttcgccagaaattctaattaaacttccaaaattcgtatctctcgatccaatcgtccgattgaccccgttccacttccagtaattccataaaattgagatctatttaatggcactattatttagtctaaatagggtctttttcttggtctcttgtttaggtttttgtttgtttgcgcatagttgcggttaccggattttcgtcgatcgtggatatcttgaagattcgtgaagcttcgtgaagaccctgagcaaggcaagccacctttgaacatattgagcctatatttgaacttaattatattgcttacaaaatattatgcattgataggactacacttaatttgtttgccccatctgaaaggcagaccggtgggcctacccaactcgttgcatctgatccttccattgttaattgttatatcatgttcccttgtaactatctagttgcacctcgatattcgtgcactctgtgcgagtatcgacggtcgccttcaaacttaaaatctgagtaacttcttgggtaaaacttggtttacaaaagctttggaaaacccgacgcctgggtcggtgccttgtgaaagaaaatgagttttaaaaataaaactcgcgacacaaggccattcctgggcggaatacttgtgcggtcgcatctaaggaccgattcctttggaattacatccgagcatacaatagtgtgaccacacgggtggaatgggatgcccctggctgagtaaattgctaatcgggggagccttgatgccgagagacatgtggattcgccagggtggtgtcggggaggacccatgggcttcctggcacagtatggtctgggacctaacctgttgttggtctgggacccctctcgtcggcatatggcaatcctgtgtctgctctcgaaatgccttgtcatgaaagcccttaggtcaccagacgtggtcgttctacacgggctaggtgattcgggttagtaatgtcgtgtgggtaaagtgtaccccctctgcagaggttaacaaactgttcgaacagccgtgcccacggtcatgggcggatgtgaggtgattccttagcgtagtttttgttttaccctgttttatgaaaaggtgttaaggtttgggaaacctaatgcttgggaagcatttagctaccctggggacagcgggaccgggtgtccctggaagtgattggtcgtttggggacctctattatcgggaagtttggaaaattggtttggtttgggaaaaactagatttgaagccaactctgggagttgtgcaaatcgtgataaataaatttgttacttctcacctcccgaccgagctgagacttgtctcgctctggttgtagaaagcacacacttagattgttgaaaacttgaaaacaaaactgtttgcaaaataacagccttcccttgaagcctgcattaaccacctaagttcccctggcttgctgagtacgtaagtactcacccttgctctctatataaatatagttcagtcagctccgaagatgaagttgaagtgaagtaaagattagggtttcgtcctagttccctgctgctgcctgtggtgttgggtgttagaccgttggttccgctgctgctgctgttgttggtgttcgcctcgtccgtgtcgtcggttgcattctcgggctgtctgagctgcaacctaagttaaggtaaataagtcctctatttattttaaggattgcaatgattcatatttgtcaccgtgggtaccagcgctatgtcctgggactggtactgagatcgcggtttcgtaggaagcggttcgcgccgtttttcccacgacacgctcctgtcaggtgccgttgtacggcggtgccagattcggggcgtgacactatacagctaaaaattgactctctccctatctaaaataccttatattttgagattgagaaagtatctaattaatgtgccagatatctatacagctaataatttattatctccctatcttaaatctcttatactttgagaccaagaaagtatctaattaatgtgctatatatatatatatataattgattatctctctatttaaatctcttatattttgagactgagaaaatatctaattatgcgctagatatctatacaactaataattgattatctccctatcttaaattccttatattttgagattgagaaagtatctaattaatgcgccagatatctatacaactaataattgattatctctccatcgtaaatcccttatattttgatattgagaaagtatctaattaatgtgccagatatctatacaactaataattggttatctccctatctctaacaataaatctccagctagttggttttgctttacatatgaatcagtttattattgaaggcatgacagaactccactgtccatagctaccaagtgatctgacaacagcaaagtgagagtggattctaagttcaagatgtaggaatatattatatatactctacttacttgggttaagtggcatgttcacgagtgtatgagtatgaggtacgtgtctattgtcgtatatacatatgcattttccgtgtaatcaaaactaaataaatataaaatactctagttagttttcaagcgaacactctatgactcactcgacaacacttatccaaccatacacaggtaccatatacagatatgtatcatccgtgtactaaaaaatagtaatatgctctactttttttaagcgaaatcttccactcactcactagatacttgtccaaccatacataggtgccatgcatacatatatatcttctcgtgtaataaaaaatattaaaatattatacttatttttaagcaaactctccttcaatagacacttgtccaaccatacataggtaccataaatacatacatatcttctcgtgtaataaaaattattaatacattatacttatttaagcaaacactcctttaataaacactagtccaaccatgcagtggtggagtagtatatttgtctttttttctggatgtacaaggtatcatcaaaatcacagctatcaagccacaccacttcattaactttctcattaagaattgatttcgccttaactatctgccaatattctccaggttggaagcctctgctgccaccaaccttctcccatgtataaatagctgggtgcatctcgtccatggcactcacctcaccacacacccacagccgccgccatggagcaggtctcgtgcttcgccgccgccgccgccgtcgtcgtcgtggttctcttgctcgcccgcatgctcctcgcgccgcgcggggagtgggacgggctgaacctgccgcccagcccgccgcggctgccgttcatcggcagcttccacctcctccgccgcagcccgctcgtccaccgcgcgctggccgacgtcgcgcggcagctcggctcgccgccgctcatgtacatgaggatcggcgagctcccggccatcgtcgtgtcgtccgccgacgcggcgcgcgaggtcatgaagacgcacgacatcaagttcgcgtcgcggccgtggccgccgaccatccggaagctgcgcgcgcaggggaagggcatcttcttcgagccctacggcgcgctgtggcgccagctccgcaagatctgcatcgtcaagctgctcagcgtccgccgcgtcagctcgttccacggcgtccgcgaggaggaggccggccgcctcgtcgccgccgtcgccgcgacgccgccgggacaggccgtgaacctgaccgagcggatcgaggtggtcatcgcggacacgacgatgcgccccatgatcggggagaggttcgagaggcgtgaggacttcctcgagctcctcccggagatcgtcaagatcgcctccgggttcagcctcgacgacctgttcccgtcgtcgtggctcgcctgcgccatcggcggctcgcagcgccgcggcgaggcgagccaccggacatcctacgagctggtggacagcgccttccgccagcggcagcagcaaagggaggccatggccgcgtcgccgcctgacatcgccaaggaggaggaggatgatttgatggatgagctcatcaggatacacaaggaaggtagcctcgaggtgcctcttactgctggcaacttgaaagccgtcatcctagtaagtatttttcttactcccctgaatgttcagatcagaatagagcttttctactactctggttgttcaggtaagatttttctgctactctgattttgtttttgaaggaaaaaaacagttcagacaaaagttcagaagagtatatatatatatatatatgttcttgcagatagtgttcaattaacttgatgtagcatatgtattttccttagttgtttatctggttaaagtttcacatgtgttgcattttggcattgtacaggatctctttggtgctggaagcgagacatcctcggatgcgctccaatgggcaatgtcagagctgatgagaaacccaagagtgatggagaaagcacaaaacgaggttcaaagcatcctcaaagggaagccatcggtgaccgaagccgacgtagccaacctaaagtatctgaaaatgattgtcaaggagactcataggctacacccggtgttgccgttgctcatcccaagggagtgccagcaaacttgccagatcatggggtatgatgtgccccaaggtagtgtcatatttataaactcgtgggcgataatgagggaccccaagcattgggatgatgccgagactttcaaaccggagcggtttgaggatggtgagatcgacctcaagggtacaaactatgagttcacaccatttggggctggacgtaggatctgccctggcttggcattagcccaggccagcatagagttcatgctcgccactctgctctaccacttcgactgggagctccctaacagggctgcaccggaggagctggacatgactgaggagatgggcatcaccatccgaaggaagaaggatctctacttgctcccaactctccgtgtgcctcttaccgcatagcaccttccgtccttgatgtgtgcaatcagtatgtgtgcttgtgatgcctctacatgaggtcgcacaagttgtacctcgctgctcgtttcggctttaataaaccgacagaaatctccttattctatgtttggctttcttaataaggttccatgtttcattgctgtgatttctggcactgcgatttacttacgggagaatcaacaaaaatagttcattgactccaacaggaggcagctaactatcgaagtgcaaccgatgctaaaaaccgatcgacagtgtgtacatgaacgtgagtcgcgacattgccggctttgtagccgtgaggccgccgcgcatatcctccggatagttgttaaattatagtacatgggagcaaatagctagatcctcaaacaactatctcctgggatagttgtatagctatagcaggagatttaaaaccttgcaaaagacaccaccgcatttatcaacgtgtaggtgatttttggggaccctaaatattgggacaaaggctgcccaaggagttcaagctagagcgaatcacagataacgcaattgattttaagcacacggcctttgaattcattccacaagttgtatgggcatgttttttttttttggcatgctggactatacgagcatgttgctattgttgataatatagaagtggaaaccacatattttccaaagaaaaattgtccaaatcgagcagaaaattttggaatataataactagagaattttcacgtataatttcacgaggtaaaggatgttgatgtgaaaacacgaggcctgggagatctgcttaactcaagtgcaggttcaaaagcttgcttttaggtgtatgagcgtgccagttgatttgatcctgcaatcaacaagaaataaagacaaagaaaccacggttaaattcataaacgatagccgatcggctagttgccgatgacatatcatttatctttgagccgatgtcatatgtgaatcgatcggcagtcatgaataagtaagaaagaactaaatctattcgatcggctatagatattaacaatatatagtctctatgtcgatatatacttaaatcaagtgattgggatatatcggtcgccatgccgagacagtataaatcacttagatcgaaatatatattaacaacaagactatatatgttcatagcatagccgatcagatagatctagcatgtatcggctaatactccgatactagtactctatattaagatatcaaagcaagtaaaatataccaaacaaaagcctaatatacataaatgcaacaatatcttaatcataaaggacagatttaacatgtcaatcaagcatataagataaatgtagttaaatcaggtaagatcggctgaaactccgatgctaccctaatcggcaaccaaaagcaggctagagattgagattctaatcacgacttataaggtcaaacccaactgatgcagctataagtatgaaaagaaggacaatatctagacaatcaaaccgttggatgtttcatagagtggtgaatatcctatataatctaagtcaacgtcggtatttaacctaatcggctgccttctaataacagacgttagccgattggaggttagataacgatattgccggagattatatgggatatatgataactcgacgaattatataaacaagattagagtatcataaagatggaagcactaatcccgagaacgcaagacgccataacaatagttgaagatcgaaaccgatgcagctcaacccgaaagtaagaactcatcgaaacaaaacgaaagtaaaagggtggcgatgcgccaagattgtattgaacgtgtgttagattgattacatagggttcggggtctatttatacccgagattacaaaatatgtccatatcgtacatgactcttatctctaacaaactctaagataccataagtctttgcggcagacttttgcccaaaacatatctctaaggaaattacatgaaatgtcataattaatagatacaattgccttttcaggactctatccatatgtggcaatcattatgaagcacattaactcaacccgacaatgcatgccgtgtcatattgtcggattcggctcaatcggctaaccctgtccaacttggactctgtcgatcctgatcgcaaccgactcggacttcagatacttactctgtttccggagtgatctccatctcgtactccgcttcgatcccatcttcatctccgttacttggattaccaaatttggtcgttaacaaaggtataattagatttgaattacaactcttatcttccatttttataagtacaagtatgcaattgtaatatctacatgaaaaaaaaaacataattgactttcatactcaactataatttgtataacaattagattcaatatatggctcttagcttctgtttttataaataaaattgtttttttacacaactatattgaacaatctacaccgctatattttgaatactataatttaatggccaagatctttctttttattcttcaattaagtgagaatttttagcctctagaagaaatgtgttgccttcatcttttatctattttttactatagtagatatatcggtagatataagtagataggtttatttttttaacaatatatggatatagatttgtaaggttatggataacatatacctaatagtaatcaactaagcttggcggggctcatcatataccaagtcctatatggaatcataccacgtatatagaaggagttccggataaggaagaacaagtagagttctacatggaaactgtaagaactactcggattgtatgcatattggtctcctagttctacttggacaatgggacatctatgggtataaatacaagacccattaggaggagagggagagggagagagacgaagacaacatctgtcagaatagacaccaatacacgccgccggacatcaacatcagaaataagcctagacatacccaatctggcgcctacggaggatgacaagagggatctggcgctatctctaatcttgccgggtacttattcaaggaggaagactaccctgtcgtcgacaacgtgttggtgttccatgctgccaagttgacgacaagtagataggttatctcaaatattgtacttgtgtaattctgatgaataagagcaacatcggctttggccaacaggagtagggttattacctgattctgatgaataaggggtccgaacctgtatatactccgtctcttttacctcaatctcgcatataccctggtaccaatgatcaccttactatataaatacagtagtcgtgatctaaaacattgacaagatccgatcattgtatccataaattgatatacacaggtaatagatagatagatagatagtggatagagaaccaatctctatacacagccaagataggtagatataaatagatagatttagttttgataatggatagagatattgcccctacgttcacaagtggatatacacataaaagatagatagataatggatagagaaccagtctctatacacagccaagataggtagatatagatagatagatttaattttgataatggatagagatattgcctctgcgttcacaagtagatatacacatagatagatagatagatagatagatagatagatagatagtgaacggagtacaatctctatacaccgccaagataggtagatatagatagatagatttaattttgataatgcatagagatattgcctctgcatttacaagtggatatacacataagagatagatagatatggatggatttaattttgataatggatagagatatggtctctatatttataagtgaatatacacaataataaatagaaagataagagatgatctatgtggcgcctccacctcaagatgacgtcaaataaaatgtatttttatggagactttaacaagacaactcaaacagtgctctccgtttgttttttttccttcttcaaatatatatatatatattctcgtgtaataaaaaaatattaatacattcgacttatttttaagcgaactctatttaatagacacttgcccaatcatatatatagccatcataaatacatatatatcttctcgtgtagttaataaaatacttatacactctatattaataaaatattaatacatatttatcttctccctcttcttcactagctagacacctgtccaaccatatagtggtgtattaactatgtgccaatgttctccaagagtccaggttggaagtctctgctgtcactaaccctctccagtgtataaatagccgggtgcatctcctccatggcactcacctcaccacacaccactccaccatcactcacagccaccacccgccgccatggagcaggtctcgtgcttcgccgccgccgccgccgccgtcctcgttgttctctcgctcgctcgcatgctcctcgcgccgcgcagggagtgggacgggctgaacctgccgcccagcccgtcgcggctgccgttcatcggcagcttccacctcctccgccgcagcccgctcgtccaccgcgcgctggccgacgtcgtgcggcagctcggcgcgccgccgctcatgtacatggagatcggtgaggtcccggccatcgtcgtgtcgtgcgccgacgcggcgcgcgagatcatgaagacgcacgacatcaacttcgcgtcgcggccgtggccgccgactgtccagaagctgcgcgcgcaggggaagggcatcttcttcgagccctacggcgcgctgtggcgccagctccgcaagatctgcatcgtcaagctgctcagcgtccgccgcgtcagctcgttccacggcgtccgcgaggaggaggccggccgcctcgtcgccgccgtcgccgcgacgccgccgggacaggccgtgaacctcaccgagcggatcaaggtggccatcgcggacaccacgatgcgccccatgatcggtgagaggttcgagaggcgggaggacttcctcgaggtcctcccggagatcgtcaagctcgcctccgggttcagcctcgacgacctgttcccgtcgtcgtggctcgccggcgccatcggcggctcgcggcgaggcggtcaaccgggcgtcctacgagctggtggacagcgccttccgccagcggcagcagcaaaaggaggccatggccgcgccgccgcctgacatcgccaaggaggaggaggatgacttgatggatgagctcatcaggatacacaaggaaggtagcctcgaggtgcctcttactgccggcaacttgaaagctgtcatcctagtaagtaactttgctactgctcttaatgttcatagataagttttctactattatgattgttcagataagaattttctgctactctgaatttgttgaagaaaaacagttcagatcacaaattaaatttcagatgggtaatatatacacacacacttgcatattgtctttaacttgatgtagcatatctattttccttagttttttatcaggtcaaagtttcacatatgttgcattttgtcattttataggagctcttttgtgcgggaagtgagacatcctcgaatgcgatccaatgggcaatgtcagagctggtgaggaacccaaaagtgatggagaaagcacagaacgaggtgcgaagcatcctcaaagggaagcccacagtgactgaggccgacatggtagacctaacgtatgtgaagatgattgtcaaggagactcataggctgcatccggtattgccattgctcaccccaagggtgtgccagcaaacttgccagatcatggggtatgacgtgccccaaggcagtgtcatattcataaagtcgtgggcaataatgagggaccccaaacattgggatgacgccgagacattcaaaccagagcggtttgaggatagtgagatcgatctcaagggcacaaactatgagttcactccatatggggccggacgcaggatctgccctggcttggcattagcccaggtcagcatagagttcatcctcaccatgctgctctaccactttaactgggaactccctaacggggcagcaccggaggagttggacatgactgaggacatgggcctcaccatccgaaggaagaatgatctctacctgctcccaactcttcgtgtgcctcttaccgcatagcacctaccttcctcaatgtgcgcaatcagtatctatgcttgtgatgcctctacataagatcttacaaaatgtacctcgccactcgtggctgccttaataaactctccttgtttttcaatgtttgattttcttaataaggttatgtgtttctttgttgtgatttgtggcactacgatttatttatcgaagaatcaaaggaattaaatagttaaatgtctccaatggttggcagctaactattgtagtgtaagtgattccgaagagccgacaacgtatacacgaacgcgagtcgcgagattgccggctttgcaaccgctcgccgcgcataacgtgtcctcaggatcaacactgcgcaggataaaacctctattcttctaatatattaacgtgcaattcttgtgtgcgttaaaaaaaaacactacgcaggatagcatccgccgccgtacgtcgcccgtcagtcgttcatcctgtctagctcgtttcaggcagccgatcagttccatctgctgccgcatccgcgcatccgagtgccttgccgagttccgtcggccgtgtagcgtagcgctgtcgccgagcgtccgcgcgagtgctaactgttgcaagcctgaaactgcagctgctaaactgcactgaggcctgaatcctaacgatcaagaagaggtgagagcagcaggcaacagcaacaccaccaacgttgccatcgccaattgaggccttgtttagttcacccctaactactccaaacttccgactttccatcacatcacatcacaccacatcacatccaaaacttttctacacacataaacttctaacttttcctaaacttccaacttttttcaggaactaaacacagcctgaattgcaaatttgttttctatgttgccatctgcactgcacgtctgcaccttgctatgtttttcttttagagaagggtattttctacccggcatctacatccaaccggatatatacggccattgaaatagggaacttagccccgcaaacaacccaatctgaaattcactccataggagatttgaactcaggaccttgagtactactcagatcactgtaaccactaggctacatggttaataggtttgttcgtttctcttgttaattcttcacagagttcaaagcctcagaggatgaacttggagatggaaagttgaacgatactacgctagtatgttcaatccacatgttgtatgggctatttttttcttttttttggggggggaggcatgttggaatatacacacatgttgctactgttaacaatatagaagtgaaagctacataatttcaaagagaaaaatgcccagatcaagcagaaaaatttgaaatataataactagaggattctcgtgtataatttcacacaaaggtaggtaaaggtataattagatttgaaatacaactcttatcttctatttttataaatagaagtatgcaattataatatctacatgaaaataaaaacaaatttgaatttcttactcaattgtaatttgtatatagaggcattttataaatacaaatagattcgatatacgactcttagcttctatttttataaataaaattgtattttgtacacaactatattgaacaatctatacagaggtataatttgaacaatataatttaatggccaggatctttcttttattcttcgattaatatgagaatttttagcctccaaaagaaacgtgttgcctccattttttttctattttttaatataatagatatatcgatagatataaacaagtaggtttattttttaataatggatatagatccaacctccgtaacaaaaaatggatatacacagttaatagatagatagatagattgattgattgatttatttatttatcataatgcacagagaaccagtctctatatacagtcaagataggtagatatagccctcgcaaaaaaaaaagataggtatagatagatagatttaattttgataatggatagagatattgtctctgtgttcacaagtgaatatacactaaagttagatagatagatatggatggatttaattttgataatgggtagagatccgttctctatatttataagtggatatacacaaaaaaaaaaagatagataagagatggtctatgtggcacctccacctcaaaacgacatcaaataaaatgtattttatggggactttagcaaggcaactcaagcattactgctctctccttttgttcatttttttcttctttagatatatgaagtaagcaatttgtatgtttttctctctgtttgattaattgagatggagatatatatagcatccatttgtggcacattacatgggattgagaattagattttcgagcggtactatgtttacagttcaattcccccacatgaaaacgagatatttcaaattccccaaattatgagatgtaaatacatggcctcaaaagcagcaagaaaacacaaggataagtacagtgtccgggccgttgcaaaaatcttagcctcttatgatatctgccgttgccatctcaattcagtgggcaccgctcgcggcgccaccgcatgacgagacaacgcggtttccgtggcgtgtagcagcaggcagcagcagcagccagcctcgagctcatctgcaatggcgccccgcgccaagacggcgccgccgtgcgccgtgcatcgatcttgcagatgaaacggctctctttgtcatctcatctccatcgcctcgtatatatctgttccctagcctagctagctagctatcctgcattgcattgcactcgcgttcgcgtacttacgttgtcgtcgtcgatcatctgatcaccatgtacgacgccgtcgcctgcgtcgtcgccgtcgtcgtcgtcgtcgtcttcgccatgctttgggtgaagctggcgaggagtggtgatggtggtggtggtggtagtggtggcgtgaggctgccgcctgggccgtggcggctgccggtcatcgggagcctgcaccacgtggtgggcgaccggctcctccaccgctccatggcgcgcatcgcgcgccggctcggcgacgcgccgctcgtgtacctgcagctcggggaggtccccgtcgtggtggcctcgtcgcccggcgccgcgcgcgaggtcacgcggacgcacgacctcgcgttcgccgaccgggcgctcaacccgaccgcgcggcggctgcggcccggcggcgccggggtggcgctcgcgccgtacggcgcgctgtggcgtcagctccgcaagatctgcgtcgtcgagctcctcagcgcgcgccgcgtccggtcgttccgccgcgtccgggaggaggaggccggccgcctcgtgggcgcgctcgccgccgccgccgcgtcgcccggcgaggaggcggccgtcaacttcaccgagcggatcgcggaggccgtctcggacgcggcgctgcgcgccatgatcggggacaggttcgagcggcgcgacgagttcttgcaggagctcaccgagcagatgaagctcctcggcgggttcagcctcgacgacctgttcccgtcgtcgtggctggcgagcgccatcggcggcagggcgcggcgagcggaggcgaacagcaggaagctctacgagctcatggactgcgccatccggcagcaccagcagcagcgggcggaggccgccgtggtagacggcggcgccggcgtcgaggacgacaagaaccaagacctcatagacgtgctcctgaacatacagaaacaaggggagctcgagacgcctctcaccatggaacaaatcaaagctgttatccttgtaagtaaaattgacacctgtcgtattaaaagcaaagtaaaatatatctactctcttcatcccagagtaacaggttcagattaagtgtactataatatatcatatctcgtatgagattgatttattttaggacggagagagtatgtgctatcatggtggattatatttgctcaattagatggtacagctctcaaatctttgtagtatttttcattcgatcttttaactttttataggatctctttagtggaggtagcgagacatcggcgactacgcttcaatgggcgatgtcggagctaataaagaacccaatggttatgcaaaagacacaagccgagctacgtgacaaacttaggagaaagccaactgtgacagaggatgatttgtctggcttaaagtatgtaaagctcattattaaggagaccctaaggcttcaccctgtggtaccactgcttgtcgcaagagagtgtcgtgaatcatgtaaagtcatggggtatgatgttccaaaaggcaccactgtatttgttaacgcgtgggctatcggcagagacccaaagtactgggatgacgctgaggagtttagaccagaacggtttgaacacagtactgttgacttcaagggcatagacctcgagttcataccgtttggcgcaggacgaagaatatgtcctggtatggcattcgcagaagcaatcatggaacttctgcttgctgcgctgctctaccactttgactgggaactccctaatggaatggcagcgagcgagctggatatgacagaggagatgggcatcaccgtccggaggaagaatgaccttcacctccgcccccatcctccgtgtgttgtaaggtcaaacttccgtagttttgttgagagagagagagagaggcacttcgtgtagataaataaaatgggttacaatatgatttcatataataggggaaagttttaagactagaaacttcagtattaaatgagtcagaaaaaagttggtgcatcgacaagtttcattcttaagacattctagctctgtgatgacctcgatggaaccatactaccatagagatttgtgttttgaaactggaagctagctggattatgctgttcgagaaatgcatacaattttccacgataaatacattaaatctgagcagcaaaatctgttttacacactattacatacggttagagtaattttgctgtcatcgacagccatttaggctgtgttcttccccaactttcgcaactcaccttcctcgtgtttcacgtgcacgctttttaaaatgctaaacggtgtgctgcaaaaggtttatatacgaaagttgctttaaaaaatcatattaatctatctttttaaaagtaaatatttaattaattataagaaaatatggtactccgttttgcgtgcgtgggaggtgagtttccaacttcacatccgaacacagccttagtagtcttagtatctcaggtattagtatggaccaaaatttatttataacgaatataaagtatcttatggtaaaaaagataaaatcccccatatgattaaaattaatagctctataatggtatacgtaatactcgtcgacataggactgaaaccataaaacactgtagtatgtttgtatgcttccccatttatactttgattttaacaaagcaaccgaactagggtcaaaatttcggaaacccacccacccacaccccacccaaaaccccctctggaaattatttcggccgatttttttttggatatttcatggttttatgtatttggcaaatgttgttaaaatttcaaattatttcggatagaataactaaaaattgagaaacttcagtatccgatacaaataccgaaaatctctccgttttatattataagttgtttgactttttttctagttaaactttattaagtttgataagttaaaaaaaacagcaacacctaaaatatcaaattattttcattaattataacattgaatatattttaataatatgtttgttttgtgttgaaaatagtactatatttttctataaacttatcaaactttaacttagaagaagtcataatataaaatagagggagtaatttgaaccccgaaccaaagtagacaagtagtgcctcaccttgtttggagtagcatgtactacgatccctccgtcccaaaaaaacaactcaacctatgaggggatgtggctcttcctaggacaacgaatttggataaagcgtagcccaaattcattgtattaggagtggtcaaattctcttctaggttgagtttttttttaagacgtggacatggagccaaggttgtcagtatctcgattcgtatcctagtatcttacgatactacgatcctaccaagccgaaacgataccgatcccacctagtatcctatttttatactatcgcgatcctactattcattactatacgatcctacgaaatcttaggtggtattctgattctacgattcctacgatactacaaaatattatttaaaatagcatggtttgaaaataatgtaaataaatatgctcaaatttatataaaaatcagttcaatatatcaaaatcaacgtggtttctcttaataaatgtctctatttgtatgacatatatcattactatattttctttatatagaatggctatatataattaatgtaaatattaattaagcttaaaaaaagaaaatctcatagtatcccgatactacgttacgattctacgatacgatattactttgagcaaaacgttactctctccattctaaattgatctacatattttataggtacaccaagaccaagaaaaactaataactctctcatactatatttactttagcaacaaactcgatgcatacaccatccccaatattttctaagccaatagcaaatcaagatattgcatgtgggatataaatacttgtgtgaatacatgcatcaatgtccatttactccaatgcacaaataacgaatagacttaataaacgaatataaatatgtagatcatttagaaataacatcaaaagaatctatatataaatcaatttggaatggagagagtactacgtagtatccgatagtgacaaccttacatggagcaaagcatgggccacctcgagatgactagcaccgggaattgaagcagtgagcccgtacctacctatctactactactatatgccactccaaatactcgcagaattaaacggtagtctttgtcacttaattggcgccgaagcctcatatatactacgtatgtgttaaccttgcgaagctgcaatgttgcacttgcactgcactcgcctcgccgcgatctgatcgccatggatcacgtcctcgcctgcgtcggcatcctcgtcgccttcacgccgctgttcctccttgccgtgctcccgctcaagctgacgaacggcggcgacggggtgaagctgccgcctggcccgtggcggctgccggtgatcgggagcatgcaccacctgatgggcgagagcctcgtccaccgcgccatggccgacctcgcgcgccggctcgacgcgccgctcatgtacctcaagctcggggaggtccccgtcgtgttggcctcgtcgccgtgcgccgcccgcgagatcatgcgggcgcacgacgtcgcgttcgcgagccggccgctgagccccaccgtgcggcggatgcgccccccccccccccggcgacggcagctccgcaagatctgcgtcgtcgagctgctcagcgcgcgccgcgtccggacgttccgccgcgtcagggaggaggaggtggcccgcctcgtgggcgcgctcgtgtgtttggcccatgtggcccagaagtggttgtatagtggtggtttagtaccaccttgaaagtttaggtgggttaggatctgcttataagccttggtgctgcgccatgattggggccaggttcgagaggcgcgacgagttcttggagggggctcgccgagcaggtgaagtgttgttggcccaaccgggaaaaagcctgatgaaaattcaaattcaaattaagtacaaattaaaatccatgtgctaccatggtagattatacatgcttagttactctactactccctctgttttatattataagtcgtttgattttttttccagccaaactttgttatgtttgactaaatttatagaaaaatttaacaacatctaaaatactagattagtttcattaaatctaacattgaatatattttgataatatgtttattttgtgttaaaaatactattatatttttctataaacatcatcaaattaagtacaaattaaaatccatgtgctaccatggtagattatacatgcttagctactctactactccctctgttttatattataagtcgtttgattttttttctagccaaactttgttatgtttgactaaatttatagaaaaatttaacaacatctaaaatactagattagtttcattaaatctaacattgaatatattttgataatatgtttattttgtgttaaaaatactattatatttttctataaacttgatcaaagttaaagaagtttggctagaaaaaaaaagtccaacgatttacagtatggaactaagggagtagtagttagtagatggtacatctgatgttaatctcaatttttttcttgtttttttctcctaggatctctttagtggagggagtgagacatctgcaaccgtgatccaatgggccatgtcggagctcatgaagaatccaagggttatgcgaaaggtacaggctgagttgcgtgacaaactagcagggaagccaagggtgacagaggatgatttgtccgacctaaagtacttaaagctcgttattaaggagaccttaaggcttcaccctgcagcgcccttgcttgtcccgagacaatgccgtgagccgtgcaagatcatgggatatgatattccaaaaggtaccaccgtatttgttaatgcgtggctattggcagggatcctaattattgggatgatgctgaggtgtttaggctagagcggttcgcaaatagtaccatagacttcaaaggcatggacatggagttcataccattcggggcgggaaggaggatgtgctctggtctagcctttgcggaagctattatagatctactgttttctaccctgctcttccacttcgactgggagctcccttgcggaatgacagcaagtgagctggacatgatagaggagatggcccttactgttcggaggaagaacgaccttcacctccgccccatcctccgtgtgccgcaaactcaaacttcttctgcacttctattttgtgagagagctcaaacttcttctgtatttctgttttgaaagagagttcaaacttctgtttgttttgagagagtacttttgtttattttgttttgagagagagagagagcgcgcgcgctcaaacttcgtttgcacttttgttttgagagggggaatgcgcactttatttcggtaaataaaatgaatcacgacgtggtttcatcagaaaagaaataaggctataaacttcagtgtgaaattctacaagtcaaaaaaaaagttggtgcatctgcaagatccatttctgggacatgcgctctgactcactaaggcgatacagattattggaacaatagatttatgttctgaaacagggatgttagatttatgttttaaaaataggaagctagattatgcacttcgagaaatgcttacagttttttgcacgataaatacactaaatctttgtactcctgttgtaacaccttgactaccattaataaaatagttataaggtagagcccctctacctttttcagtcaaaaaataaataaatacactaaagctgagcagcaaattctgtacaatttttccaggttaacatatggataacatgatgagaatcaacagctctccgatgggaaactacagagaagagaaaaacagatataattcagcaaatctacatgtcgaaagctgaccaaaatcaagggcaacctggtatccgtccagaaagtaaaatccttcactatttctcacctctccaaaatcagcaacaattttacaggctttggatatcttcattaactccggtctgaaggagttttggagaatatgaattacaggcagctgcctaggttgtcagcaaatccgccactggctgactagagaaggggttttggatcacaaatttatcattttttttctaggatttcagcagatgcaatatatcatgtaaacagtaagaggcatatcaacatcgatgtctccctttcgcacttggagcagagcaatccaacagcaaacagggcgatgagacccaaagcaaaagaaatgaaaacgctaacaatttcagctgaatcttcacagcaactatctaaatgttgcaaaactgcaatatgatatacatttctgggttctgaagctatgcttggtgagcaacatctattccagcctcggtaatgagctgttctgtcaacgaaaagagcccggcaatttccttttcagcatcaagaatcatatccatttccttgtttggtttggtcttggaaacaattctagtactgtttacacttggcgatgcaaccagattgatgccagaatcagttttgccacttctcaggaatcccttagccatatctgcaagtttcttcaatgtagtagtagcagcaagtgcctccacctccgcagcttcagtttgaagattttggagccccatatgaacggaaaaatcagaaggtctcttgatgtcactaggatctttcaggaacccttccaacttgtctacctcctccttcacatcccaccttctcattaccgccttcagctcttgatctttcgcgtcaagtgcttcatgggcagctcttaaatccatgtccttctgatgcaaggattcttttaacatctctatgtcagcctccagttgattatgcttgtgcaaattggacttgagggctgtacctgtgctcgaaatctcatcatccagcaatgcataaatgtccatctcttcgccttctactgaactagcaagattgccagtgagttcagctatcttttgcaccacagattcagcttgtgagcaactgaatttcatgctatccaatttattctgtagtgtctgtatgtgttgttctttatcctgtaattcggttctaacctgaacaagttgatcttccttgctatctagcagctgctttagttcaacaacttcactgttcacttcagcaagtctgcgttgtgtttcagaaagctctgaatccttctcctgaacagctatttggatagattccacctttgatttcatatcttggacttcatttcgggcttctaacagctcagattcttttatttcaacaagctttaatgaattgctgtgctcattttccttctgaacgagcgccttttgaagcaactcaacttctttggttttctcttctaagctctctctttcttttgttaacactgcttccagagactcaaccttctccttttcctgaagtaacagtgattcaagttcatgacagcgagactgtgcagcattgagctcctttgccttgccttgaatctccaaccgagcagcttccaagttctggttgaaagatgaaagcaatagcctttgaccagagagttcttgaacttgtttctgcatctgcactgcttgatcttctatctgttttcgagaggaggagaaagcctcttttgaagcgattagttcagaccgtacagcatccagcagagacctcacacgtttgaagtcactgactgtatccttgataccatccatatccttgcatgctagttgcgccacttcctttaactctttctgtgctgctaaccatcccatattctgcctctcaagttcttgctcggcgatttttagtttctgttcattggcctttctcaattcattcgatctggaaaaatcaatttcttttcttttaatttcactccggagctccttaattgttgcttcttgctgctcagcagcctgattagcttcaagaagcagctgttccttggacttgatctctgaacgcatcaaggttacttcttcattcttcttcaacatatcttgcttaagcttttccacttcagttaccttctgagaaagcaaatcttgtgagctggcaattttcttgtcttgctcatcaacaagaagcttcaggttatcgatctgcctcacttgtaaaaccagatctctacttgccttacccagtgatctctccatttcctgttgccttgcatatgctctattgatcccacgctctctctgatcaagatccttcttcgcccggttcaggcgtacctgatcaactgaaacccgattctccgcatctcggagatccctctctttcttcctcaaggtagacaaggcggcctcaaattcagacttcagtacatcaatgctcatactcagctcactatcctgggaagcactggtatccaacctttgcgtcttcgcaaacagccgctccaatagctccctagctggttcagttgctccattctcgccatcagtgatatttgctctaatacctttaacaactgatttgatcaaatgaggagcacatctcatatgttgagcttgaaatgacaccatgaaactcaacttctgcctgaacagctcctgtcgggattgcagaaaacagtgtgcatcagtagactgctagaaaaaagttgcaacaggacacctcctagtgaacctatctgcaaaaatggggattttatttgtacatgaaaattctcccggtgaaccaaaggactgaaatgatatagtatgccaaagttaactctgaactaaaaattcagaactatatttattcacacatagtttcaatcttcagcaaagcgacatagcgcagcggatgaattttgatcccaaatctatcgccacacacaaactacaatcgctaatagttctcgttaggttctccgttatcaagattagtttaaagatgtaccggaattgaccaccgtcaaaccaatttcagccaaaaaactcctaattaaaaaactaccactaccaggcagcacaacttgaactagaaaaccaaaaaaaatccgatcctccgtccccttcaaaccgctagtagacgagctcggaatcggaaaccgaacgagaacacacaccaccaacaacgaacaacgagcaacgagagaggagatacgaggagatgggaagggatgctcacatgtgtgacggggcggcacgacggggagccgcagcggagaaccgccgccgccgtcgccggcggcgaggaggaaggggagaggggtggcatggcggcctagcacgtgggtgggggggagggagcggatcacggccgcccgcgcgagatcggacggctcacggcgcgcggagacgagagaggagaggagatgatgatgtggaggccgaaccggacgcgtgtggactgcagtgcagtgcagtggagtggggtggggtgtagtagatgattgatgactcgagtaagcgtgacacgtgacgctcgtgtcgcttgctctttttttttctttttcttttctttttgttttgtttgttttgatgggtttgtgttgcttgctgttctgggttctggtgccgtttcgtttttattcgggggtacgtgaggacaggaaatgctgggctgtactacgtgatgagagaaatttgaattcgaagatgtttaaagaaaccgaaaatttggaaggattttagtgggattgtcaccgttggatgggtgatgaagaaccctggccgttggatcaaaaccgcccgcggtccaccgtaggagttctaggtgggccttgtccttcatctgggcccaaaaacgggagcgcacctactcatctaggctgtgctcttttcagtgagttcctaactcacccccttgtttttagcatgcataaattctttgcaaaaagaaaagaaaatcttatgaaagttgcaaaaaggtgacatatttttgttctgctatttctgtcaaaggaagtaacaagtccagtctcttcaggagtagcaggtaaatagagatatctgagacataatttgctctctgaatgacaagttttgcatggatttgtttctgttcttcattttttttctgtttctggtgttcttagtttttcttcgcaccacatacagattctccgattctcatggtgtgcactgcaccatcctacactaaccctagcaagaatgaaatatgtatatcttgagaatcctttgtaaaagtgtaaaaccttattgtccctcgagaatctctatatcatcctgctatattaaaatattgtcccttagtcaccttcattctttcttttaaaaaatgtcagaaaaatggagttctacgtggtgaaaagatccttcctttcttggaatggctctggctcttcagtaccaacatgcatggtaactgcacatattttgcacataagagtatctctaacagcctctccaaatcgaactcctaaaacacccatatagccaactctccatctgatttagctagtcaaattaactgtatactccaacagcctctctattctaccctctctattttgactatgacaccgggacccatatgtgagccactcccttattctttctccccttccttcccctcttcctcttttcttttctagcgttgacaagaagcaggcggcggcagcaagcggggaggggacggcggtgaaggcagcgtcggcgggaggcggcgctgcgtggggaccggcgggctgcgcggcgggaggcgggcgccgtgcggaggcagcgggcggcgctgcgcggaggacggcgggcgcggcgagcttgtgccgcgcggaggccagcagccacggcgagcgggggcggcgggttgcgccgcgcgggggccggcggccgcgacgagcggccgcggcaagcggaggacggcagtcgcggcgagcggaggccggcggctgccgtgctcgagtttctccccatgcctcgtcgggctcctgtgcttggctgccgtgtggggatgaggaagatgggctctgtggggcccaccattggccagccaaataaagtgaccaaatttggctagtggagggagggttttggccagccgatagcttagccatccagttgaagaggctgttggagcacgtttttttggctagaattgctaaaatttggtttgaagagtgggatggagaggctgttggagaagctctaagtaaccgatgaaatactgagaatcacaacactgggaacaacatgttaactttggatcagcaccagatatgcagaattttacaagccatggtacaaccataccgaaaacagattgtaacaattaaccatacacacagataagtatatctgtgagatgacaagggaagcacccaaacctgccggtaaacaaggcataaacacgcatgcagaggtaaacacacaatgctccacggaaggaaaccaataactcctgctgatgaatgacagataacttataattctatgcatcaaactacctagctgaaggtactgtctcacttgaatcaactgcctcgtctattgtatctgcttttgagttcttctcttctgtgatgcagtctgaactatcaggatgagacgaatgagatgagtcctggaaggagctggtcagatcaggcttgaacatctcatcattctccaagttggaaagcttctcagcagattctcccttgagcagctcaacgacttcagacattatcggcctctgttcctgtttgttctgactgcatgcaagcccaacaagcaccattcgcttcagttcagcctcgacgaagacatccttgagctttggatcagcaatttccttgaactttttgtcacgggcaagtggaagtgcccactccgtgatagttagcttcgtagtggggtttagcttctcaactggcctctttccactggcaagctctagcagcagtactccaaagctgaagacatcacagctttcagaggccttcccaagcatggcgtattccggtgcaagataaccgagtgtacccttcacctttgtagtgacatgggttgcaccatctggaatgagctttgcaaaaccaaaatcggcaacccgtgcttggaaattcttgtccaacagaacattgcttgacttgatatcccgatgaatgatatgtggtgtcgcttggtgatgaagatatctgcatggtagagagagatttcagatgtaagattacttctgcatgtactgaaagttgtcatactgttacagcataatgaatatttcataaggatgtaaaacatgcttacgcaatcccttctgcagaatcaatagcgatcttcattcttcgttcccaaccaagatggcattcagctgcatgctgtccatgaaggtgggagtgcaagctcaggtttggcatataatcgtagactatcaggcgttcttggccttcggcacaatagccacgtaagctcaacaggctcttgtgtctcactgtcgccaaaacctccacctcaattgcaaattcagtttcagctttgttgctccaactcttgagccttttcaccgcaatctgtcccatgtagttaacagaagaagcgttaggttctggttaaagtgaactactttttcctgattttggattaaacagatagaaggtaaatagttccaacataatacttatgatttatgaaatgatgttcaaaaacatacttgtcaaaacgatagtttgaatttgatattgtaggggctgttcagattgatgctattttcaaccataccattttttggtaaagctgccaaaaaaatgtctatgtttagtttgttgtcaaatttggtaaatacataagaaatcctgccaaaattttagcaatattgtcatcttaaattttggcaacattgccatcttgctaaaattttggctacaatctgaataggcccgtatttttttttcaacccaaaatgaaacacaactcaccgggatgtagcagtttgggggttatatcaccatgcaacaaactaacaagtaccaatgtagaacagtttcatcatcttcataataaatgtgcaactgtctgatggaataagtcttacgctgttggtcttcttgtgctaattggtctttgtgttctttttgcttttcagtgcatctttcttttatgacagcatctcctttcacttttactttttagagtagcaagccagctataaatatatatcccaacccccctcccctgcgtgatggtatggcacttgtgagaaataaacagaaaattgccccaactctccttcttgagctcccctctgtcctcagtcggcagcaggaacaccggctgttcctacttatccctcttcccctgcgctgacgagcagcagctcctcaaaggcagtctcttccccacgcagcagcccctagtggcgtgccatgtccgcaggacagtctcagcgcttggtcgcctcgagcgcgcggctccggcaggaggccgagttcaccgcggcagaggaacgcgagcgagtggtggtagagaccgctgcgacggcagcgagggcgtcaaggctggcggcagcaaaattggcaacggtaagggcggaagtggaagcggcggcggcggcggcacgacagtagcaccaacagctctatctccgcctacggcagctccgatgatgagctgacgagggaggcagctcgtgagcgggcggagcagtgggcagctgcgcaaccccacgcgcgcaatggcggcagcttagattggcggggatgcatgtggcggcggcggcccagacgggcgtggacgcggcggcccggttgggtcgacggagatcgcagccgttgcaagtggcatggctctccctcaccggaccggtaccatggtcaccacaggatttaggccgtcatcagggaagtcggccctggcggtgtgtggcctaaaccctaccctcaccaagaccaactacgtcgagtgggccgtggtgatgaggataaggctccaggtgcgacacatgtgggagccagttcggcacggcgacgtcaactacgacgaggatcaacgggcgcccagaagcggactgccaaggaggcctgggacgccatcgctgcggcacgcatcggaagcgaccgcgctcgcaagtccacattgcaggcacttcgcaaggagtgggagaacctggccttcaagccaggtgaggatgttgatgactttgccctccgtctcaacactctgctgtagaagttggtgtcgtatggcgacgacacctacgatgaggagagagccgtcaagaagctcttccgctgcatcccagagaagtacaagcagattgctcgctcgatcgagtctctgttggacctctccacgatgtcgatcgaggaggcgataggtcgcctcaaggtcgtcgacagcgacgagccacagcctctctcgaggcttatcaccattggcaggaagcttcatctcactcgagagcagtgggaggcctgccagggtgacgggaagaagagggagtcctcttcctcgacaggccgcaagcgcggcaagggacacgtcctgcgaggacgcacccagggtggcgcccgcggaggcgcctaagccggcgcgagatgacgcctgccgcaactatggcaagtttggccattgggccaaagactgccgacagccacgacacggccaggccaacgtcgcacaggtggaggaggaggaagagtcggctctgctcctggcacacgcaagcatcgagctatctccagcggcaccggccgcagcggctttcctccaacttgatgagccgaaggtacgcgccttcctcggagatggctccagcaacgacaagactgatgagtggtacctcgataccggcgccacccatcacatgactgaccgacgggagttcttcaccgagcttgactccagcgtctgaggttccgtcaagtttgggggtcggctccatcaccttcaccgccaaatccctgtgctcaccggagtctactacatccccgctttgaggaactctatcatcagcgtgggacagctggatgagaaagattcatgcttgttggtcgagcacgaagtcatgaggatttgggattgccgtcgttgccttcttgccaaggtaacctaaggcaccaatcgactctacgtcttcaacgtgcaagtggcacaaccggcctgcctccacttcgaggccctgaagcggctcagtgccaaggagatggtgcgaggcctgccgtgccttgaccacgtgaagcagctctgcgacgtctgcgtgttaacaaagcagaggcggctcccctttccccagcagataagcttccgagccaaggagcggctcgagctcgtgcacggggacttgtgtggcccagtgacaccggccacaccaggaggacgacgttacttcatgctgctcgtcgacgacctctcccgcttcatgtgggtaatggttctcggcagcaagggagaggttgcggacgccattaggcgcgcgcaggctgctgcggaggcggactgcggcggcgaattcacggcggctgaattcgcatcgtactgcgctgatgagtgcattcagcaccactacttcgcgccgtacagcccgcagcagtacggcgtcgtcgagcggcacaaccagacggttgtagggatggctcgagcactcctcaagcagagggggatgccggccgttttctggggagaggcggtggtgacggctgtctacatcctcaaccgctcgactaccaaggcccgtacgaggcttggcatgggcgcaagccggcggtctcccacctgcagtttttcggctgcctcacgttcaccaaggagatcggccacatcggcaagctcgacgacaggagcaccccaggggtgttcatcggctaagcagagggctcgaaggcctaccgtattctcgacccagagacacagcgtatgcacacggcgtgcgacgtagtgttcgacgaaagacgagggtgggcataggacaaggcggtggacgacggctcgactccaacgtacgacttcactgttgagtacgtccacttcgagggagctgggggagtaggtagctcttattcactgagtgtgcctacctagcccccgagcctccaccgactccagcagcgacacgctctcgagctacgacttcggctgcaatgagttcttcgctgacaccatcacaaccggcgaccccacgcactccagcaccaacagccacccctccgggcacatccactccgacgccaggttgtgtcaagcacagcccggtggagttcgctactccgctctctcacgacgaggagcgcatcgacgcataccacgacagtgagccgctgcggtaccgtacgacgggagcctcagtctttcgcagaggccgagagacacgcagcatggcgtgccgtgatgtagtcggagatggacgcggttgaggaaaaccgcacctgggagcttgttaacctccctcgtggtcaccgcgcgatcacccttaagtgggtgttcaagctgaagagggatgaagccggagccatcgtcaagcacaaggctcgcttggtggcacgcggtttcgtgcagcaggaggggatgccttcgcccccgtggtgcgatccccggcaaggagggcaaggtgctcctccttgcgctggctgctcaggaaagctggtgcgttcatcacatgaacgtcaagtcagcgtttctgaacgacgacttgaaggaggaggtctacgtacaccagccgccaggatttgcgatccccgacaaggagggcaaggtgctactcctgcacatggctctctatggcttgtggcaggcaccgagggcgtggaataccaagttggattccacgctcaaggggatgggcttcgagcaaagcccgcacgaggtagccatcaaccggctgggcaatggaggaaatgtcctgctggtgggtgtctacgtcgacaacttggtaattaccggcaccaaggatgcggaggtggcggcgttcaaggaagagatgaaggccaccttccagatgagtgacctagggcctctcttcttctacctagggatcgaggtgcaccaggacgactccgggatcacgtttcgatagaccgcctacgccaagcgcatcgttgagctggctgggctcaccgattgcaacccagctcttactccgatggaggagagactgaagctgagccgcgacagcaggacagaggaggtggactctatgcagtatgggtgtcttgtggggagccttcgctaggctccccacacacggccgaacttggcattctccatcggctacgttagtcggttcatgcagcgaccgacgatggagcactagcaggctgtgaagaggatcatccgctacgttgcggggactctcgaccacggtctctactacccgaggtgtcctagaaaggcacacttcgtcgggtatagcaacagcgaccatgccggtgacatcgacagcgaccacgccggcgacatcgacaccagcaagagcacaagcgagattctcctcttcctcggcaagtgcctcgttaactggcattcggtcaagcagcaggtggtgaccctgtccagctacgaagcgagtacatagcggcctccagcgcttcgacccgctctggcttgcgcgactgcttggtgatctcttcggcagagacactggagcggtggagcttagggtggacagcaagttcgctctggccctagcaaagaaccccatttttcacgaacggagcaagcacatccgggtgaggtaccacttcatccgaggctgtttggaggaaggaagcatcaaggcgagctacatcaacaccacaccaaggactagcttgcggacctgctcaccaagccccttaggaggatcaagttccttgagctttgttctaggatcgggatggcccaactttcccacaagacgacgcacaagacttaggaggagaatgatgaaataagtcttgcgttgttggtcttcttgtgctgattggttttgtgttctttttgcttttcagcttttaggacaggactagcatctttcagtttgggatgcctgttaggacagcatctcctttcactttttagattagcaagccagctgtaaatatgtatcccaaccccccggatggtatggcatttgtgagaaataaacagaaaattgtcccaactctcttagcgccatcctctcgataagagtaaggattctgttactaacactatcattataatagtatttagtatatttttctttcatgtgtttaatcacgtaaacaagattaatccataaaaaagactatagctatcaagtattttacacgttacaggacaaaatcttgcctcatctttcacccaaatatcactatcagcatgctacttattttttctggctcctagtagactaggtgggacaaatacactgaagagaagcacaatagtcatctgtctttgtgaagacaatgtgattttcaatagcctcatattccggctgtatgctttcttttgtgttcataccttccaattatgattttttctagcttgtaatcatgcaatccttgacaagactattggtataagcgaaaaaaattgataactgaagctaagaataagtcagttgtctactcagaccaaatccccattagacacggccttaaaccgcacgcaggtccagtttggatggccatcatgttcaaagaatatctgaaggtagcttttaaaaaacggcaaccattttatactgctaattaataccactagacttttttttttcaagacgacctacacaagacaaaaaagtttctattgatatagcaggaaaaaattacaaggttaccactagaccatgaacaacgctagaagtggatgtcagttaaacaacaatcatcaacatcactgggtccctccaatgctttgccatttttctaatcaattagaaaaaaaaaagaagacaacaaactaaagtttgtgcagtgtggactgcatgattctcagatttcttcctgttctttttttctttttcaagattgaaagaggaacacctcacctgtgatccatcccagagctggccccagtagacgctgccaaacccaccctcaccaagcttgttgtcatagttgaaattgttcgtcgctgactgtagctccttcagcgagaagatccgccatgtcgtctccttcttcttcttcctccggccaggtagaaccctgagtatagaacaagcaaacagatcaacaaacgagcttcatttcctcttcaaactctcaagtacggactcttcttcccaaaaaaaagaattggcacatttttaacggattaattagatataagtttccactatgtcattctatttcagcttgctgaccaacaactgcaatccgagagcgaacagaaaaattccccaatacaagcagagaaaattccacgcatcatttggttcatccatccaatgaaaacaggtgaatgttgcggtgttgtatgctcgcatgattaatcagcaaatcacacacaaaaccacaaaacttgatcagcaactcaccatttccccaaacaaaaaccattttctgcttcaagacacttctcagctcccagcagaaaaaattctccccagaaaaaaaaagttcttcttagctaatcaatcgagtaatctgttttgagcaaacccatcgaatccaccaacagaactaatcacaaacaaaattgcaaatgtttaccgacgattccacccaacaagtcaaaaccacccccaccctcgtaagtcataacccacccaaatgagcaaatctcccctctccccccccccccccccccaaaaaaaaaaaaaaacacaccaaacaggcaaacagcacacacgaatcaatcctcaaatcgccagatatgcactcacccgtccacccccttgcagcaggaagcccaccccatcgccgccgacaccgccgcagccccccaaatcagcacgacacccctccctctccggagacctcccgccgcgcgaggcagccccgcttcctcccctcaccgccgccggcgaccgcgagacagctggttgaggagagagagagaggagaagacgaggagacccgcggcttcctcctctcgtggtggtggtggtggtggtggtgtcggctcgtcttctccacctcgcactactcgcgtcgtctcgtcaccgcgcggcgcacgcaaaggcaagctcgggggcgcggtcagctcacccacgtggggaccgaccgggcggggtgcgggtcggacacgtggcgggcggcgagtgggccgttttgaacccggtgaggtaacggtcgggtttggggtgtgggcggtaacgtcacgcggcgggtgaggggtcggggtcggggtggggtactggagtggctgacgtgcgggggccaccaccgggggcgatgatgacctggcagcttgaaggggtggggccctcggctgttggtgggatggctacgtttgaccaaaggaagattcctgtggcctgtgggtgagacttttgctgaggtttgtagtacttcctctgtcccaggaaacgcgtcgttctggcgatcgtcccatcgtcccagtaaacatgtcgttctgctgcttctgcattactctctccgtctcgaaaaaaaaaaaaaggcaaactttagatttctgtgtccaactttgactatctatcttatatgaattttttttataattcatattttcattgttgttagataataaaacatgattaatattttatgcgtgacttgtctttttaattttttttctaattttttcaaataagacgaacggtcaaacgttggacacggaaaccagagtttgtcttttttagacggagggagtacgaagtaggagtgtgcaagttaatgtggtttttcttgtggttttttaatgcgttttgtagtacagggaatagattttactaaattactaaactaatgcactaatgagactattaaagagctataggggtgtttatatcagggtgtaaagatttgacgtgtcacattgggtattatataggttgtttcatagagtgttcggcactaataaaaaaactaattatagaatccgtcagtacataatttattaagcctaattaatccgtcattaccaaatgtttactgtagcaccacattgtcaaatcatagagcaattagactcaaaagattcgtcttgcaaattagtcacaatatgtgcaattagttaaatttttagcttatatttaatactttatataggtattcaaacgttcgatgtgacggagtgaaaaattttagggtgggatctaaacagggccgtagtttttgaccaattcatttgagtactttgaatatttcaggcgttctactgttagtactcctgttgtcttggtttgtctcatttagtacgtgaatttttagtgcgccacaacttgatgaccacgaccgatttggtatcactatcacacactcgatgattatatgttggtgtttataccacgaccgatttggtattacttgctccgttttaaaataagaacattttgtcctcttttttccttaaaaaattaacttttaacaatcatggtatcgaagtttataaaaatagagaataattgcattcgaactaaataaagtaggagacaattacaatggaatttaataaagttggtataatttattctttttgcttttgtattgctaagcgtgggatatgggtgaaaaatgaacttattttgaggggatggaggccggcggggtaaaatatataggacactttggctttgcaaatttagaccgacgtgttgttttcaacaagtcaaacaagccaatgctagtaaaaggacagtggcatatccagctatggcgtatgcagaatgtgcgttgatatttaggacctattcagatttgaggaattttgtgggccaaaattttagaagaattgaaccgtttgctgtaaaattcatacgtttcgaaggagcatttataatttgatctcaaacaagggcgcaaaagttagagagactgctcaatgaaggcattttactttgtgttatcatactgtataaaaaccatccatgcgtaccaagcaaaaattttcacaatttgaccctttgcaaaaactattttacaaataaaccgtcaccaaaacttatttcaaaaataacccttggcgttgaactaagacatctcagtgctaaatagcgtggcgctgaatatgcgttggcaagccgacttagtcacccatccgcggtggcacggtattcaacgccagttgacatggcgctgaggtgtctaagttcagcgccaggtgatttagcgctgaccaaaagagtcaaatttgaaataagttttgacagcagttcatatgtaaaaaaagtttttgcaaagggtcaaattgtgaaaatttcaacgtaccaagggactaattattgcctactattttattatgggatttgcccatatatacatacccagagaagggaagacaaagatgcaataccaaacaataagataagaatggaaagagacaaatgcccctcacaaaatccacaagtgaatgccatcacagctggtagccccagaaggccagaacaggactcctgttggtctcattgaggttagctagccagccactatggagtggagtagtgtattatggagcatagtgacccatcactttaataagcaccggtgattggcacgcttcaatcatggctttgtatctttgtgcttgcaaaagtctcaagcaatcccaaagcaaagcagatggtaagatgttctgcaggaattttgtaatgtcatcatccaatggccatggctttggccccaattgacctgttctcacctctgcctgccctcatcacactaatttttttaaaagatgatcatcaaactaatttaatccactaccatcaattatagttgaaaaagaaagccaaattggaccattgctttaacccgaaaaagaaaactgaaccggtgcttcgctcgatctggtccaattcaaacactgtttatgtaatcgaaaattcgaaccgctctaaactatttgagttgggcaacttcattgtgaatcatgaattaaagtagagattttggaccggttggcatggaaaagagttgggctccacgtatatgaatgaaccaaagaaaagcccaacgaccagaacaccacaattttaaacctaaatcacttaaaatggcgcaagttcatggttgaaaaaaaaacatataaatgtcataccttatggcctaacttttttttttcaaaacacaattaaaatgcaagcttttacaacacaccctacgtccctacacatatgagcacctccgaaaaactaggacagtatatattgagattgacgaagtcatcacgggtgtttcgctgtcaacgttcaagtctaggaagctactctcacttctcggagtaacatatttttcttagacgtatacatagtatatgtgcactcctatttgtccatatttatttttcaaatttggtttcactctccagataggactcttgggcttgtttagaaggaaatggcccacgcaaatactggcccatcacgaggcccaaatctgcgtgtccaaggaggaggagagaagcagcaaagcccaacttcatctgcctcgtctcgtcctcaccccgcctcgccgcctcaaaccctctccccacctgcatcccctctcctccacggcggcggcggacaccaccgcacaatgaggagctcccctgcggcgagtggcaccacgccgtcgaacatggacagcgggagcgaatctgacagcgcccccgaggagctcaccgccgtccaggtacgcccctcctgcctacgagaggaagccgaggacgacggccgtcgcgcgagctagagctcagctaacccctgtatccgagcgaggcttcgtgtgcgtcgtgctgccatgcgctggatggatcatggatagcacctcgtttgctgcgcccgcgagagctgagaagcacaagtactagtttagtagtgagctagagctagggttgttggatgtttacttcgatctcaccttcgcgatgcctcgtcttggagatcttggagttcgtgctgaccgttgctcgctgttgatgcttcgtagggggttgagaagcacgacgagatcagtaaagttgagaaggacagtgccatcaggtgtgtgcccctttatccctttgttccttgcgtgtatgctaggcttgatgattggatggataagcactctgctgattgtgcttcccttattttgatttgtgttg

SEQ ID NO: 7650 - DNA, 18831 bp, Oryza sativa
cagggggaaaggctcagatgcaggcaatggcagcgggagtctctcgaggttatctggtttgggccgtgcagcaaggaggcaactagcagccatacttgatgagttctgggggcatctctttgattaccatgggaaactcactcaagaagctagctctaaaaggtttgacatcttgcttgggctagacgtaagaacacctagctcaactgtaagagcagacagtcaagctaatgaaatcccgaagagtcccatggtacgagacaatttacaagggtctgccttcttgggaagttcaagggatctgatgtctactaagaatgagatgtcgaatttggatctgacatatgggcttcagatgggcaataacattgggtcatcagcctggtctcagggcatgcagttaccaagtacccaactgcagagttcaagcaacagcttactcgatcaaggtgcaagattaaattcaaattttagcacgccatcatacgcagacaacaaccaattctaccaacctgcaacgattcatgggtatcagctcgcatcatacctaaaacagatgaatgctaatcgaaatccttactctagcatgccattggacccacagcgacttccaaaatcttctgcatcggctgtgccaacctatgtcgattctgtcatgcatgctcgtaaccagaacttgcttgcttcattgggagctactccttcacagatcgcagcaacatcccggataggtactatgatggcagaaagatcctattatgtcccttccactcttgacgggaatgaaaatgctggttcatcagcttactcaaagaagtaccacagctcaccagacatatctgcactgattgctgcaagcaggagtgctctgttgaatgaatcaaagttgggtggtggtaccattggatcccagtcgtaccttagcaggcttgcatcggaaagatctcagtatacaaactcggtggccaggcctgcagctcccttggcgtttgatgagctctctccacctaagctcccaggggatatcttctcaatgcaacaaagcccaaacccaagtgcaagatccctttgggctaagcaaccttttgagcagctgtttggtgtgtcgagtgcggagctcactaaaagcgagttcaaccctgcaggcagatcgggtggcatgaccaaggatgatttctcttacaaggagtctgaggcgaagcttcttcagtctcttagattctgcatctcgaagctcctgaagctagaaggatcagggtggctgttcaagcaaaatggtggcagcgacgaagatctgattgatcaagttgctgcggtagagaagctattgcaacaaggaaccagtgacaaccaactgctgcttggtgatactcagcaaccaccatgtgataaggcagacatccagtacatgcgcgtactgcctaactgcggagacgactgcatctggcgcgcctccctcgttgtcagcttcggtgtctggtgcatccgccgggtgctagacctgtctctggtggaaagcaggccagaactttggggcaagtatacctatgttctcaaccgtcttcaggtgagctatttcagtcctgaactagtctgaatttgagtgttgtttttcagtgcccaagacttgactgcaaacctgaaactgctcattttcaacgtacaagactaactctgtcaatcatttttttcgctcaaatgtaatgcagggcatcctggatcctgcattctccaagcctcggagtgctctcagcgcgtgtgcgtgccttcacagagatatccgggtgctcaacagcctgcgccacagtagcctggtagcaacaaactccattccaaggcaaatccgaggttccttcaccaccgcatctgtggtcctggagatgatcaaggatgtggagaccgcagtctcagggcgcaagggcaggagtggcaccgcagctggggatgtcgccttccccaaggggaaggagaacctggcctccgtgctgaagcgatacaagcggaggctctcgagcaagggacaacaataataaggcatctgggcagcgtgatcctgtcgcgttttagggggactttgaccattgttcttcaaggatggcagccagccatggtggcttgccctccctgagccctggattttttcgttgcacaacgtttgcagggacctgaggaattggccaacacttctggtcccttccatcatatttcgtttttttttgtttctttcttgtttttttttttttttttgcatgtgatgtgttgtataatggtaactgttcatgtgccagaagaacaaccaccaaaatgtacaacagatgtagtcagctgatgcaccattgtaaagtttagtctctgcattttaaccttttttttgggggtcattgacaaactgaatgaatgccctgtgtaatctctcttcagagaggatgccaagactgagaaaaagcttttgccagatttccagattccttgtgttcatctaatatctgtcatgtctctcacattttctccagcttatgatctttttgtctcgttggcatttgatagcgtgtgctggagatgtctaccgtatatgtggattactgtattaagcttctgggaccggtgtatatatataatttgtatggatagagataaagaaatactaactcgatatggattagttatatcctaatgtttctctaaacaccaggcgtagtggcactgtactgcaacctcacccaagaacatgtttttggggttcagacttgagagtatccattgctgaatttgcctcaccgcaagtttagtcttgcatttcacaaaattgcaaggatagctaacaattttatcacaaaaccataaactttgtggccgtgcaattggatatgctctctttgctcagaagcttttgaggatactgatcacctgttcagaaactgtgcctttggacttgatttgtaccgggaaacttgacaacccggccgacacagtattctcgattagatgttgggaaaacaagatagccaaaacaaatacggcacaaaaggcaaaggagacctctgggaatactaatcaggagagagaaacttaggtggtgtttgaatcttcctttaagatgaagattaagtgtttcacgtaaaacgaggtgataatattatgtgattaattaagttctaatcattacaaacttgaaaaatatattaatttgatattttagaacaacttttatatagaaagtgttcacatgaaactaccgtttagcagtttagaaaagcgtgccacgagtatccaaaagcttatcaattttgttggagaaaagaatagggttagtcttccaaggttcttttattcggcagagctcccgctgtcggttctttaaagaaaaactcgtagattaggccacccatcaaatataaatgtaatactccattacacaaatttaattttacataagggttcaaaattacattatagtttatttacactacgaattacatctgggtaaatttttagaaatttggaagcaaaaccgtgaacacgtcatcaaaaactggatgtgggctccacgagttcagaggatgttccgaacccgttttgatcgcccacggcccgccgccccgccgtggagccgatccccgccaccgccggcgagcagctgttccggacggcgtcctgctgctccctgcgccgcccccatcccctcggcctccgccgagctcgttcctgcgcggtgagcatccttgccgacgcaccagaaccctcttttttttctctctctctctcgttgtacccacacacctctactcgaatttgctctatcttctcttgtagatctgaaagctaggttttcttttttacttgtcttaacctttagttacataacaggttttttcccacatcaggtccacatcgatctataatagccaagagcccaagacctgcagggcttcccgggggtggtgcatcttctcaggcggaggggcctccttggattccttgaagtttatggcgccggcgaccaaactcatcaccgtgtgtgcaccggcaaatatgacgaacaggtccccctgtacatgtgcgcggtcaccttgagttggtcacccctgtcaaaacatagtaactttgtcaaaacctaacctaaacaaacatgtttttttcacaaaattcttcattcttacctcatgtctgattttaacaaatctagcctgtggtttgccttcagatgagcaatacgccatccatgcatacttcctgccgccctctcctgtttcctaatgcgctgctcaaggcgcctcatcataaccttttgcaccagaaaagcatcaaaatgttgcttgtcagcacaaaacaataaatccttctcaagtctcaacgagggggtaaaacttccagcatcacaggtagcttctccaggtcactcctctctcatccagttaggaatcgtggatgcaaatgcagaatcgatttcatccgtccccgaaaagaaatacaagggattttggcaatgcgaatgcagagccaaactccctcatatttggatttggggacagaggtagcagataggcaaggcaattagagcagtaattttaccctggtagctcttgtggagaaatagcggggctgggcgagtgcggaggaagcccatggtggggtggaggtggcggcggactgaacaagaaacaacaagttaggcgcatttaacggaggaatagtgcagtagcaataactaggaagcttgtgcaacaaaataagcaagcacacgcgacaacaaaatgatccaatccaattacttagaatcaactcaactcaatagtgcagtagtagcaaatcagaaaacaacttcaactcggactggcagctgctgacgcaggacgaggcgcgcggccacgtccgcgagtacgccgacaacgccgccctctgggaccacgacttcgccgcctcgctgctcaagctcagcaagctgcccatgccggtggggagcaagggggagatcaggaacaagtgcggcgccatcaaccacagcaagagctaattcggccacttatgcagggggttacgtacatgcatgcagacgatgtggtcgtagccatatgttttcttgttatatctcatcgttctaaaatacagaaaaccttgtactcgaaaaaaacatcatatagtactatcaaatcagtctagatttatactactagatagctagtgtctaatcgagtactaggagtatattttaaaacaagagtagtttgttattacttggtactagcacgtcagtgaatgtacgtgcacaagaaatcctcgtcgataatgaaaactagcatggtattggagaatccatctcttaaacccatcaagtcgaaatcctgaagcaccaaaatccccctacttgatacgcaactatcgacgtttgatgtcgcaattctggtatttgcatagtatggggatcgtcggtgctaggatatacgcgagactgaggtgaaagagacggagacaaggatttttatacaggttcgggcccctgagttgtcaggtaataaccctacatcctgttggccggagccggtattgcttttattcaccataatcacaccagtacaatatgtggggtagcctatttaactgttgtcgacatgtcggtctgaaggtctgactcgtagtcgacaacagggtagccttcctcctcgaatccgtgtccggcgagatcagagatagcgctttcgtctctcctgacggtatccggagacaccgtaggggaatagccatgcctatccctaaagtcgatatccggcggcttgtcttggcatatgttggcttgtatgttgtggcttctgttattccgtatattgtggtggttgttgattgaggtggtcgtctgtgtcgatcgtggtgactgtgttgatcctgtcatggtgggtgtcccactgtcctcctaggggggcttgtatttatacccataggtgtcccattgtccaagtagaactagggaaaccaatatggatacaatccgagtagtccttgtcgtttccatgtaaaactctggttgtctttccttatccggaactccctccataactgaagttagtttctgtataagacatggtatgtggtgggtcctgccgagatttagtcaactactattaggtatgtggtatccataaccctgacagtagcccccgacttcaatgcaaatgaacgaattcatattctcaaccgcagaccctggagtaactgttgtcgtgctcacgttaccgttctcggtgagtttagagataacgttagactttctttatcagcctcgtgcgggcaccaaaagggtttgtctaagtcaatctctgatgtcaaccaaggaagtacagagcgtacgactaagtctcccgtcttgctgtaatcgagaatttggattgaagtcaagaaattctatctcggctggtacaccatctcttcattccgtattccttgtcgagatccagcaaccgttctcgagcgatcgagaaggcgtagagtctgcgacggagccttgtcaacatttgtcgtactcgccatagtcgatcttggtgtagaaccatagagacatagagtcttcgtcaatgtcgaatagaattttcctgaaatcaatactcagaaaagaatattagatagaaatagcccccgagcgaatgcccaaagggtgataatgttataatatgtatggtaaattgaaaatgaattaaatttaccgaccaatgttttgtgtatgagcgtcttctctcttaccgacttcgatcagtcagtttgtagagtcatacactctccctagcccccagccttgtcatcggagaatcgttctcggaggataaggctcttggacccttgacctgccttggttgaacaaacactgatcctagcccccagccgtgaagttggaaagctcagtttccgattacacggcttggttaatacgcacggcgagaactcttacacgaccagatcttacatggtcttttgtctctacaggatccgacaaggccttatcggctctgggcgtccccagccgaagttcccttaggttcctcggaggccttgtcaagacggcgtaatgggacagtaggataggtttcaacgctaggtgtcgtcgtggtaagggatctctgggtaaaacacttggcgatattgtataccagctatcaactttgttgaaatagaggtagtaggagagtcgttacaccgctggtcgagaaccaggcagtagtcataactcgaccacttaaagtggaaatagtgggagaaacgctacatcgctggtcgagaaccaggcagtagtcgtatctcgaccacttaaagtggaaatagtgggagaaacgctacatcgctggtcgaggaccaggcagtagttgtaactcgaccaattaaagtggaagtagtgggagagacgctacagcgctggtcgaggaccaggcagtagtcgtaactcgaccacttaaagtggaaatagtgggagaaacgctacatcgctggtcgaggaccaggcagtagtcgtaactcgaccacttaaagtggaagtagtgggagaaacgctacatcgctggtcgaggaccaggcagtagtcgtcactcaaccacttaaagtggaagtggtgggagaaacgctacatcgctggtcgaggaccaggcagtagtcgtcactcgaccacttaaagtggaagtggtgggagaaacgctacatcgctggtcgaggaccaggcagtagtcgtaactcgaccactagaagcaaatgtacgagagattactacgatcaactggttgagaaccggtgagtaggtgtccctcgatcatttggagtcgtggtacgaggaccactacgctgccggtcgaagaccagtcgtagctgttcctcaaccatctgaagtcatggtgcgaggaccgctacgatgccgtagtcatacctcgaccatctgaagttaaggtgcgaaagattgctacgtactggtgcgagaaccagcgtgcgagcagaattatctctcgaacaccaatggaagttgcggtgtgagagattgctacgtattggtgcgagaaccagtgagcgagcagaattacctctcgaacaccaatggaagttgcggtgtgagagattgctacgtactggtgcgataaccagtgagcgagcaaaattatctctcgaacaccaatggaagctgcggtgtgagagattgctacgtactggtgcgagaaccagtgagcgagcagaattatctctcgaacaccagtggaagtgctagagttggtttattgcaagtgtatctcatgtggccagcatgactcacgtacccaacttatagcatatccggatgtccgttcgcaatcatgtcgggtgatcaagccgacgacgttcgcaaggaattatccgttaacaaccttttctcaagtagtccagccatggccggtgctatgagataggtcgtcggtctttgttggtaggttgggtgcgataactccgcatttgtcgagaatgttctcgataatggagtatattcgaccataacctactcgagtgctcaattgttcctgaaaaatattttctagaaggcaagatatatagcagataatatcgagtatgtactcaaagaactgcatggatcttctagtattatcaggatacaataagcagatgtaaatatcagggcattatgtaaaccgtaaacaagcatgatttatacataagagaacggagtgagcccccagcgttagaccgtagttggtctatcgtcggaagtactcgcacaacggatgttgtataagaaacatgctctaggtaaacataataaattgctgatatgataatgttgtatcatctgaataggtacgataaattgcatataaaatattacgtacctttgtagatacatgccggatgtatctacgaaattagtagatcaatttgaaaaaccaatctaccaattaccttattgcgtactcgttcgacatcatatgatctgacatcttttggtacggcgcggagcttgaggcttgggtgatctcgatagaccaagttgtcgatgacgatgatggttctgatcttgtcggaagacatgttccggtcgggttagatctccacagccgaagtcgtcgagtagtttgctattggagaatccatctcttaaacccatctcgtcgaaatcctgaagcaccaaaatccctctacctggcgcgccactgtcgacgtttgatgtcgcaattctggtatttgcatagtatggggatcatcggtgctagaatatacgcgagactgaggtgaaagagacggagacaaggatttttatacaggttcgggcccctgagttgtcaggtaataaccctacatcctgttggccggagccggtattgcttttattcaccataatcacaccagtacaatatgtggggtagcctatctaactgttgtcgacatgtcggtctgaaggtctgactcgtagtcgacaacagggtagccttcctcctcgaatctgtgtccggcgagatcagagatagcgctttcgtctctcctgacggtatccggagacaccgtaggggaatagccatgctatccctgaagtcgatatccggcggcttgtcttagcatgtgttggcttgtatgttgtggcttctgttgttccgtatattgtggtggttgttgattgaggtggtcgtctgtgtcgatcgtggtgactgtgttgatcctgtcatggtgggtgtccccctgtcctcctagggggcttgtatttatacccataggtgtcccattgtccaagtagaaatagggaaaccaatatggatacaatccgagtagtccttgtcgtttccatgtaaaacttttgttgtctttccttatccggaactctctccataactgaagtcagtttccgtataagacatggtatgtggtgggtcctgccgagatttagtcaactactattaggtatgtggtatccataaccctgacaatagtatgttttctcattatattattcaaatatattaaaatgacaacttaattttaaattttgcaataactttacaaaactactaatatgtaatatccatattgtattttatatacgtgttagttattaattatttttaatatcaaattttagttatttgtaaattatatatattgactcattttttaatatatttttttaattccgaattttctgtaaattgtatttctatatagactctatgctcttcttccaatattatttatttttatttcagaatttttattatttctaattgtatttctatgtggactctaaactaatttttaatttcgaatttcagttacttataaattgtattcctatattgactttaaactctttttcccatatttttcttaatttcgaattttagttatttgtaaattgtatttttaattatttttaatatcaaattttagttatttgtaaatatatatatatattgactcgtttttaatatttcttttttaatttccgaattttctgtaaattgtatttctatatagactctatgctcttcttccaatattatttatttttatttcagaatttttattatttctaattgtatttctatgtggactctaaactaatttttaattttgaatttcagttacttctaaattgtattcctatattgactttaaactcttcttcaaatgtttttcttaattttgaattttagttatttgtaaaatgtatttttatacggactctaaactctacttttaattttattatgtttattccaaattttagttagttttaaattcctatatggactctatactctacttctaatattccttattttttaattccaaatttctatttttttcttaattgtatttatatatagactctatactctacttctaatattccttatttttaattccaaatttctattatttactaattgtatttctatatagactatactctacttctaatatttcttatttttaattctgaatttcagttatttcctaattgtatttctatatggactctatactctacttctaatattccttatttttaattctgaattgctgctattccctaattgtatttctatatgtactctatactctagttctaatattcttatttttaattccgaatttcagttattttctaattgtatttctatatggactctagtctcctcttctaatattccttattttttaattccgaatttcaactatttttaaattgtatttctatatggactctgccttttctttttctccgattaatgtgagaatttctaggccatgaaagcgaacgtggagacttccttttctattcctttaataatataatagaagatataagtaacaaaaaaaatacaatttgacatgaattatatcaaaacaattagtatttgtgatcaaacgggcatgcatgtggggtcagcccaccctagcccatggcttgatgggtacatcctgattattatgcactgctcgacaaggatatgccgtggcggctcacgtggtaaggccagaaccaagatatggccgaagaggagccaggacgtgcacgtgtgacccatgaaatatttttttcatgaaattgcacgttagtatattagaaaaaaaatagagttttagttatacagcgtaatcgaccaaactggtcgctgtcggttacaaggaaaaagattgcggaagggaaaagagtcaaaactagaagttgttgctcgtatctagcggcactactacgaaaaccatctttcgttgcggccattttgggttttcgctggtggtttttggtaccgtcacaaagcaaaggccagtgaagatcaagatcttcgctagcggttatcggccgccagtgataattgatttttgctggcggttgtgttatactggccgccagcgataaacgattttcgctggcggttgagttataccaaccgcctgtgaaaatagtggcccaggttaaaaaaaaatgacaaagcaacactgctccgttcgcctccgtcaacaccggttcaaattattcccaaatccactcctcgattcacaaattcacataaatttacacgaacaatttataataaaaaatttccattcacagtcaaaattttccattcacaatccacagaaatccacaaaaatgcacacaaatccacacaaatctacagaaatctgagcaccaccgcccgtgacctggcggcgtcggcttcacgctccccacggcgcagcgtcgatcgtgacgaggtcaaggccgacggtcgtgctccaccgcccgaggccccgcggccgtgcgccccgcgccgccgccggggcggatctgtccttcccggcggcagcctcctcccctcggacagatctaggagagggtagaggaggggatgggagggcgcggcgccaccgcttccttcgtggtcatcatcgtcaccgcttccgtcgtagtcgctgttgtcgccgtgcacatccgcgccgcgcccctcccgcccgtcgtcggcgccgcgcccctcccagatctcggtcgtcgacaagaggtggaagctggaggagcagggaaggaggaggggagagaggtgggggaggaggaggagagggaggtggatgggtgggtggagaggaggagatagaggagagagaggcagtgggtgggtgaaaggaaaatatctcagcacgcgcgtgattttaaatgatgccaaatttttttagcgggctctgttttttcgctagcggaagtgtttagtaaccactagcgaaaaccgacgcgaaaacgtcggttttcgctggcggacatttaagagatccaccacgaaaaatagagtatgttttatggcggacgtcttaacgtggccaccagagaaaatcggttttcgctggcagtcctataccccccacccctcatgtttttgctggcgattttagcatataaccgccagtgaaaattatagtgtgacgccatgaaaaattgtttttctagtagtgcgggagggggtggcggaggagcctcctaatctcccaaaaggctcccaaacgagacaggaccagcgagagaccagagacgaacctcctagtgaatgtattggaaaaccatcgagaccggcgaaagagaaagaatcgaaaaccctagcgttccgctctttccaaagctgtaggaaaccaagaggaccagagagtcgaaggccttacgaagatgctaaggcaggcaagccctatctaccggccaccagacctgaagagaatcgctacggaggggccgagcaagcctaggcaagccaaagggagaccggatgtagtgccaaacttaacgagcgaacacacagtcgagcatgatgtggctcgctatttcatgcttctgagcgcaaaatgggcaggtcgagcgtctgtcaatgccgtgcttatgcagatgatctgccgcctagcaacgctgttggaacacgtgacccatgacatttgaaatcgaagttgggaaaaccaaaaataggaagaataagaagaataggaacaggaaaaaaaagaaagaaaataaaagatggcaaggaaaaataaggaagaaataggaagaacatgagaaaaattaggataatcattgtgaaaaaaatagatggccaacggattaggatccgctgacatgaagtcagagggacgtggtgactgatatgtgggcccaaccgctcgcgagcccacctgtcagtgaccacgtcaagggagatttcacgtcagaggatcttcttctgtggccgaccgggcggagcttgttcttggtccttgctgtgccaggtctggccatgcacgacatggccaaatgggacgtgtggaagaaatatgtgcatgcacatgatgaaacatgaatgtgtggaataaatactatgtcgttttgactgtttgttgacttttggacgagcttttcggcacctatatgaagttatgaacaatgaaacatgcagatctatagagatactagtgcatagcgtttattggatggtaattcgttgtcctaaaaataaaatggaactataccagtccaggcgaccaaacaacagtttttttacaagtgtttctgggcagtcgttcggcagtgtgacaacaatgacgaagagttgacagtcggcaatgtggcaattaacgagcaacaatctgaggcactccctccatcctaaagaaaatcaaatcatactaaaggggccgaatggcctgggccgcctatttgccaatcaaagtacacccaaggtccctcaacttgtcatcgagttacaaaatcatcccccaatcgcaaaaccaaatatatgacatccctcaacttataaaaaccattcactttaggtcattcggtggttttgaccctggttttatcctacatgagcagagtcagtgtgggacccacatgagcccacatgtcaggatgccacgtccgcaccctctctcttccccctcctctcccttcctcctctctctctctctcttactcttctcttctcttctctgggcaaaccggccagtggctgaggaggaggccgccagggcgaggcgcaagaggaggaggcgacggcggctgcgacgcgggagaaggcgagggtggcggacggtcgcgaatggcattgacggtgctgcgtcgcctccgccccgtgcgggcaggcgccgcggcattgggcacagaggcggagacagggccgggtgccgtggaggtggactcggcggacttggagccccggcctgctcttgcgccgcatcctccctctctccgtgtgctggctgtccctccctacctcctccctattcgcgtgcgctcgccgccggccggcgggcatgggagcaagcgagccgtccgtggcgtcggcagcaatggtggtgcgatgcatgaggatggggaggaccagcgtcatcgtcacgtcacgtcctcgtcggcgcgaagatgaaggagacggggaagaggaagaggtggtgcgcgtcctcctccttctcgtcgaactcgtcgcaatcgtcgttgtcattcgccgataccccgctccgcgctggcggcttcgcacgttgccactctgcccaccgtcgccccacttcgcctgcttgctctacccgccggcttcatgcggcgccgctccgcctattctgctcccctctggtcggctgctcccatgggagagagcggacagatacagagaagagaggggatgagagaggagaggatagaggaagagaggttgaaaggggaggggaagaagaggctgacgtgtggcggtgtgggacccacgtgggtagaagaaaatcgattgggattgagacagagagggggggggacctggagagacgcgcgtggtaaaggaataggttggttgtatgtacagaaagtggttggcatgctagctgtacggtggaagcaaaccattatggcttgccattgacttctttttaatttccttgagaaatagacaaaaatttaaccagatcctcctcagcaccgtagagggaaggtctcctcgccaccttgctaatgggctcgtggatctgggccgacgatggccggatccgtcatcctgcctcgtcacatggtgtcatcagggatgatggagacggcggcggtggagcgaagcagtcgtcaatgctagctacgaagaggtccatcatagataccggctacgaggtggagataaaatcagaaaaaaaaaagatgaacggattgtggatagcgcattacctggtcgtcgtagggagagaaccaccggtagcaactgcggcggtgctggcgatcaccgattagccagtcgcgacacaaggaagaggggcttgctgtggcaagagaaaagccgatccagatatttaggagaagacgataactatgcgtgatcactgttatgtggcggttttgcaatgactacttcctgaagattcgcttctctacgttctgtaacaatttaatgcgcatagagtaaaaaaataactcaagatgctgacatcgttagagtacaacaagaaactatctcactgttagtaaaaaaaattatttggactataggagtgggggcagggggcgcaggggtgggatcgagattggtcgttagtgagtaaaattttaactgcatgctataaacttggtgggggacagggttgggagcggcagtggtggggggttgagcagtgggtggggctgggggctgtatcacgtgccatttaatacgtagcaccttaaggtgccacatagtagttctatacacacacgcacacatatacacaaatttttacgtggaaaatccttacgggaaaaaaccacggacaccgactagcaatgatcgatatagagaagttgaatacaaacgcacgacacactgggttgtcgcacccttctcgtgtagcttacaagagacatgtaaaagagaaatctataagtcctagtaggaaaagacttacaatcataataagaaactaatcaagtgttttattataaaactaatccgaacatattgcatgctatttttttttgaaaggaaagcggcaagagtattgccgaatatattagaaggagagaaaagtatggtttacacgattaatgcggaaaaacaacttagaatcatctcagaaccatagatcctggtttgagaagggaagagatacactcatgacggttggaattcaaaactgctttcttgaatatcttggatgatctggtgtgaagtcttttgcatgtccggttcttctcctctgaagatctttgcgttcctttgtagccaaatgtaccaccaagttttgacaatctgaacatattgcatgctgaaatttggatcacatatttaacaatctccatcttaagacgaattttccttgtagcataaaaatccgaaacgctcctgtccagacgcctgattgtagggaaaacaatcggattctcatgcgtctctcctcaaaccgtgtgatgttataatggatttttttactgttccaatgggtatttaatgatgtttcactaggtcattttgaaatgttacacgggatgtttttttgatgtttaaggaggtattttgtgatgtcctcggctgatgtttcactgtatcattttttaatgttgcacgtggtgttctttgaatgtttcaggaggtattttgtgatgtttcagctaatgtttcactaggtcattttgaagtgttgcacacatggtattattttgatgtttttctaggtattttgtgatgtttcactatgtcatttggaatgttgcatgtcgtgttctttggatgtttcagaaggcattttgtgatgttttagaacgtatttcactagctcattcggaatgttgcacgtgatgttatttgaatgtgttagaaggttttttgtgatgtttcacaagatacttcactagcttattcggaatgttgtacatggtgttctttggatgtttcagcatgtattttgtgatgtttcactgggtattttactagctcatttgaaattttacacgtggtattttttggacatttcagcagatgtttcactagatcatttaggatcttgcacgtattgttctttcaatatttcaatgtatattttgtattgttttagaggtcacaaatcaatgtcccacttataataaaaatgtttcaattagtaatataattacatatgttttatttctccaaaatataatcatgtgagatctctttgtaaagatttaattgcaacaaattcaacggtgcaattgaatcacaaattggataagtatttcataagaaaaaatggtttataatttgctaattaagagtatgggagaagagacaaggggatgggagaagtttgcatgtacctcacatgtggaagagaagaaatgactgcgtgcatgcatgtggaggtttcccagaagaaaagattgcatgcatgcttagggggcccaatttttttctccaaaaatcgggcacccgttccgtagtgtcctccataaaaatcttcaatctccaaacaacatcatgtagtaccctcgatagaaaagagatgaaccatacttcaaacttaccattggtgtgaacttagcatagacacgaaacatgatgcacaaacttcaaactcgctattggaataaaatcctgaatatgctgccataaatttatgtaaccctagtagaaatgcaaaactctagtgcacaagacaaagtacttggatctcccaataacctactggtatgttgggtatgatggtagcaaaatttgtcagaaaattggatcaccttgtgatctagacaggagtgaggctccctctcgtcgactcaaatattcttcttcttttttctgtgcttttcctcttaggtaaataccccacttcaaatatttacttatcataatgagaatatgtactcaatctagacgtggtagattatcttcaaactcgtcataagaattaatcctaaatctgctcgcagtactacatgaatgctcattggtgccggttcttgaaccaacacaccttcgttttttatttttcaggtgctaaaaagtcgaaaaaaatatttggtatttttattaggcacctatacaatcacactctcattcccaaaagtcacataatttttgaatccatattcatacaaatgtgtcaagaaaaattcaaattcaagacatctcacttcacacaaagtcaccttgccatatcacctacaaacacttcttgtcttggaaacaaatgctattgttttgagaccactatcatttgaacttataatccatatttaacaccatagataagataaaatgaaaagtgtagaaaaatgtagatcttatctatatctacaacttttatataggttttgtgtctatctgatatcgtttagaaattttaaatatccactcatgcaaataggtttgagacattgtaacacattttcggacattcaaacaaact

SEQ ID NO: 7651 - DNA, 6706 bp, Oryza sativa
ctctccccccccttgctagcttcacatcaaagctcactatcgctcgacggcgacatcgacgatgagcgagacgacacggccggcggtggcgcgtcctgcttcccggaccacctcctccggttcaagtggcggtggtgcctctgcggttcgtggccgagccggtgacggtgaggtcgtgcggccccgccgacgccgacgcgcgtgacctcatcgcttgcctcttcgccaaggaccccgccgcccgctttggctcccgccgcggcgctgccgacatgaagtccctaacgttcttcaagaccctcaacctcgccctcctccgttcgtcgcggccgctcgttgtccttggcgccggcgccgcgccgctgcaccggtcgtagtcgtgcaaggcggcgccgacgaagctggcctgcctagagtacagagagaagataaagagaggaggaaagagagaggaagggagaggctggcctgctgacgtggcatcctgacatgtggggcctacactgactcagctgccatgtcggacaaaaccggagtcaaaaccgccgagggacataatttacactggttttgtaagtggggggacacgttgtatctggttttgcggttaggggatgattttgtaatttgatgacaaattgagggaccttgggtgtacttttggaggcagagtcggcggagtcgaagagatggcaacaagggaccgctccggcaccaagcgagaggagggcgtcgacgaccacgacgccgatcgcgaggtcctcgggcttggggtcgtaatagacgaccccatgaccacccgaggcagctctggcgctctcttcccatccttggtatcttcctccacatagccgttgccgatcattgacgcgtcctcgttgggttctgtcccagcctcagcctcatcagctccaccccgccgctccgcccatccctctgctccaccccaccactgtcccattccgctgcagctccatccaccgcgccgccgtcccgcatgctctggccgctgctcgtctcgctcagccagccgctacgccctgcccgtcgcctgctccaggggagagagaggatagagaaaataatagattagtgaggctgacatgtggggccacatgagccccaccatttttttttgatcaaattgccacgcagacaccacgtcagccaaaaccggggataatactgctgagggacctcatttgcatggctttgtaagttggagggtgcgttctatccggtcttgtggtcaacagacgaatttcgaactcgacggcaaattgaaatgaacttaatcctaaacttttcctagtacagaattaggcggccctagaaccgtggttggggtggtgggccggggtgttacgttaatgggccgcatcacctgtaaaggtccagggcgtgaggcacggcgaaggtgcgtgcgtgcgtgcgaccgacctgaaaatccaaagcactcgcgtcgccgcggcctctccctccctcctccgatcgccgacgatggcgcgcgccgccgccgccaccgccgcggcgatcgctccgcatctggttccggtgattcggggcgccactccggtgagttaacttggtcgtcgatccgtcgttttcttccggcagataaaccctaacccctaatttttctttttgtgcttgtcttgtacttgtcgattcgatgcagttcgctcccgccgccgccaccgccgcggcgatctctctgcatctggttccggtgattcggggcgccactccggtgagttaacttggtcgtcgatccgtcgttttcttccggcagataaaccctaacccctgaatttttttttgtgcttctcttgtacttctcgattcgatgcagttctcttccgccgtcgccgctgccgccgccgccgcctccaccccggcacggtcatcctccgccctcacccagacgctctctttcccgatccaagctaccagggtaatattactgctctaattgccatgtctatctgctacctccgtcccctaatccaaaaatataggctcccttatatttcttttttgggacgaatgaaacaaagggaatcgattctgtcacacgggtggatttgggtacagtaattgtaaaccaaaccctcttgctattctgatttgctactactgctctattgagttgagttgatactagtaattggattggatcattttgttattgttgcgtgtgcttgcctattttgttgaacaaaattcctggttattgctgctgcactattcctccgttaaatgcgcctaacttgttgtttcttgttcagtccgccgccacctccaccccaccatgggcttcctccgcactcgcccagccccgctatttctccacaagagctaccagggtaatattactgctctaattgccttgcctatctgctacctctgtccccaaatccaaatatgagggattttggctctgcattcgcattgccaaaatcccttgtatttcttttcggggacggatgaaatcgattctgcatttgcatccacgcttcctaactggatgagagaggagtgacctggagaagctacctgtgacgctggaagttttacccctgttttctgtccctagaagttttgcccctattttctgtccctagaaagtcctgaagttacctaaagttgcattttgatctctctgtggttgaagtcttgctgcgctgatcatctgtccttcttgccacacgggtggagtctgcttttagtatttgggtacagttcttttctgattaagattcagattttatccgcactcaccctgtcctgctatttctccacgcgagctaccagggtaatgttgctagtttaatattttatatcactattttggtgtgatttgctgaaaaaaagttgttttctgatttgctacaagaaactatttgataggattttctaaagtgatttatattgctatgacactaaaaatgattgtttgaactagcttttatctgacaacatcctttgatttgctgaaccctagtttaaagtgccaattagtgcaaagatatgtagtgttgagtgaaaagtttggtttggcttttgtaccttgtgaagtttttatgaaaaattctaagttatttgcacatgtgcatatgcatgtgttgacgctgttgtcttcgcatggttactcgcatcttcaaacaatttcttacaaaaatattatcaaaattatgtatgttatggccgttaggtgcttgcgtgattaattttgtatgatgcagatcatatattaaattttatatgtatgactgatatgtggatcgattttaattatggcctttatatattatgtagttagcaagcaagaaaatgatatttatctgaagcaaacagtttgttcttgcatggttgttttggcacatcaagaaaatatgccgtttgctagtttgacgaagataaaaataggaggatgggaggaagcttactggaagctcaatctcagaattgaccatttgaatgctgtgatgaggtactacattcggctcgaaatatataacttgtgaagtttctcgtgtggcttgtgaatttgttataggtttagacagtaacaaggaagtatgaagagaaactaaatgcgagatgatcattgtcggttgagacgagaaagtgggtggagaatttgctaacattgcattttttttttggatttgtatattccgacagggatgggcaaggtatgcaagtgcatcgggaggtgctcaaggtcgtgtccggtggtgtctgtatattttttattgtggtcactattcgtcatctgaaggagacgtttgcccgtcgccgtgctggactcccctctgtgatatctgatgggcacaagtgctagtggagagggcaaaagtgactaggagaagacaaggctacgaacggaggtgcagactaaaaggcggcgtgtattgcgagtgtgaagagggactgtgaaaacaagtgctgcgggagttgtatcgaacgaatttgagaagtaacggcattagatgggttggttaccagtgtagtatttttgttgccacggtgaaaagcaagtttggaggcccgctagagatgcatatgtttgtggcattgaaaaggtttctatggcgcccaacaaattcctttgcaacatgctcgtcgttcgcagaatccctcgtagacacgttgctgatcgagcggactagtgtatccgggcatttacctgttgaggtgttgtcgccgccgccgccgctgaagaaggcgatgcgttcgtcggcggcggcggcgccgcggctggcgaatatcaacgggcctctgaccttgaatctcagtgagcagttgcagggttcctgctcatagcgctggagcatcagtgaatactaccattgaacaccccggaccatttcatgtcatacctcttggtgagtccttattggcctgcaaatgaagaattgtttgaagaattcagtaatgcattttccacgattttagaggtatccttccctacactcaacaattctaatgtagacacgttctcacatctagcttgtgattccagactagtagatgggtccactatcagtagctcaggttttatctctcgaacacctgtttcttctataaagcttatagagcattttctgccatctcctggcaaaagaaacaaggggacaaacctaaacaaatgttttcttaatgctatagcattcaacagccaatggttgtataaattctactaacagatcgaatgtagcgtgctctttgtgagttctactttgacattttagttctgcctgttaatcatttgcccttgattcttctttatgacgaattatcctttttggttggagaacaatgttcttcaccctgcaattattaattggtagctacaaaatgattgctagtataagtgaatagaaagatagatctgtcttcaacatttgttcgtacgtcttacattggttgttcactgcacataaattgttttttttaatgaactgataatttcaagtttagggaatatgtagcagaatttgagtttgacaatgtttttcttgctgatcttgacaaggtggaagaagagggataatttgttgaagtttgacaatgtttttcttcctgacgaagcagtcgtggaagaagagacggacgaggccggggccattgccggggtcgcggaggatggcggcgcggacgacgttgcggacgaggtcctccgccctggggcaagtatagttgtagtatccgacctgcagctgcgcctccgacaaggacaacgacgcaatggagaagaacaggatcgcccacgctatgatcaccggcgagccgtgacgacgaacaccgcgtgctgcgctgcacatctttcactgctataccgtgtgtagctttgacgatcgcagtgaaactgaccgatgcgtcggtgttgatcgatgcagtgtgtaggagtagtagtgtagtggtgcagcaaattaaagcaggagctaggcgtgacggtgatttatatacgtggatcgatggtggatgtgcgtgccggggtgaagtgattagtgacagatggagaggggagcagagttgacctggaaggtactcgtacctcggtaaactggagacgtcacgttgattacatggctttcccacccgttgccgcgacctctatttagcaacgtgttttaacctttcgccgctgagccatcgtcgtggtagtaatatcacgttgtaaaactgtaactagaagcgtggcgtcgtaacgatttcgaacgaagagacgccgcgtcaaagatagtcgttgcgccactgagaggcgtgcaccgctcgatcgccacgacgaggctacacgagacatgcagcccgcgcttcgtccccagccgtcgtgtgcgtcgcgtcggcctcgtccctgtcgtcgttgataccggtcgggtgattgtgcatcgtaattcccaccctcggtcactaattttggattctgatacccttcgatcgtgtaacggctagcgcgcccgcagttccccatccaatccaagctcgcacgttgttcactagccaaacgtacgcgacgcatggcccaggggccagtgcgggtgccgcaaataacactctatgtgatttagtgaattccagcacaagcacacaattcttcctccaacacttgatacacgagtatttgggatacaaatgggagaaatggaatcaagactgagaattagcagtagattggagaagaagagatagccagggattgaagagaagagagatacagaggttgaagaagagagagcatcggaaggaagaactcaggtttcatctattttgttcgatccccccatctgttggatctgctccttttgtaacggcttgaatgattggcttatcgcagcggattgagcctagctagccatgggctcaatatgtataccgattcagcccagttacatgacaatccacgagtactaaatatgtatgggatttagtctatgcactaacagatgcaaaatcagggacaaaggtagtaacaattcataacaggtaaatatatggataaccacaaatacaaatactttatattatactggagtagtcttttttttccgagtacaaggttttctgtattttagaacgatgagatataacaagaaaacatatggctacgaccacatcgtctgcatgcatgtacgtaaccccctgcataagtggccgaattagctcttgctgtggttgatggcgccgcagggctgcagga

SEQ ID NO: 7652 - DNA, 44091 bp, Oryza sativa
ggtggacttagcagtttcaacgtgaaattgaattggcatgatcagtcagagccgatgctttactctgcacgtgctgctcgtcgcgattgctgctcgtcaaatcggagtcgatcagtcgactccttgtcggcgtttgatgcgaagccaaatctcgctaaacaattgacgacgatgatgaagacggccggcggcccggatgggcctatttggtatgggattggtccaaatctaaaatttagttctagagttatgtttggataaagccgtagagcaatttaaatccaactctatctttctttctagtttattttgtgaaattattttactcagtttcgtttttattttaggtggaggtgaaactgtttagttaggctctaactctagtagaggtggagctgaaattgtgccaaatagacccttagtatatccatctctaaagttctaataccatttattataaaaatagatgcacgactaatatatgacttttatgtgaaaaactcttaccagaaaagcctacatgcatagatcggcaatgattaatatagaggagttgggtacaaacgtatagaatacattgggttgtcgcatacttcttgtgaggtttacaagagatatataaagaaaaattctaagagtcttagtagaagaagatttagagacatattagaaaattaaccctgatagtcaagttttatatattagaaaactaatccaaatatgtttcatgccaaaatttgtagtagaagtatcatatatgtaacatatttaactatacctgcggtatagcactatagaacgtgtctttgccaggacacttcgattacttggtaatttgccaaaacattccatgatcattatttcaacattttactcatttgggcagataaaattttaaaaaggtgcttttacgccctttcgcaaattgaaaattttggaatttcagcgcctcacttcctaaaaggacatctttaattagaaaaaaaaatttaaatctgaaaaaaatcaaaatatatttttaactttttaagtattttagttttccatggaccccgtaaacattttctttatttttgcaatttggatgttttttaatttaaaaaatgtttaagtttaccaaaaaattattcaaatttcaattctttgtccgatattttttagaaaaattctatcaatcacctccaaaatgtttggagattttctgcaatttagtaaaagataaaaccaggctgaacatccaacttggcatgaggtaatttaaaacgtcatctctgtaattgtatctatctagtagttgagctgaaaaatgttaaaatattaaaattatggtcattttagaaaactaccatgaaagtgtctcgtagaaaatacattattgtataaaaataacaaatacatacatatctaataatatttcgtcgagcatgttatgccttttcgtacgaaatagtatatgtgccatggaaaaacacgtgagcatttgagtacttcagactttcactcgaagagaaaatgtatcaaatgttaattaattgtatatgtacgtacatcctaatttaaaaaagtacatgtcctatattgtatattcaaggtttcattttataagaagcaaaggctctaagaatctcccacgaataaaaaagaaggcgctaagaatcaaatttggacggccatatagttaattaattagcttgcagtttgccacaaccagtatatataagaatttaggtgttgtacatacgtaccttgatgatgtagatttgcaccgaactgaaaatgacgttagtacgcatgcattttctcctagagtgtaccggctgggcggctggcatttatatatactatgtaaaactccgcgtgttgctactgagttagcataataacaagtgaaaacaatgtgtaagatagctagctagacaatacaagcttacataaattgatgcatgtgatttatgataaattaaaattaaatagtgtatagaatgatgatttaaatgataaattaaatttaaatagtgtatagaatgatgatttaaatgtaaaagtaaaggtgatatggctttatgagagaagaaaaggagagagatattttggaccatagattatctaagactaaaaataattgatgtgatatggcttaatgagagaagagagaaataacattaactaagtgagaatgaactatatatagaatattataaaaaaggatgaagagataaattgaaataatatttgaattatgtgggatgatgatttaacatgcttacattttaaaaactctaaaattcaataaatcataaaattacaaataatatagcatgcttcataatgtttaaatgtaataattattattgaatgatgatgtagcatattgttagaggatgatgatgttgcatctttttatttcaactactcccacattcctttatatatattgtaaaattaactggggcactatggtgtccaggcaccaagatttaaattgagtacatatattcaatttaaatgagtatgaatttttttaaaaaaatgtttagatatgatggttgtaaggtggttttcagtcggttcatctgtaaccgtgatcaccatctaatagggcgctgccatgtgcaaagggaaagctgggggacggtaagtctggttcggctcccaccgcctctagccatcgacttcatccagtgaatgacaggtaggcctctatggtgactgaggttggtttggccctactttagatcggtttcaactgtcatgtgagccctccaatctttttactcacgtatgattgaccggaggttcattttatggcatgacatatgtatttttattcataaatgacctgcataaatatatttatcaaaactagtgaaaatggttagcaataaactcctaccatcaagttttgatataatattttatattctttatacaggagttgacggttaaagtttacacttaatgaccgtcaacaataagcgataccgtggcagtttcgcgtagccgcgtgctaacctcggtataccggtattgcactcctaccccgcgataccgatggaatatttcttccaaacaaatttcaaccggtatatttctttcaaaaaaaatcaatatcagtattcatgcaatttttgttcaaagcactactttcgctacagtacaatctctaaggaacagcccctacatcaagtgccactgtactattgtcgtatactatttctttcttttccaccgttgacgttttagaacggagggagtatgtatatatcgtctgtacattagatttgctattttggtactttcagtgtcctttttctgagtactagctgaataattttgtgttcgctattggagggtacactaagttgaaaaaagaatttaaaatagttttgtaagatgatttaaaatataagtatttatatgattattaacaaaactaaggcagagtgaaaaaaatatcttttagtggttaaattttaaattgtttatatatccctttcaagcatcggatgaaaatgtacagaacgatttttgtgcactggactgagtgtcccataaatacttatattgtggcataaatttttgaatactcaaaatattttgaaacaaaagaagtatatggaaagtgtgtaccattaatccaatctttcatatgactgtcaacgccgtaaatatatctgtaatattactctcagtacagttaattagcatatggccctgaaatttttcggccgaacccggcaattttatatttatatatacccttgccttgagcttaggcatcatgtagcctcgccgctcaagcatcgctaactcagttatagctgtctaacaaagcaaattagctttcgctgagctttgtgttgcttttggtctcctagataggtttgtgaagcatgaagctcacggtagcaattgtctgtgccatggcgaccgcgcttctcgccgccgccccgtcgtcggcggaggccggcgacggcgagctgaaggtgggctactacgacaacaaatgcagcggcatcgaggacatcgtcaggtcgcacgtcatcaaggctatctgtcgaaactagatttcggcaataataaaagggggtggctatcaagctaggaaagtgtatgggtttggaaacaaaggatttatacaggttcaggccttcttataaaagaagtaataccctactcctgtccggggatgaatccgccgagtgtattattgattgtatgattcgggaaaaaatcagcatatgcccctagaggcgcccggaccccccttatatatgggaaggagtccggattacaaaagataatctatattcctaacggaatatgaagatacagataaaatacagtcgtaaccgactaagtctctgggtgtttccttgatacacaagttaagaaacaaacccgagatacagataagatattctatctacattaggtatcctgtacccagttcgaataccatcgccgtgtagatatgggatacccataatctccacagtagcccccgagtcctttgcagtcgaccatcatagccttctcaaagatgataatccgagtacttcaaactcttcaagccaaaatctgccgagtggactgtaaagggcgaaaagataaagaatatggtgcatcgaatagatgcacctaattaggtgtagcccccaactatgtgattagttaacaaactaaacatatagttgaaagacaaaataataacacaattgtgcattatatgacaaaagcacacgcggcgcctaaataggcatgctagccgactgctttttagccacaataaaagaaatccgagtggtttacactctaaaaagttcacgaatgaacacacttgacaggcatccgaatataaaaactctaaagattacccatcaagtattataaagattatggtaataaataagtcaaatagcctaggccatgactatttaccatgaaaacaggcatataatacgccaaggaaatgactataataaaaacaagtcatccctagttaacccaaacagcttttgtagcctaaaaaagcttgcaaaaacagcataacgcctttctgtcgggcacctttttaatttgcattgcaataattccaaagaattatatgaccgcataaaaaggatttcatcagcattgggcaacactgttgtgcgcataatattgccaaagcaaaatatgcctaagtccctaaggaacacaatgggccacgctgttaaaagtattgggctgaagtactgttcaggcctaggcccattagcacctccgatacccttaactgaaaaatccgatatccaagcgacgcttcgtcttccccgccggaactctcgccattttccccactccctgctacagtgtaaagctgcgccggcgaactagggttcacagctccggccaaatccacctccgaaaagtgcatcaaaatccttcccgtgatccaccgcctcaatccctcacctctcccaagccatccctcgaatcaaatcagcacatttgagtgaaaccgatggcggaagagagagaaagcttcgaaggccaatgggcgccatccgacgtgacggaggaaaatcttaaggagatggtggcgcacggcgttctccctgccaaggagatcatcgggtggcggccagcgcacggtgaggttttcccgtctccggatactcatgagattgtggtcttctcgcatttcttctacggcggctttgctcttccgacctcaaaatttttccgcgggatcttgaatttctatggaatcagcttgcatcacctaaacccgaattccatagtgcatatcgccaatttcatccatgcttgtgaagcctttttggggatcaaacctcactttgccctattccgccggatcttcttcctcaagccccaaccaaacaagaacaaaccgtgtgtagtcgggggggcaggattccaactaaggggaactctgagccaaaaatatttctcgatgcccttcaagacttcgaacaaaggctggcatgcaaactggttctatgttcagaatcccgagcctgctcttcccgggtactcttgtcttcctccagtgtaccaagatacttggaactctcttccaatcggagatgaagcagtacaagccttggagttgttggatcgtatgttaaatcttaaagaacaaggcttacagggagagcagatcactcggcacttcatcaaatgccgactagcgccaatcaaggaaagatcccgcacagcattcgagttcgacggcaaacatgatcccaaccgtgaagaaccagattccctggatttcaaaatcatgaaggagaggatgtataaaatcttctcaaatgcaattgtagtcagctactctcatcaactgccagttgtgccatataatgcattcaatccgcctccacaggtatgcatcggaaaccctcaaaccgtgatcagaacataattttatcttcatgctgagttgactaactatggaagcatcttgttcaggaatatgcattgatgaagtcagatccaccagtcactcagcgccggtctcctcgccaacacaccgctcagggaggtggagggccaacgatcagaccagatccgcaacctcagacctccaaattgactggtcaaacaggtcctcgcaagagaaagctggtacttgatgatgatgaaggcgacgatgataaatctggggataagggctcgcctaataaacccccaaagcgcaccatgcccaggaaaaaactggctggccgtgcgatgccaaagatcagaacatcttccaggtattagatctctcggtatgatttccgcttcggcatgttttccaatgaagataatgctaaatactgaaagaacactctgcaggaaaccatctgatatagatccatctggaaaggaccccgatcctgccatgacagagcaaaatatacccaaggaccccgagccgactgctgaaaaccagccgaccgctgaaagccagccaactggcgcccatgcttcgggcgatagggccgatccgagtgacctgccgccgactagaaatcagtcggcaacaactgaaacggcaacaactcaagagcccccgactggaaaccagtcggacgcaggccctgatcaagagatccccgaagtagaagcgcagacgacgacttcgcaaggaccagaggctggtaacgactcgatagctgggtcttcaggtaaagaacaaagatcacctcacgctcagctaggtacatcttcaggttagttgtcttctcaaacaatggcgatttaaataacctcagtgtatccgtctaacgtcttggaaatacatcaggaccatcaggtgatgacggagaagaaatccctcgcataaaggcgaccgacgactctcgtcctcctatcttgatcaaatggtgggacgagaactcacaagccgccggcatagtcataaaccgtcaaaaagaagatgaagaagtgtgccagctgaagaaagcgctcggagaagccactcgtattgtaaatgtaagtcttccgagtgacggccttcggtaactttgttttctttttagcagaactgaaccatgacccatcatgcagagaatccatcttcgcaatgaggccaagactacaactttggaaaagctggttcctcatttgggaactctagaagcagttagggaccagctgcatgaggccaaggagtgcgccaaaaagacagagaaagagttaagggaccgaatcgcccagctccaggatgcaaacttcgaactaagtggttcatcaaaaggtaatcatccagatctgtttcatcggtttaaactggcataacggtatcctcaaccatctgaatttcaaacagcgcaagctgccaggatggaacagatggtgaagcaaattgaagccctggagagagacaagacagaactagctgcgcaaagggactcagccttgaaggaagtcgaaggtaacgccagctaacaatctgagcttctctccttataatgcaacagatgctcatcataaatgtgttttgcagaacgcaagatcaaatctcaagctcagtttgacgtcctggttggtaagatcaagaggcttgaaggagcaagggataacgtcgccaatgccgctgcaccaattatccaagccatgttcctcaataatggtggtccgagtgcactcgacgcaaccgaaatatttgacaagctgagtgttgctccggaagtatatttcaagaatatcaagaaagctggaagtatgggagctggcatggccttggcgatgacaaaatccttgtacccgagaattgaagtcgataccattgatggatttgcagacgggacaagtgaagaggctgcccttgatcttatcagcaatgctcagagtgcggctgacaagattgcaagtgatgttgtagaacaattccgcaacaatgatcttcagccgagcgatgataactctgatgatgaaaggactgattctgactgagtttgaatgtaatacatggaggctcaatttgtacaatactggtgtatttatgctgtgcttgatgattcttgcgaagtttttgatttcttaaaagtttttgctaagctttgttgagcctaaaacccaaagaagctattaaaaactttcagtcctcgcaaactaagtagaaaaaccaaacaaggcaatgataaaccgagtaagcaaactgaattgataaaaaatcacactccattattatgatgatagcccccgactgacaacttcaaggagaaaacttgatgtttgacagtcaaaatagggaaatacaatgataaagttaagcgtagaagcgacgaagatgttcaatgttccaagagttgtcgacgagagtgccgtcttcgcgcttgagtcgatatgaacctggccgggtaacttcagagataataaatggcccttcccatagaggagataacttgtgccgatctcgtgtggtttgaattttccgtaaaaccaggtcgccgactagaaaggcacgagatcgaacattgcgattatgataacgtcgcaacccttgtaagtaccgagctgactgaatcaaagctgcttcgcggacctcttccagtcggtgcaagtcgtccactcggtcttcttcatagcgttcttcacggaaattacggaagcgcaaagattcgaactcgacttcactcggcaacattgcttctgccccgtagacaaggaaaaaaggtgactggcctgtggcccgactgggcgtagtacgcaaagaccaaagtactgatggtaactgtgacacccatttgccggcatagggtttaagccggtcaaaaactcgagctttaatcccttgaagtatcatgccattagctcgctccacctgtccattgctcattgggtgtgctactgaggcatagcaaatcttgattccaaaatcttcacaaaagtctttgaaaactccgccggtgaattgtgtgccattatcggtgatgatccgattgggtactccgaatctgtacacaatgttgatgaagaaatcgcgagcattatctgctgtaatcgtggcaacaggcttagcttcgatccacttggaaaatttgtcaatggccacaaagaggtgcgtgtaaccgccgactgcctttttaaacgggccgaccatgtcgagcccccaaaccgcaaacggccaagacagcgggatagtctgcaactcttgagctggtagatgaatttgtctggcaaaaaattggcaaccttcacatgtgcgcacaattttgtcggcgtcggacactgcagtaggccagaaaaaaccctgccggtaagctttgccaacaatggtacgcgctgcagcatggtttccgcatatcccagaatgtatgtccttcaacaattgtctcccttcctctaaagatacgcagcgttgcagaattcctgaagggcttttcttgtataactcggcttcatgcataacataaagtttgctccgccttgaaatccgctcggcttcatctttatcttgagggagctcttgggaagttaaaaatcgtatgaggggctctcgccagtcagcttcaaccatagctatgtcatgagtgtccgcaacttgagtagcatctttgtgaggtactgtcggcgaataaaggtgttcgacgaaaacatcagatggcgctgcctcgcgcttggatccaaagttggcaagtctatcggcagcttcattgttgtgtcgaagaacatggctgagctcaagcccgtcgaacttatcctccagtttgcgtacctcttgtcgatatgccatcatgttgtcgtcaatgcaggaccactctttcataacttggttgacaaccagctgtgaatcacctcggacaattagacgctttatccctagggaaattgcaatccgtagcccatgaaggagcgcctcgtactcggcgacgttgtgagacgccgaaaaatgtatccaaagcacataacttagtctttctccagttggggaaatcagaaccactccagctccagtgcctgaaagtctttttgacccgtcaaaatgcatggtccagtgctctattttctccacgggggtatcctcttggcactcggtccactcggcgacaaaatcagctaacgcttgagacttgattgaagtgcggggcttgaatgatatgtccaaagacatcaactccaaagcccacttagcaatccgcccatttgcttcgcggttgtgcagtacatcgccgagtggaaatgatgtgaccaccgttaccgagtgaccttgaaagtaatgagacagcttcctggtagtaattaaaataccatataacagcttctgaacctgagggtacctcgttttggagtcggttaggacctcgctgacgaagtagattggtcgctgaactttctggacatggccttcttcctcacgctcgacaaccaagactgtgctcacgacctgggaggtggctgatacatacagcaacaacggctcctgcgggtgtggtgaagctaagaccggtggcttggtgaggagttgtttgaaatcttcgaaagccttctgtgcttcgggtccccattggaaattatctgttttcttcagtagcttgaagaagggcatcccccgctcgccaagtcttgaaacgaatcggctgagcgccgccatgcatccagtcagcttctgaacgtctttctgggtgcttggcggtttcatgttgaggatagcagtaactttctccgggttggcttggatgcccctatgagacaccataaaaccaagcagcttccctgacggtactccgaaggtgcacttttcaggattcaatttcatcctgaaagcacggatgcttgcaaaggtttcttctagatccgagatcaaatcatccttttgcttggtcttgacgactacgtcatccacataggcttcaacgttgcggccgatctgcgttgagaagcatctttggatcatacgttgataagttgctcctgcgttttttaatccaaacggcatggtgacgtagcagtatgccccaaaaggcgtgatgaatgaagtcttcaagcagtcggattccttcagtcggatctgatgataccccgagtagcaatccagaaaactgagaagttcgcagccggcggttgagtcaactacctggtcaatgcgaggcaacccgaaaggatcttttgggaaagatttgttaaggtcagtgtaatcgacacacatgcgccattgccctgtctttttccgaaccaggactgggttagccagccagtcgggatgaaggacttctttgatgaagcctgctgctaacagcttggtcaattcctccttgatcgcgtccttcctgtcttgtgcaaatcggcggagtcgttgtttaataggcttggcgtcttctttgacatgtaaggagtgctcaatcacctctctgggaataccgggcatatccgaaggtttccacgcaaagatatctttattattttgaagaaaggtgatgagcgcgctttcctatttacaatctaactcggcgcctattacagcagttttggtaggatcggaaggatctaagggaatctttttagtctcggcttcggtttccccactttttgaaatcttggcagctggcacttctccttcgctcaccgtggttgcagccagtcggatttcctctcgggcagacgccatctcgcgggtttgggccatatcacaactctccttgtcacatgtgacagcttgcttgatgtcgctccgtagggttaggactcctcggggaccaggcatcttcatcatcatgtatgtgtagtgcgggacggccatgaacttggctaacgccgggcgtccgagtatggcatggtatgctgtctcgaaatcggcaacttcaaagctgatattctctgtgcggaagttttcccgagtgccaaaagtgaccgggagagtgatctggccgagtggagttgcggataatcctggaattactccatgaaaaggcgcattgcttggttttaactcggagcgagggatctgcatatcatccaaagtcttggcgaagaggatattgagtgcactgccaccatcaatgagggttctgcgaagcttgacattacggaccactgggtctagtaccagggggtaccgccccgggtggaccactcggtcaggatgatccgagcggtcaaacttgattgcaatctctgaccatcgaagatactggggtgtgtcgggctgaacagcattgatctcccgttcggtcagcttttgcttccttttagactcataagccatggggccgccgaaaatatgattgagctccttacggtggtcttgaaatccagccggggtgtcgccgtcgtccttcttccttgacgtgctttgttcctcgtcggagttcttccgagtagacttggtgtactgctccgcgaactgcttgtagatgaagcattctttggccacgtggttggagtttggatgatgcgggcattgggagttcatgatcttgtcgaaggtgttgacgcgcgaacgctgtcgagaagagtgagcggcggttgcaacaagttcctcaggcttgcgcttgcggtccttatgattgttacttccacctcctcccgtagccggcgtatttttcggcttccaactgggacccgactgcttcgatgcggtgacggcgtcttcggctttggcgtactcgttggctttttcaaacatgagcttgactgttctgggaggtttgcgcccgaatttgccgaccaattcttcgtggcgaatccctttggtgaatgcggcgatgatgacgtcgtcggtgatgtcggagatcttgttacgttgttcagaaaatcgccggatgtaatctcgaagagattctccggacttctgaatgacgttgtaaagatcatattgtgtgccgggacgctcgaaggtgccttggaagttggcgatgaagtggtcgcgtagttcggcccaagatccaattgtaccacggggcaatccatggagccaagatcgggcggaatccgctaaagccactggtaaatagttcgccatggccttgttgtctcctcctgctgcgcggattgcgagaccgtagacggtaagccacgattcggggttagtggtgccgtcatacttctctattccagtcggtttgaagccggctggccaatccactcgacgcaggtcgtcggtgaaggctgcaactccgtcaaggtcgtcgtcgcggcgatccggcgagtgatgatagcctcgagctgctcggcgctgcgtgattgtgtcgcgaagatcgatggggcggcgacgaggtggtgagcgaggccgttccactcggcgctccctatgaagttcgggaggcgagtgaacagaccgctcgtcgtggcccctgctcctgcgattggatcctgctccagtaatgctgaggcttggatgacggtagtcatgagatcggaagtgggggacccggctgccagtcggcgtgtggacgctttcggagttaactgggaccgtcgccgcaatcatggtcttcgtctggttcaagatgttgacgacgtggtcggattgattgagctcgttttggttgaggagggtgtcgagaagggtgatcgcggcaaccgcattctgttgaggggtgcggaaaaccggtgtcccttcgacatcttgctggccgatgagatcacgcgctcggcgccctgcttccaaagctcgttgacgtcgatcctcagcctccttcgcggtccgctcacggtcctgctgctcacgccgtagccgttcttgttcttgcgcttgatgctcctcctccagtcggcgacgttcttcgttctccctggcttggcgttgctcctccgtctcattattggccatgaaaacgccaaagtagagaggggtgtagttgtcatctaggcttccgtcgaagtcgtcgaagtcgtcgaagtcgttgtagcgagaactaaattcgtcgtactccacgatgtcagtaggacgtgagtcgacggtgggagagctgttgtagtcatccagctgatccgtcgaaaccgtgccgagtggttggaggatgacgccgacttccctgaagctaggcgaaatcggtgttgaagccgacttccgcctaggcctacgggatgaaggcgctgtcgtggtgaagacggccgctaaatcgtcggggagcttcatcaggaccggtgggtaagccccatcatcctgatctggtatcgttggagaagatgcgatctcggccgagtggtttgaagccgactcggttgaggtggtcttgaaatagctttcagccgcgttcgggaatccaaacgggaccgaaagccggttctctcccgactggtctgattccgagtcgaggagagaaatcttgccgaagttgttggtgatgaagtcgaggctgccgaaccgaaacgtctgcccgggtgggaagacgaggtcgtcgatgccggagatggaacccattgcactgatcggcgaaaaagcttgacgctacccctacctggcgcgccaactgtcgaaactagatttcggcaataataaaagggggtggctatcaagctaggaaagtgtatgggtttggaaacaaaggatttatacaggttcaggccttcttataaaagaagtaataccctactcctgtccggggatgaatccgccgagtgtattattgattgtatgattcgggaaaaaatcagcatatgcccctagaggcgcccggaccccccttatatatgggaaggagtccggattacaaaagataatctatattcctaacggaatatgaagatacagataaaatacagtcgtaaccgactaagtctctgggtgtttccttgatacacaagttaagaaacaaacccgagatacagataagatattctatctacattaggtatcctgtacccagttcgaataccatcgccgtgtagatatgggatacccataatctccacactatcatacaggaccgcggcataggcggctccctcatccgtctcatcttccatgattgttttgtcagggtatattttgtttcttcctccgtttaataatgtaagtcattctatcatttctcacattcatattaatgttaatgaatctagatatatacatttcctatctagattcattaacatcaatatgaatatgggaaatgatagaatgacttacattgtgtaacggagtgagtacatatcggtacttcatctatttcatattataaattgtttcgggttttaaatggatttatgagtgaattcatttatattacctctatttctcattataagtcattctattttttttcctagtcaaactttcaatttatagaaaaatatagtaactttttcagcacaaagaaaatattatattatcaaaatgtattaaatgttaatcttaatgatattaatttggtgttgtaaatgttgctaaaatttttcataaacttaatcaaacttaaaaaggtttgaaaaaaaattaaaatgagttataatactctctccatcatattccaaatctaaaaaatttacttttgataggcatatttcaatccaaccacctattcttttaatgactttcttggatttcatgggggtggctaattggcgcgcgcccgcctgttggccccggcccggaagcccatcaggcttctttttttcttttttttcgcaagatttttttgcgatttttttgcctttttcttttatcttttttttcgcttttgtcttattacttttttaatctttagcacacatattttttcaaaaaatgttttgagttgaaaatttttaaatctttaacttgaaaattttaaattttgatttgaaagttatcaaatcttaagttgaaagttttcgaatctgagttgaaagtttttaatctcaagttgaaaacttttaaatctgagttgaaagttttcaaatcagagttgaaagttttcaagtcgaagttgaaagttttcaaatcagagttgaaagttttcaaatctgggttgaaaatttttcaaatttaagatgaaaagttgaaagttccaaaatttgactttaaaaaatttaaattttgagttaaaagtttttaaatctgggttgaaaattttcaaatctagattgaaagtttcaaattttgagtggaaagtttttaaatttgagatgaaagttttcaaatatggattgaaaacgtttcaaatttgaattgaaagtattcaaatatcagttaaaagtttaaaattttgagttcaaagtaataacacaaaaatagaaaataactaaaaaaacaaaacgtgaaaaaaaagggaaaaagatgtgggcctaacagaaaaaacacaaacgacgagtcctttctcaataaaaaaagtgcgcgctatttgcttaactcgcgcagcttttccggaatttaatgcgtgactctccattcttccacgcaatattggctatataggcatcgagaaatgtaaatatattaataaatcgcttgtttacgagaaataactagtagcatatttaaatggatgataagtaaaattacttatctttgatcggtgtattaagataaaatataactataaaaagtaatgaagggagtacgaaacagaggaccaaaacaacttatatagtgaaaaggagtagtagttttgaagcactaaggaggtactagtagctttgaagcacttgggactaatgagtggttgcacaatgcatgcatgcatgcatgagtattgcagggttgcgatggttccgtcctccttaacgcgtccgacgagaaccctcgtcctgagacggcagcgccggtgagcatcgggctggaaggattcgacatcctggaggagatcaaggccgatctcgagaggaggtgccccggcgtggtctcctgcgccgacatcctcatcttcgccgcccgcgacgccagcagcatcctcagcaacggccgcgtccgcttcgacgtccccgcgggccgcctcgacggcgtcgtctcctccgcctacgaggcccaggcggagctcccggatcccaccttcaccatccggcagctcatcgacaacttcgcccgcaagaacttcaccgtcgaggagctcgtcgtcctctccggcgcgcactccgtcggcgacggccactgctcctccttcaccgcccgcctcgccgcgccgcccgaccagatcaccccgtcctaccgcaacctgctcaactacaggtgctcccgcggcggcggcgccgaccctgcggtggtgaacaacgcccgcgacgaggacctcgccaccgtggcgaggttcatgccggcgttcgtcggcaagctgcggccggtcagcgccctggacaacacctactaccgcaacaacctcgacaaggtggtcaacttcaactcggactggcagctgctgacgcaggacgaggcgcgcggccacgtccgcgagtacgccgacaacgccgccctctgggaccacgacttcgccgcctcgctgctcaagctcagcaagctgcccatgccggtggggagcaagggggagatcaggaacaagtgcggcgccatcaaccacagcaagagctaattcggccacttatgcagggggttacgtacatgcatgcagacgatgtggtcgtagccatatgttttcttgttatatctcatcgttctaaaatacagaaaaccttgtactcgaaaaaaaaagactactccagtataatataaagtatttgtatttgtggttacccatatatttacctgttatgaattgttactaccttcgtccctgattttgcatctgttagtgcatagactaaatcccatacatatttagtactcgtggattgtcatgtaactgggctgaatcggtatacatattgagcccatggctagctaggctcaatccgctgcgataagccaatcattcaagccgttacaaaaggagcagatccaacagatgggaggatcgaacaaaatagatgaaacctgagttcttccttccgatgctctctcttcttcaacctctgtatctctcttctcttcaatccctggctatctcttcttctccaatctactgctaattctcagtcttgattccatttctcccatttgtatccccaaatactcgtgtatcaagtgttggaggaagaattgtgtgcttgtgctggaattcactaaatcacatagagtgggttcgtaacaatatggtattaaagccaacaatccatgggttccaagccaggagatgagatggatgacatacgtggcagccgcgacttccatagactggatctaagaatttggggtggttgcacttgaggcgtctaagaacacacatgaacatctaagaacacaagaacacaacatgaatatctaagaacacacatgaacatcaagaacacaagatgaacacacataaacaaaccagcatctatagtatagttgtcggacttttttcaaaatcggcacttataaatacttaaaggtgccaatttttccctttagcgccccccgcgggcgctccggtgggtgggaaaagcataataggtgccggttttagttattccggcacctataatactgacttttatgtgtctttttgtagtactgatttgcagttgacatgattatcatcgaacacttatgggagaaaaaaataaatttgttctagccaaatcaatagagagtgcagatgagaacttttgaaaaatggggtccaaaaacatgttgaaacacatttgtttagatccatgcatgtacatggaaattttcggggttgctagtctattggtcgctcgctttgcacctgccaattgataggcccagtagttgacgtgatctgacacacggctgggatgaacgtaggttagctgcttcccaaccagtcaacaggacctcttaaacaaaagggaagtcaaataagaaaatgtttaattaatctagcctggttcggatgctagataacagtaatggagtgattaaatattgatgagaccactataatctcgattatatttgagctagcgaacatgcctgctatagttccctcaaaatcctaaagatatgtatggcgttagcgtcctttccagtggatacgcttaacacaagcttttgacgtgaaagttaattaatttactactgtacatggaaagaaattctacaaatacatcgctcttaggtaacagcatttgaattgaaataaagatacatgttgtcaaatcgaccaaataaactgacctccttcataggggcggaactagccaccgggcggctgcttgggctcgttagcgaaaactacacaaaattttaatattaatgagtaaatagatgatgaaatttctatagcaaatatcagttatattgaaatttgtctgggctcaaaaatctttctagctccgccatgcatccttccatcaaatactgtgcttcggttgacacatgcatgatgcatctggacggccaattaatttactctatatagctccagccgaatttaaattaagttcaccgtcacaacgccaggtatggatcgatgtcaacgcctacacgttttatcagttactagctgttttgctccccatgttgttagacaacaagaactggcaaataactattctgatgattgctctccaaatattcctcaaatctcttatttaatcaatctcctcattcaaaaggagtagctcaattatcaatgatcaatttgcacatccatttgtacctataaatacatcgaatgtttgcctgtcacatcatcaaacatcaaccaatcctttgaggtagcgatcactacacatatattcattcggtttcaggcgtttctttgctgtctcctagtgaacaaccttgtcagaattcagaatgttcagcagggggatgaagctaattctcatggtagccttccaggctatgagcctcatctccatatcaactgcaagtctgcagtacaatttctacggctcgtcgtgcccaaatgccgagcagacgatcagcaatgtcgtctacggcttgatcgatgctgacccttccatggccccggcgctgctgcgtttgcatttccatgattgctttgtcatggtaatgtaattgctaaccacaagttaatttagtttttcaactatgaattgatagcagttttaatttctcacaagatatattactgcaagcaaagcttagatattgatggttaattacttcattttgtccccaaaaaaaatgtaaacgaagtttttttttttttgttttttgatcatgcagggttgtgatgcgtccatccttcttgatcccacgaaggcaaacggctcgccggagaagacagcgatcccgctccgcgggtacgacgccgtgaacaagatcaaggcggccgtcgaggccgtctgccccggcaaggtctcctgcgccgacatcctcgccttcgccgcccgcgactcggtggccaagtccggcggcttcgtctacccggtccccgccggcagccgcgacggcaacgtgtcgtccgccttctccgtcttctccagcatcccgtcgccgttcttggacgccggggagctcgtccagagcttcgccgccaaggggctcaccgtcgacgacctggtggcgctctcgggtgcgcactccatcggcaccgcgcactgctccgggttcaagaaccggctgtacccgacggtggacgcgtccctggacgcgagctacgcggcggcgctgagggcggcgtgccctgacggcagcgccgccgacgacggcgtggtgaacaacagccccgtgtcgccggcgacgctgggcaaccagtacttcaagaacgcgctcgccgggcgggtgctgttcacgtcggacgcggcgctgctgaccggccagaacgacacggcggagaaggtcagggagaacgccggcgacctgaccgcgtggatggcgcggtttgcggcgtcgatggtgaagatgggcggcatcgaggtgctcaccggggcgcggggggaggtcaggaggttctgcaacgtcaccaacagctaaaaagctatactggctggctcgagtgaagaacgcacttgtgccattggtgtgcgtgccgtttttgcttagtggcaagtttgcaccttgtgctaattaaacgtttttgttctccaatctacaccatgcacacacaccattcatgttgcaattttttattgccaccttgttctataagaggaggaaaattaaccaccttaatttgttattcactctggttatagtattttggttgtatggctcatgtaaaagatttggggcttttttttttagaattacacagtgcaatgtagatactcacaacgcacacgcactcacatctatgaatacacgcacgcaaaccctacccctataagcatcttcgaaaactgggccggcaaatccttgagattgacgaagtcaccataggcacctcgttgtcgacggatatgtcgcctaccactaaaagcacaacgccgttatatcttagaaaatccgctcccatggggagtcgaacccaagacctcaggtgctactgaggctcttgtaaccactaagcgaaaacgccgttattattattatttttggagaatttgtgatttggatctgagatttgtgtgtgatgtgaatatgtgatgcatttgtgatgaattttgtagaagttgtgatgtaattttttttaagattttatgatgtatttggagatgatcgatttgaggatttggaggcaattcggggatgattgatttgggatttttgggatgggatggagtgaaatcaatatattaaaaacaacaatgaagaaaagaaaagaataaaggagcaactgaatctaacctctttagtcccggttggtaacaccaatcgggactaaagatagccgggactaaagatagcgatctttagtcccggattcgtagtcccggttaaaaaatcaggtctacaaaaggttacgaatcaggactaaaaagcacttctctactagtgtgcaaatgtgtgagcccccattgaccaagtgtaggagcaaaccctctaaaagtgtccagcctctctggccttgatcagtcaattgatcgacatcggtttgtcgtttcgcaaatggtagaaatgatgatgggtttttgatactgaattgagtctctgagcgaattctgatgagtaggaaaagcatcttcataatgaaggtcctaaatctcgtatgtgaattcctgttgataaagaaaatgatggttcacttggaactatacttgtgcaaaagaatcctattctttttttttggtgcccttatggtgtatatgttgtgatagtaaacaaagaaaggaggtgttttgttttcggaaatggtggaaaaggaacttttgctcatctcaagttccctttctagctggccattttgcggagggggaaaaaccaactttccctgtaaaacagtgtgctttgatccttctatgttattcgttttgttcgtgaaattctttcgaggttgctgacatttttgtgttttccacatggaacaaagatctgccaccaagaatacagcaggccaacatgcatctttctgggtgttcaagcaggattgtccttgttgacatcagaattgacgatggtattttcagcctcttctcttttcgatatttaatatgagatctgagcctgagaaatttcagccataaatgctgcatgttttgcacatgctttgttctgattgtaatatctggcaatttcagatttttgggatagcacttggattcaatcttctatttgaatatgatgatctcatcactgggatatgttttgcaaccgttgttcctaatctgctaccatatgctatatcacacctggtaaagaagaagattatctcatatagaaaacttcaaacctatattgtaatctgatttggagttaatatttgtcaattactttcatatacctattctagggaaagaagatggtggggacattaaatgcttgcattgcaggctttgcgcttctttgctacgttcttggtttattggtcagccaaccacaaattcctctgacaacgaatgtaattttccccaagctcagtggtgaaagtgcttattctctgatggctcttcttggtgcaaacgtaatggcacacaacttttacatccattcatcagttgttcaggtaaattatgatgcttctttgtgcccattacatagttagaattatatttgatttgatgcatttggggtgaggggggtttgggcatttggtggacaatggtcaatggcatgccacaattatttacaccacacaatgacacatgttgctagctttgctagtgtttcgaacagttcagaaattccaaactgatagcaagggtcactatattagactagttataccagtctaatatcggatgtagtggagaatgtttttgttctaatagatccagtggtttgtgggtacgctgtatccaactgaaaaagatatggtttgtcctatttcaattgtttgcgcagagttgaagtgatgttcattgacttaatttcaaaacaccaagatacatcttctagcgaattgcagcattatgttaggcatgctcatcgttagttagtgaaagaatttgttctcacttaatccagtttggagcttaactaacaattatggccaatgaaactatagtatttaataagctattgtgccacatgcggaatactatttctgattgacaagcacaaatctagaatgttccttgagtaaatgtttgttccctaaaactgtggcctatttctatttgttttcttttttactttcgcgtgtacatattttggttcactaatggtaaatgtctagtgttcatgaggtctttgccttaggtttgctagtatatgatatatatattacctaaagtgtataaaaatggatagcattagtgagtttgacagcaaaaccagctacatttcattgccctttgtgtcttatgcttttggttgtctttttttttcagcttgtatccatgtttgctaatcaaataatctcttttcagggtcagaaaagatctgcctttgccgttggtgccttatttcatgatcacttgttttcagtattatttatttttactggaatttttctggtgaatcatgttctaatgaactctgcagcagctgattccactaacacccttcttctcaccttccaagatgttgtagaactaatgaaccaggttagtactatagttcctactacttcaccctgtgatatgctaagctggtgctgaagaaatcttgtttcagtagcaatcctaaagtgatatacactacctaacatttatcattttgcagatatttgtaaaccctatggctccaactatatttctagtggttcttctcttctctagccacatcatctcgttgacatctgctattggtagccaagtgatttcgcagcatttgtttggcattaatcttcctctctctggacatcatctgatactgaaggcttttgccatagttcctgctctgtactgtgctaaggttgcaggtgctgaaggaatataccaattactgataatctgccagattatccaggccatgctccttccatcatcagtcgtgccactcttccgtgttgcctcatcaagattgataatgggtgcccacagagtgtctttgcatctggagatattaacatttcttgcatttctcctcatgctgttttcgaatatcatctttatggcagaaatgctgtttggtgacagtggttggctgaacactctgaaagggaatactggaagccctgtggtgtttccatctacggttctcatcacggtggcttgtgtctctgttgcattttcactctacatggctgttacaccactgaaatcaggaagccatgaagctgaattgcagcaggaatggtctgtgccttctcagaaagagctcttgaatactactcaagacagagaagagacttgtgcgggcaatgttacctatgaggaagatcagagatctgatgttgtcccttctcctaggattcagcctgtggattgtctgaaatcagctctggactacattgatagttcggacacagctatagaatctgatcatgattctcaacattccactgctcatacatctaccgctcctgaatcctgtcactctccatcattcattcctgaagagtcaaaatcagttgttgctgttgactggccagagcctctggagccaatttctaatgctattgtggctgaggaaagtacagtagagagtgtggactccaagagcacaggcgaaagggatattgaagtagaaccagctcttttgatggacaatgataaggaggctccaaatattctagagtctgacaacaagtcacttggaggcaataatccttcctgtgcatcggatgatggcccaccatctcttaccttcagcagggggaaaggctcagatgcaggcaatggcagcgggagtctctcgaggttatctggtttgggccgtgcagcaaggaggcaactagcagccatacttgatgagttctgggggcatctctttgattaccatgggaaactcactcaagaagctagctctaaaaggtttgacatcttgcttgggctagacgtaagaacacctagctcaactgtaagagcagacagtcaagctaatgaaatcccgaagagtcccatggtacgagacaatttacaagggtctgccttcttgggaagttcaagggatctgatgtctactaagaatgagatgtcgaatttggatctgacatatgggcttcagatgggcaataacattgggtcatcagcctggtctcagggcatgcagttaccaagtacccaactgcagagttcaagcaacagcttactcgatcaaggtgcaagattaaattcaaattttagcacgccatcatacgcagacaacaaccaattctaccaacctgcaacgattcatgggtatcagctcgcatcatacctaaaacagatgaatgctaatcgaaatccttactctagcatgccattggacccacagcgacttccaaaatcttctgcatcggctgtgccaacctatgtcgattctgtcatgcatgctcgtaaccagaacttgcttgcttcattgggagctactccttcacagatcgcagcaacatcccggataggtactatgatggcagaaagatcctattatgtcccttccactcttgacgggaatgaaaatgctggttcatcagcttactcaaagaagtaccacagctcaccagacatatctgcactgattgctgcaagcaggagtgctctgttgaatgaatcaaagttgggtggtggtaccattggatcccagtcgtaccttagcaggcttgcatcggaaagatctcagtatacaaactcggtggccaggcctgcagctcccttggcgtttgatgagctctctccacctaagctcccaggggatatcttctcaatgcaacaaagcccaaacccaagtgcaagatccctttgggctaagcaaccttttgagcagctgtttggtgtgtcgagtgcggagctcactaaaagcgagttcaaccctgcaggcagatcgggtggcatgaccaaggatgatttctcttacaaggagtctgaggcgaagcttcttcagtctcttagattctgcatctcgaagctcctgaagctagaaggatcagggtggctgttcaagcaaaatggtggcagcgacgaagatctgattgatcaagttgctgcggtagagaagctattgcaacaaggaaccagtgacaaccaactgctgcttggtgatactcagcaaccaccatgtgataaggcagacatccagtacatgcgcgtactgcctaactgcggagacgactgcatctggcgcgcctccctcgttgtcagcttcggtgtctggtgcatccgccgggtgctagacctgtctctggtggaaagcaggccagaactttggggcaagtatacctatgttctcaaccgtcttcaggtgagctatttcagtcctgaactagtctgaatttgagtgttgtttttcagtgcccaagacttgactgcaaacctgaaactgctcattttcaacgtacaagactaactctgtcaatcatttttttcgctcaaatgtaatgcagggcatcctggatcctgcattctccaagcctcggagtgctctcagcgcgtgtgcgtgccttcacagagatatccgggtgctcaacagcctgcgccacagtagcctggtagcaacaaactccattccaaggcaaatccgaggttccttcaccaccgcatctgtggtcctggagatgatcaaggatgtggagaccgcagtctcagggcgcaagggcaggagtggcaccgcagctggggatgtcgccttccccaaggggaaggagaacctggcctccgtgctgaagcgatacaagcggaggctctcgagcaagggacaacaataataaggcatctgggcagcgtgatcctgtcgcgttttagggggactttgaccattgttcttcaaggatggcagccagccatggtggcttgccctccctgagccctggattttttcgttgcacaacgtttgcagggacctgaggaattggccaacacttctggtcccttccatcatatttcgtttttttttgtttctttcttgtttttttttttttttttgcatgtgatgtgttgtataatggtaactgttcatgtgccagaagaacaaccaccaaaatgtacaacagatgtagtcagctgatgcaccattgtaaagtttagtctctgcattttaaccttttttttgggggtcattgacaaactgaatgaatgccctgtgtaatctctcttcagagaggatgccaagactgagaaaaagcttttgccagatttccagattccttgtgttcatctaatatctgtcatgtctctcacattttctccagcttatgatctttttgtctcgttggcatttgatagcgtgtgctggagatgtctaccgtatatgtggattactgtattaagcttctgggaccggtgtatatatataatttgtatggatagagataaagaaatactaactcgatatggattagttatatcctaatgtttctctaaacaccaggcgtagtggcactgtactgcaacctcacccaagaacatgtttttggggttcagacttgagagtatccattgctgaatttgcctcaccgcaagtttagtcttgcatttcacaaaattgcaaggatagctaacaattttatcacaaaaccataaactttgtggccgtgcaattggatatgctctctttgctcagaagcttttgaggatactgatcacctgttcagaaactgtgcctttggacttgatttgtaccgggaaacttgacaacccggccgacacagtattctcgattagatgttgggaaaacaagatagccaaaacaaatacggcacaaaaggcaaaggagacctctgggaatactaatcaggagagagaaacttaggtggtgtttgaatcttcctttaagatgaagattaagtgtttcacgtaaaacgaggtgataatattatgtgattaattaagttctaatcattacaaacttgaaaaatatattaatttgatattttagaacaacttttatatagaaagtgttcacatgaaactaccgtttagcagtttagaaaagcgtgccacgagtatccaaaagcttatcaattttgttggagaaaagaatagggttagtcttccaaggttcttttattcggcagagctcccgctgtcggttctttaaagaaaaactcgtagattaggccacccatcaaatataaatgtaatactccattacacaaatttaattttacataagggttcaaaattacattatagtttatttacactacgaattacatctgggtaaatttttagaaatttggaagcaaaaccgtgaacacgtcatcaaaaactggatgtgggctccacgagttcagaggatgttccgaacccgttttgatcgcccacggcccgccgccccgccgtggagccgatccccgccaccgccggcgagcagctgttccggacggcgtcctgctgctccctgcgccgcccccatcccctcggcctccgccgagctcgttcctgcgcggtgagcatccttgccgacgcaccagaaccctcttttttttctctctctctctcgttgtacccacacacctctactcgaatttgctctatcttctcttgtagatctgaaagctaggttttcttttttacttgtcttaacctttagttacataacaggttttttcccacatcaggtccacatcgatctataatagccaagagcccaagacctgcagggcttcccgggggtggtgcatcttctcaggcggaggggcctccttggattccttgaagtttatggcgccggcgaccaaactcatcaccgtgtgtgcaccggcaaatatgacgaacaggtccccctgtacatgtgcgcggtcaccttgagttggtcacccctgtcaaaacatagtaactttgtcaaaacctaacctaaacaaacatgtttttttcacaaaattcttcattcttacctcatgtctgattttaacaaatctagcctgtggtttgccttcagatgagcaatacgccatccatgcatacttcctgccgccctctcctgtttcctaatgcgctgctcaaggcgcctcatcataaccttttgcaccagaaaagcatcaaaatgttgcttgtcagcacaaaacaataaatccttctcaagtctcaacgagggggtaaaacttccagcatcacaggtagcttctccaggtcactcctctctcatccagttaggaatcgtggatgcaaatgcagaatcgatttcatccgtccccgaaaagaaatacaagggattttggcaatgcgaatgcagagccaaactccctcatatttggatttggggacagaggtagcagataggcaaggcaattagagcagtaattttaccctggtagctcttgtggagaaatagcggggctgggcgagtgcggaggaagcccatggtggggtggaggtggcggcggactgaacaagaaacaacaagttaggcgcatttaacggaggaatagtgcagtagcaataactaggaagcttgtgcaacaaaataagcaagcacacgcgacaacaaaatgatccaatccaattacttagaatcaactcaactcaatagtgcagtagtagcaaatcagaaaacaacttcaactcggactggcagctgctgacgcaggacgaggcgcgcggccacgtccgcgagtacgccgacaacgccgccctctgggaccacgacttcgccgcctcgctgctcaagctcagcaagctgcccatgccggtggggagcaagggggagatcaggaacaagtgcggcgccatcaaccacagcaagagctaattcggccacttatgcagggggttacgtacatgcatgcagacgatgtggtcgtagccatatgttttcttgttatatctcatcgttctaaaatacagaaaaccttgtactcgaaaaaaacatcatatagtactatcaaatcagtctagatttatactactagatagctagtgtctaatcgagtactaggagtatattttaaaacaagagtagtttgttattacttggtactagcacgtcagtgaatgtacgtgcacaagaaatcctcgtcgataatgaaaactagcatggtattggagaatccatctcttaaacccatcaagtcgaaatcctgaagcaccaaaatccccctacttgatacgcaactatcgacgtttgatgtcgcaattctggtatttgcatagtatggggatcgtcggtgctaggatatacgcgagactgaggtgaaagagacggagacaaggatttttatacaggttcgggcccctgagttgtcaggtaataaccctacatcctgttggccggagccggtattgcttttattcaccataatcacaccagtacaatatgtggggtagcctatttaactgttgtcgacatgtcggtctgaaggtctgactcgtagtcgacaacagggtagccttcctcctcgaatccgtgtccggcgagatcagagatagcgctttcgtctctcctgacggtatccggagacaccgtaggggaatagccatgcctatccctgaagtcgatatccggcggcttgtcttggcatatgttggcttgtatgttgtggcttctgttgttccgtatattgtggtggttgttgattgaggtggtcgtctgtgtcgatcgtggtgactgtgttgatcctgtcatggtgggtgtcccactgtcctcctaggggggcttgtatttatacctataggtgtcccattgtccaagtagaactagggaaaccaatatggatacaatccgagtagtccttgtcgtttccatgtaaaactctggttgtctttccttatccggaactccctccataactgaagttagtttctgtataagacatggtatgtggtgggtcctgccgagatttagtcaactactattaggtatgtggtatccataaccctgacagtagcccccgacttcaatgcaaatgaacgaattcatattctcaaccgcagaccctggagtaactgttgtcgtgctcacgttaccgttctcggtgagtttagagataacgttagactttctttatcagcctcgtgcgggcaccaaaagggtttgtctaagtcaatctctgatgtcaaccaaggaagtacagagcgtacgactaagtctcccgtcttgctgtaatcgagaatttggattgaagtcaagaaattctatctcggctggtacaccatctcttcattccgtattccttgtcgagatccagcaaccgttctcgagcgatcgagaaggcgtagagtctgcgacggagccttgtcaacatttgtcgtactcgccatagtcgatcttggtgtagaaccatagagacatagagtcttcgtcaatgtcgaatagaattttcctgaaatcaatactcagaaaagaatattagatagaaatagcccccgagcgaatgcccaaagggtgataatgttataatatgtatggtaaattgaaaatgaattaaatttaccgaccaatgttttgtgtatgagcgtcttctctcttaccgacttcgatcagtcagtttgtagagtcatacactctccctagcccccagccttgtcatcggagaatcgttctcggaggataaggctcttggacccttgacctgccttggttgaacaaacactgatcctagcccccagccgtgaagttggaaagctcagtttccgattacacggcttggttaatacgcacggcgagaactcttacacgaccagatcttacatggtcttttgtctctacaggatccgacaaggccttatcggctctgggcgtccccagccgaagttcccttaggttcctcggaggccttgtcaagacggcgtaatgggacagtaggataggtttcaacgctaggtgtcgtcgtggtaagggatctctgggtaaaacacttggcgatattgtataccagctatcaactttgttgaaatagaggtagtaggagagtcgttacaccgctggtcgagaaccaggcagtagtcataactcgaccacttaaagtggaaatagtgggagaaacgctacatcgctggtcgagaaccaggcagtagtcgtatctcgaccacttaaagtggaaatagtgggagaaacgctacatcgctggtcgaggaccaggcagtagttgtaactcgaccaattaaagtggaagtagtgggagagacgctacagcgctggtcgaggaccaggcagtagtcgtaactcgaccacttaaagtggaaatagtgggagaaacgctacatcgctggtcgaggaccaggcagtagtcgtaactcgaccacttaaagtggaagtagtgggagaaacgctacatcgctggtcgaggaccaggcagtagtcgtcactcaaccacttaaagtggaagtggtgggagaaacgctacatcgctggtcgaggaccaggcagtagtcgtcactcgaccacttaaagtggaagtggtgggagaaacgctacatcgctggtcgaggaccaggcagtagtcgtaactcgaccactagaagcaaatgtacgagagattactacgatcaactggttgagaaccggtgagtaggtgtccctcgatcatttggagtcgtggtacgaggaccactacgctgccggtcgaagaccagtcgtagctgttcctcaaccatctgaagtcatggtgcgaggaccgctacgatgccgtagtcatacctcgaccatctgaagttaaggtgcgaaagattgctacgtactggtgcgagaaccagcgtgcgagcagaattatctctcgaacaccaatggaagttgcggtgtgagagattgctacgtattggtgcgagaaccagtgagcgagcagaattacctctcgaacaccaatggaagttgcggtgtgagagattgctacgtactggtgcgataaccagtgagcgagcaaaattatctctcgaacaccaatggaagctgcggtgtgagagattgctacgtactggtgcgagaaccagtgagcgagcagaattatctctcgaacaccagtggaagtgctagagttggtttattgcaagtgtatctcatgtggccagcatgactcacgtacccaacttatagcatatccggatgtccgttcgcaatcatgtcgggtgatcaagccgacgacgttcgcaaggaattatccgttaacaaccttttctcaagtagtccagccatggccggtgctatgagataggtcgtcggtctttgttggtaggttgggtgcgataactccgcatttgtcgagaatgttctcgataatggagtatattcgaccataacctactcgagtgctcaattgttcctgaaaaatattttctagaaggcaagatatatagcagataatatcgagtatgtactcaaagaactgcatggatcttctagtattatcaggatacaataagcagatgtaaatatcagggcattatgtaaaccgtaaacaagcatgatttatacataagagaacggagtgagcccccagcgttagaccgtagttggtctatcgtcggaagtactcgcacaacggatgttgtataagaaacatgctctaggtaaacataataaattgctgatatgataatgttgtatcatctgaataggtacgataaattgcatataaaatattacgtacctttgtagatacatgccggatgtatctacgaaattagtagatcaatttgaaaaaccaatctaccaattaccttattgcgtactcgttcgacatcatatgatctgacatcttttggtacggcgcggagcttgaggcttgggtgatctcgatagaccaagttgtcgatgacgatgatggttctgatcttgtcggaagacatgttccggtcgggttagatctccacagccgaagtcgtcgagtagtttgctattggagaatccatctcttaaacccatctcgtcgaaatcctgaagcaccaaaatccctctacctggcgcgccactgtcgacgtttgatgtcgcaattctggtatttgcatagtatggggatcatcggtgctagaatatacgcgagactgaggtgaaagagacggagacaaggatttttatacaggttcgggcccctgagttgtcaggtaataaccctacatcctgttggccggagccggtattgcttttattcaccataatcacaccagtacaatatgtggggtagcctatctaactgttgtcgacatgtcggtctgaaggtctgactcgtagtcgacaacagggtagccttcctcctcgaatctgtgtccggcgagatcagagatagcgctttcgtctctcctgacggtatccggagacaccgtaggggaatagccatgctatccctgaagtcgatatccggcggcttgtcttagcatgtgttggcttgtatgttgtggcttctgttgttccgtatattgtggtggttgttgattgaggtggtcgtctgtgtcgatcgtggtgactgtgttgatcctgtcatggtgggtgtccccgtgtcctcctaggggggcttgtatttatacccataggtgtcccattgtccaagtagaagtagggaaaccaatatggatacaatccgagtagtccttgtcgtttccatgtaaaacttttgttgtctttccttatccggaactctctccataactgaagtcagttttcgtataagacatggtatgtggtgggtcctgccgagatttagtcaactactattaggtatgtggtatccataaccctgacaatagtatgttttctcattatattattcaaatatattaaaatgacaacataattttaaattttgcaataactttacaaaactactaatatgtaatattcatattgtattttatatacgtgttagttattaattatttttaatatcaaattttagttatttgtaaattatatatattgactcattttttaatattttttttaatattgactctatgctcttcttccaatattatttatttttatttcagaatttttattatttctaattgtatttctatgtggactctaaactaatttttaattttgaatttcagttacttctaaattgtattcctatattgactttaaactcttcttcaaatgtttttcttaattttgaattttagttatttgtaaaatgtatttttatacggactctaaactctacttttaattttattatgtttattccaaattttagttagttttaaattcctatatggactctatactctacttctaatattccttattttttaattccaaatttctatttttttcttaattgtatttatatatagactctatactctacttctaatattccttatttttaattccaaatttctattatttactaattgtatttctatatagactatactctacttctaatatttcttatttttaattctgaatttcagttatttcctaattgtatttctatatggactctatactctacttctaatattccttatttttaattctgaattgctgctattccctaattgtatttctatatgtactctatactctagttctaatattcttatttttaattccgaatttcagttattttctaattgtatttctatatggactctagtctcctcttctaatattccttattttttaattccgaatttcaactatttttaaattgtatttctatatggactctgccttttctttttctccgattaatgtgagaatttctaggccatgaaagcgaacgtggagacttccttttctattcctttaataatataatagaagatataagtaacaaaaaaaatacaatttgacatgaattatatcaaaacaattagtatttgtgatcaaacgggcatgcatgtggggtcagcccaccctagcccatggcttgatgggtacatcctgattattatgcactgctcgacaaggatatgccgtggcggctcacgtggtaaggccagaaccaagatatggccgaagaggagccaggacgtgcacgtgtgacccatgaaatatttttttcatgaaattgcacgttagtatattagaaaaaaaatagagttttagttatacagcgtaatcgaccaaactggtcgctgtcggttacaaggaaaaagattgcggaagggaaaagagtcaaaactagaagttgttgctcgtatctagcggcactactacgaaaaccatctttcgttgcggccattttgggttttcgctggtggtttttggtaccgtcacaaagcaaaggccagtgaagatcaagatcttcgctagcggttatcggccgccagtgataattgatttttgctggcggttgtgttatactggccgccagcgataaacgattttcgctggcggttgagttataccaaccgcctgtgaaaatagtggcccaggttaaaaaaaaatgacaaagcaacactgctccgttcgcctccgtcaacaccggttcaaattattcccaaatccactcctcgattcacaaattcacataaatttacacgaacaatttataataaaaaatttccattcacagtcaaaattttccattcacaatccacagaaatccacaaaaatgcacacaaatccacacaaatctacagaaatctgagcaccaccgcccgtgacctggcggcgtcggcttcacgctccccacggcgcagcgtcgatcgtgacgaggtcaaggccgacggtcgtgctccaccgcccgaggccccgcggccgtgcgccccgcgccgccgccggggcggatctgtccttcccggcggcagcctcctcccctcggacagatctaggagagggtagaggaggggatgggagggcccggcaccaccgcgtcataggtggtcatcatcgtcacagcttccgtcgtagtcgctgttgtccccgtgcacatccgcaccgcgcccctcccgcccgtcgtcggcgccgcgcccctcccagatctcggtcgtcgacaagaggtggaagctggaggagcagggaaggaggaggggagagaggtgggggaggaggaggagagggaggtggatgggtgggtggagaggaggagatagaggagagagaggcagtgggtgggtgaaaggaaaatatctcagcacgcgcgtgattttaaatgatgccaaatttttttagcgggctctgttttttcgctagcggaagtgtttagtaaccactagcgaaaaccgacgcgaaaacgtcggttttcgctggcggacatttaagagatccaccacgaaaaatagagtatgttttatggcggacgtcttaacgtggccaccagagaaaatcggttttcgctggcagtcctataccccccacccctcatgtttttgctggcgattttagcatataaccgccagtgaaaattatagtgtgacgccatgaaaaattgtttttctagtagtgcgggagggggtggcggaggagcctcctaatctcccaaaaggctcccaaacgagacaggaccagcgagagaccagagacgaacctcctagtgaatgtattggaaaaccatcgagaccggcgaaagagaaagaatcgaaaaccctagcgttccgctctttccaaagctgtaggaaaccaagaggaccagagagtcgaaggccttacgaagatgctaaggcaggcaagccctatctaccggccaccagacctgaagagaatcgctacggaggggccgagcaagcctaggcaagccaaagggagaccggatgtagtgccaaacttaacgagcgaacacacagtcgagcatgatgtggctcgctatttcatgcttctgagcgcaaaatgggcaggtcgagcgtctgtcaatgccgtgcttatgcagatgatctgccgcctagcaacgctgttggaacacgtgacccatgacatttgaaatcgaagttgggaaaaccaaaaataggaagaataagaagaataggaacaggaaaaaaaagaaagaaaataaaagatggcaaggaaaaataaggaagaaataggaagaacatgagaaaaattaggataatcattgtgaaaaaaatagatggccaacggattaggatccgctgacatgaagtcagagggacgtggtgactgatatgtgggcccaaccgctcgcgagcccacctgtcagtgaccacgtcaagggagatttcacgtcagaggatcttcttctgtggccgaccgggcggagcttgttcttggtccttgctgtgccaggtctggccatgcacgacatggccaaatgggacgtgtggaagaaatatgtgcatgcacatgatgaaacatgaatgtgtggaataaatactatgtcgttttgactgtttgttgacttttggacgagcttttcggcacctatatgaagttatgaacaatgaaacatgcagatctatagagatactagtgcatagcgtttattggatggtaattcgttgtcctaaaaataaaatggaactataccagtccaggcgaccaaacaacagtttttttacaagtgtttctgggcagtcgttcggcagtgtgacaacaatgacgaagagttgacagtcggcaatgtggcaattaacgagcaacaatctgaggcactccctccatcctaaagaaaatcaaatcatactaaaggggccgaatggcctgggccgcctatttgccaatcaaagtacacccaaggtccctcaacttgtcatcgagttacaaaatcatcccccaatcgcaaaaccaaatatatgacatccctcaacttataaaaaccattcactttaggtcattcggtggttttgaccctggttttatcctacatgagcagagtcagtgtgggacccacatgagcccacatgtcaggatgccacgtccgcaccctctctcttccccctcctctcccttcctcctctctctctctctcttactcttctcttctcttctctgggcaaaccggccagtggctgaggaggaggccgccagggcgaggcgcaagaggaggaggcgacggcggctgcgacgcgggagaaggtgagggtggcggacggtcgcgaatggcattgacggcgctgcgtcgcctccgccccgtgcgggcaggcgccgcggcattgggcacagaggcggagacagggccgggtgccgtggaggtggactcggcggacttggagccccggcctgctcttgcgccgcatcctccctctctccgtgtgctggttgtccctccctacctcctccctattcgcgtgcgctcgccgccggccggcgggcatgggagcaagcgagccgtccgtggcgtcggcagcaatggtggtgcgatgcatgaggatggggaggaccagcgtcatcgtcacgtcacgtcctcgtcggcgcgaagatgaaggagacggggaagaggaagaggtggtgcgcgtcctcctccttctcgtcgaactcgtcgcaatcgtcgttgtcattcgccgataccccgctccgcgctggcggcttcgcacgttgccactctgcccaccgtcgccccacttcgcctgcttgctctacccgccggcttcatgcggcgccgctccgcctattctgctcccctctggtcggctgctcccatgggagagagcggacagatacagagaagagaggggatgagagaggagaggatagaggaagagaggttgaaaggggaggggaagaagaggctgacgtgtggcggtgtgggacccacgtgggtagaagaaaatcgattgggattgagacagagagggggggggacctggagagacgcgcgtggtaaaggaataggttggttgtatgtacagaaagtggttggcatgctagctgtacggtggaagcaaaccattatggcttgccattgacttctttttaatttccttgagaaatagacaaaaatttaaccagatcctcctcagcaccgtagagggaaggtctcctcgccaccttgctaatgggctcgtggatctgggccgacgatggccggatccgtcatcctgcctcgtcacatggtgtcatcagggatgatggagacggcggcggtggagcgaagcagtcgtcaatgctagctacgaagaggtccatcatagataccggctacgaggtggagataaaatcagaaaaaaaaaagatgaacggattgtggatagcgcattacctggtcgtcgtagggagagaaccaccggtagcaactgcggcggtgctggcgatcaccgattagccagtcgcgacacaaggaagaggggcttgctgtggcaagagaaaagccgatccagatatttaggagaagacgataactatgcgtgatcactgttatgtggcggttttgcaatgactacttcctgaagattcgcttctctacgttctgtaacaatttaatgcgcatagagtaaaaaaataactcaagatgctgacatcgttagagtacaacaagaaactatctcactgttagtaaaaaaaattatttggactataggagtgggggcagggggcgcaggggtgggatcgagattggtcgttagtgagtaaaattttaactgcatgctataaacttggtgggggacagggttgggagcggcagtggtggggggttgagcagtgggtggggctgggggctgtatcacgtgccatttaatacgtagcaccttaaggtgccacatagtagttctatacacacacgcacacatacacacaaatttttacgtggaaaatccttacgggaaaaaaccacggacaccgactagcaatgatcgatatagagaagttgaatacaaacgcacgacacactgggttgtcgcacccttctcgtgtagcttacaagagacatgtaaaagagaaatctataagtcctagtaggaaaagacttacaatcataataagaaactaatcaagtgttttattataaaactaatccgaacatattgcatgctatttttttttttgaaaggaaagcggcaagagtattgccgaatatattagaaggagagaaaagtatggtttacacgattaatgcggaaaaacaacttagaatcatctcagaaccatagatcctggtttgagaagggaagagatacactcatgacggttggaattcaaaactgctttcttgaatatcttggatgatctggtgtgaagtcctttgcatgtccggttcttctcctctgaagatctttgcgttcctttgtagccaaatgtaccaccaagttttgacaatctgaacatattgcatgctgaaatttggatcacatatttaacaatctccatcttaagacgaattttccttgtagcataaaaatccgaaacgctcctgtccagacgcctgattgtagggaaaacaatcggattctcatgcgtctctcctcaaaccgtgtgatgttataatggatttttttactgttccaatgggtatttaatgatgtttcactaggtcattttgaaatgttacacgggatgtttttttgatgtttaaggaggtattttgtgatgtcctcggctgatgtttcactgtatcattttttaatgttgcacgtggtgttctttgaatgtttcaggaggtattttgtgatgtttcagctaatgtttcactaggtcattttgaagtgttgcacacatggtattattttgatgtttttctaggtattttgtgatgtttcactatgtcatttggaatgttgcatgtcgtgttctttggatgtttcagaaggcattttgtgatgttttagaacgtatttcactagctcattcggaatgttgcacgtgatgttatttgaatgtgttagaaggttttttgtgatgtttcacaagatacttcactagcttattcggaatgttgtacatggtgttctttggatgtttcagcatgtattttgtgatgtttcactgggtattttactagctcatttgaaattttacacgtggtattttttggacatttcagcagatgtttcactagatcatttaggatcttgcacgtattgttctttcaatatttcaatgtatattttgtattgttttagaggtcacaaatcaatgtcccacttataataaaaatgtttcaattagtaatataattacatatgttttatttctccaaaatataatcatgtgagatctctttgtaaagatttaattgcaacaaattcaatggtgcaattgaatcacaaattggataagtatttcataagaaaaaatggtttataatttgctaattaagagtatgggagaagagacaaggggatgggagaagtttgcatgtacctcacatgtggaagagaagaaatgactgcgtgcatgcatgtggaggtttcccagaagaaaagattgcatgcatgcttagggggcccaatttttttctccaaaaatcgggcacccgttccgtagtgtcctccataaaaatcttcaatctccaaacaacatcatgtagtaccctcgatagaaaagagatgaaccatacttcaaacttaccattggtgtgaacttagcatagacacgaaacatgatgcacaaacttcaaactcgctattggaataaaatcctgaatatgctgccataaatttatgtaaccctagtagaaatgcaaaactctagtgcacaagacaaagtacttggatctcccaataacctactggtatgttgggtatgatggtagcaaaatttgtcagaaaattggatcaccttgtgatctagacaggagtgaggctccctctcgtcgactcaaatattcttcttcttttttctgtgcttttcctcttaggtaaataccccacttcaaatatttacttatcataatgagaatatgtactcaatctagacgtggtagattatcttcaaactcgtcataagaattaatcctaaatctgctcgcagtactacatgaatgctcattggtgccggttcttgaaccaacacaccttcgttttttatttttcaggtgctaaaaagtcaaaaaaaatatttggtatttttattaggcacctatacaatcacactctcgttcccaaaagtcacataatttttgaatccatattcatacaaatgtgtcaagaaaaattcaaattcaagacatctcacttcacacaaagtcaccttgccatatcacctacaaacacttcttgtcttggaaacaaatgctattgttttgagaccactatcatttgaacttataatccatatttaacaccatagataagataaaatgaaaagtg

SEQ ID NO: 7653 - DNA, 4525 bp, Oryza sativa
tttactgcaaccctaaccctttatattataactcccttgtactcccttgcatttattatgcacttgtgggtgtgtcttgttgagtacggtggttgtactcagtcttgctcaatttttcccaacctagaagaggagcccctggatgatgaaggctttggtgtctagctcgtgcctgccgtcaagtgcctgtggtcgtcgccctagtcttccgctgtttctcgtttgtctttgtgtgtgctgggccttcgtcgcccatgtaataaattatctatttacgcttccgcttgttaaactctgaattgtatcaactcttggtgtaccttgcctcctgggacaaggaataatacacgcacgaaaggaacgcccgttgggttaattccggtcatgacaggaactctcctagatggttatagatgtcgcaacgaatgaaccggcacaagtccgcgcacaagttgataagcgttttctgatcgaatcggcttgcattataatggatgctcgggagctatggaaagtaaaagacaaatgatttgtgttacaatcgacttaaatgaaatatttgcaacatctaaggagcaagatgacttacatttgtaaactcagttctgtatctcccgcagaccattatttgcaatatcgaagggtcattcacatagaaaacctgagcaacacactcaacaagaaaccacggatcatccttgtgtcctagcttgctacgatccacaatcatcaggccgtagttatcgatggatacgcctgttgtgtctctgacccattagcatcgtagcactgggatcggtatgtttaggccatagtcaagctcccaaatgtcttgtatgatcacatagcaagacttcttcttacctgatgcgtcaaacgcctccacccgaactccgctattctaagctgtgcttttcttgtccttgaacatcgtgtaaaacctatatccgccgatgtcgtatccttgccatgaggtcacaaggctagttgggccatttgctagcctgcgcaaagtttttcctccagcgattcacccaacggcagatctttctccttcaaccattcaggaaatttccgtttctattcttaacatatccaaatggccattcttctagggttgcaggctcttatcttgttcatgtgttcctgaatgtacggctcgacgatggcgaactattgcaaaacgctgctatgtgcttccgctacatctttgaagtcctcatcataaaaccttttctttcctatgatccccgtcccgactaaccggcccttgtgtaaaggggggttacaccgatcgattcggcgtccttcatgtaatcaatgcagcattctaccacctcctcagttgtgtacccctctatcattgatacctccggatgagctcggttacggacataccctttcaggacggacatgtacctctcgtacgctcacatctggtgtaggtacaggggaccaatctcgaaaatttgaggtacgatgtggataatcagatgctccatcatgttaaagtaagctggagggaaaaacatctcaagctggcacgctgtctcgattgcaaatttttggaggggtcctaactcttcaggatcaaaaaccttctgtgatactcgattgaaaaagtagcacaacttggttatcactaaccgagtgtgaactggcttgaccgctcttatagcaatcggcaggaagactgttaacatcttgtgacaatcatgagcattatacccagagatggtcaaatctttcaaagatacaagttttctgacgttcgctgagaaaccagtcgggactttcacactatgcaagcatctacataatttttttttctcttctggtgttagtgagtagcaagccggaggaatatcgatcttcccatttggcagctcttttgggtgaagctcatgccttatgtccaaattgacgaggtcggtccaggacatcaacccatctttcgtcttactcaggatgtccagtaaagtgccaatggtgctatcaaacacattcttctcaaggtgcattacgtcgatggcatgacgaacctccaggtctttccagtaattcagatacctgaaaaatattgagtgcttcttaaaaggtaagttactttcctctacaggtgcatcagtattttcctgatccgtccgtttcttcctcttgatgggcttcttctttggcttgccgaacacaaccttaatatcttttgtcagctcgaagacagagccaccagttcgtgtgtccggagctagatcgttctctactgtattgtcgaataatctggccttcacatggcacctatgcctctgaggtaagaaccgacgatgacgcatgtacacacccttggttgacgaggtgaggtacttgtacgacatcttgtcgatacatatgagacatctgaacttttccttaaactggcccgagagcgaaaagtttgccggtaagtcgttgatcgtaacgaatatgatggcatgcagagtaaaatgttccctacggtacttgtcccacattcataacccttcctcccacagttcttgcatgtcctccatcaatggttccagaaacacatctatgttaatcccaggctgtcttggaccttgtataaggatagacaaaagaatatactttcgcttctggcaaatccatgtaggcaagttgtacacggttagcagcactggccaggtgctgtgtgtgctgcttaagtcaccgaacgggttcattccgtccgtgctcaatgcaaaccttacatttctcgggtcctttgcaaattccaggtgtagtgcttcaaagtttttccacagtcgagcatcggcagggtgtcgaatcttaccgtcatttttcttaccctcctagtgccatcccatcaacttggcatcatcacggttggaatatagccgctttaggcgatctttcactggtaggtaccacaccaccatcctaggaatcttttttttctcatccaccggtgcatcatctttgtcgaccacctctccatcggaggctccgttacccgtcttgtaccgactcgtcccacatgttgggcaagagtctaaatccgcgaatttcttgctgtacagtatgcaataattttcacatgaatggatcttctgaacacctaaagaaaatggacatatcaatttctacacttgatatgtgttcgttggtagcaggttcggcttaagaagcataactctcaaaagatccatcaaatcattgaagctagtgtccgacaattcatttctggccttcaatctgagaagttcaagcaccgagcgcagcatcgaatagtccttgtcgcatcctttcgcttcgtcatacagaaggtccttcgctgctttctccaacgcttcccaattgtccaaccctcatcttctaccagttaggacctctggttcaacgtgccacaacatatcttccagatcaaattcaatgccttcattctctatatgtcacgaccggaaataacccaacgggcgttccttatgtgcatgtattattccttgtcccaggaggcaaggaacaccaaaagttgatacatttcagagtttatcaagcggaagcgtaaatagttactttattacatgggcggcgaaggcccagcacacacaaagacaaacgggaaacagcggaagactagggcgacgaccacaggcgcttgacggcaggcacgagctagacgccaaagcctacatcttccaggaactcctcttctgggtttgggaaaaattgagcaagactgaatacaaccaccgtagtcaacaagacacacgcataagtgcagaataaatgcaagggagtacaagggggtcataatataaagggttagggtttgcagtaaacagcattaaaagtcacttagttgctcaaagctactttgtaaacacggtcctagagctatacaagattattaatcaaggccgtgaacccacatgaacctgccttaacccaaggcctacgatgattcagaccgaactggcaacccgaccctgggtcccagctcgtcccaagccaacccaggccaaccattccacattttagttgttaagcaggttttaagaattaaaaacactaacttgggtacattgctcggcttgcccataaccgagggcgcagctattcgaatagattataccctgatcagaggtgtacatctttacccacaagacacatcttcctcacgtgtaaccacgtgccacataccaccacggtatacggacggaagacatgacatagtttccaacccatcctagccataaacaagagtaccgacccaaccccacctacggccggaacccccgggacaggtaggcaggactgagcccctagcagcagacaccggccctgtgccatgacatctcgactaccgggccgcagctcgtgtagcccttatttgccctagagatgttcatcgacccccgacttcgtacatctccataccggtacttttggttataaccaaactgagccacaaactaagccttacccactaaacatgtcgaagtacggtagtgctttgcaacataagccc

SEQ ID NO: 7654 - DNA, 14470 bp, Oryza sativa
ggagtctgatatggaacttgttataaaagttagccgatatagcggaacgacgactaaccttcctgatcgcttcaatcattgatcacccaagacacgccagatgacgacacaggaacacacgatatttgttaatgaggttcagctgaagcctacatccccggggctctgattatgggcgctcctccccaaccaatatagctcctagccgctacgagtccatggccacactgccatcatatccctgcatgtctacactacattgtagtcgccatggttacattgtggtgcccccctctctatttaagagagttgccgggttacagagtccgactctaactccaccccctaacacctattacaactccaagcccaactgtaaccaaataggactagtatattcgacacctattctaacaaactccaccttggcgaatatacgccacctagaaatagtagaatcaccatgccgatccacctgtcctccagacttgggttgtcttcttttgcagcttcaccgcaagccgcaagacgagtctgcgccagacccgccgccaccaaaaacaattgctatcccagcaaccgcttcctcctggactccacctacaacagtgcaccctcgcagcttgtaaagatgcgactccaccttctctccagtcatcacagtcatcttgcccttcatgatctccatggtcttcctattccgattaccgcggaatattaacccttcttcatgcaaggtttcaagcgaaatcagattcctcttttgccctggtacatgcctgactccctgaagaacatgttcacctccatcttctagcttgattttgacttcacctactcccacggccggataacttgtgtcatcgcctaagtagacaaaaccaaactcaccagacttgtatgaagagaaccactccttccttggcgtcacatgaaacgagctagctgaatctaatatccacgcttctgcatccttagactgtgcacttgacatcgtgagaagatcacaaccatcgctatctgagtcatttgaagaagtcactgtattagcctttgcttttcccttcagtgttggacactccctgcttatatgcccccactcatcacatctgaagcactgcaccatcttcttctttttgttcttctttaccttatgcccagcatgatcttctttgactagcaaaccctccgcttgagatgtttcaccctctttgttctttctcatctgatcacgagccagcaacgcagaagtgatatctttagttttgatggtctccttgccgtacgtcaaagtagtcaccacatgctcatacgattcaggtaaagaacacaaaaaaactatggccttgtcttcatcgtcaacttccacatccatcttcacaagatctgtgactagttgattgaaaacgttcacatgtactgtcagatccgccccttcctgcatctttagcccatacaacttctacttcagatacagtttattggttagaatcttggacataaactgagcttccaacttttcccaaattatctttggtgaggtctccaccatcacatggtacatgacctgatctgagagacatagccttattgtcgcagccgcctgcaactgcatctcctcccaatcgtcatcctccatcttggccggtttgacacccttcaaagcctttgaacctccttgttgagctaacaaatctttgaccctagtctaccacaagccaaaatttccggagccgtcaaacttcaccaaatcaaatttcatacctgtcggcgccatcttgccaacccacgacctgactggtctgtcgccaccagaatactcgccctgctcagaaccgtctgtattcgtcttcacaatcccgtcttgtgatccgatctcagacattcaatagcaaaccgtgttcgctataatccgatgtgaccaatcttccaccctcgatgtgcctctactccgcatgatctcgtcggcctggcttggtcgacccatacgcgcgcactttgtcacgagcctctgcacagcaagcctattgagccccttgtaccatgtttgaccaatgtcctgccgagccgcccaaaaatcgctgccgctttgttgctttggttcggctctctcttcggctgcctatttaaagggcaagcaatacgagtctgatgcgatcacgagtccatatccatacataactctgaatccgactccatagcaactgcggtcgagtcggccttgtccgactccgacaagtcattttatcatccaactcctctactcgatttcttttttggctcatcaatctgtcagactcccacggtacaaaagtttccatatgtatgaagcattagtactcaagggcgtgcctacgttatactacccggtgtcataggacaccgggtagattattcaaatcctatataaattacactatattaattaatatattagtcaataattagataattagtatgtattggacccccggtaatttttgttctgggttcgccactgttggtactgctgccccttgatcccttgtgcacgcacgatatgcatgccctgcatgctcatgttcacgtgaatatgctcaagccatgcacgagttccaaagctgcagcttccctgcccttgtttgcatgcaattgctcgatttggttttgcttcttgcctttgctcgttagtctttgcacgccatacgtataagacagcacctgtgctatctgtccgtgcctatgcacgcaccgcagtcgcagccctcgtgttcaccgtccatgaccccgtcgtcccggccctccacgtccgccgcgccgcgccacgctcgccggtttcgccctttcatcactggcctcctgccgccgcggatccgcgatcaccacgtgcgtcgggcgcgccgtccatggcgctacccctcagatctctccagtcgccttcggccacgcccggccccgtcttccggtcattttccgccatcgccggtctgatcgcgagcgaggtcaccgcctccgcaacatcctcgttgtcgccatcgatctcatcgccacggctgacgatctcatgtcgatgcgtgatccccacctcgtgtttcctcctccacatgtcttcttgatctaatgctgaaaccttctgctctgataccacttgttataaaagttagccgatatagcggaacgacgactaaccttcccgatcgcttcaatcattgatcacccaagacacgccagatgacgacacaggaacacacgatatttgttaacaaggttcagctgaagcctacatccccggggctctgattatgggtgctcctcctcaaccaatatagctcctagccactacgagtccatggccacgctgtcatcatctccctgcgtgtctacgctacattgtagtcgccatggttatattgtggtgcccccctctctatttaagagagttgccgggttacagagtccgactctaactccaccccctaacaccttgtcggtgacatggggccgagggtatcgtgactagaggcttgggtagccgcggtcacccacgtgccctgacccccacgggggggggtcgggcccgagggtgacgtggccacccctccctctgtctccccgaggggtcgggccgctcccgcttcggccccgagggctggggcgccccgaccccctgtggttttggcaccacgtgtgtgggttaggtgagcacagcggcgctcacctaaccgcacttatagcggattgacgagcgcgtcacgccgcatttaatgcggcgcagtgcgcgcttatccggtccgtgaccagtcgcagtgtgtgaccggtcacagaccggtcagatcgcgggttaggtggcaacaggcggcctgtcacacgcctcgccccgtcacgtcgaaatgatgatagcctctaggcactcgtccctagccggagccggcgtgctagctcctggagtgggtatgtcagtcccggccagattcataccaggcttcatcgcaaccattacaaggaagtcattgtatgaagaagggcagacgtgtggcatgctaaactgacacgtggtagacaagaatgactggtttgtgactggtctgacgccggtcacgtcatcggcagacaaccgtgctcccacattgcatctgcttccggcggagtggaggtaggtatgacccatcccatcggagggtcattcggacagcggccattgcaaatctccacccattaatgaaggaatgacagggctatcccctgtgtcaggcgagtgacggcgcaaggcctcactcaaggacaagctgtgatttagcttccaggcgaaggcgcgagccaagttttggtcaagatagggtgggttcccatccaaaagaagagtaggtaaaaatggtgcatgtggtatccccttgagatataaaaggaggaccttgcccaccgaagcaaggggacgagaaaaaaaagggagagactctcagacgactctgagaatacctgagctcgtagaggagagaaagaagaagagtggttctagagcctgaactctcttgctctccggctctctgtaactctttcacacacagatccaccagaacacaggagtagggtattacgcttctcagcggcccgaacctatctacatcgcccgtgtcttgtgcatttgctctctcacgaacattccacagatcgagggtgaagaacctcacttagcgcccccggccgaaccggcaaaggggggcatgcgcggtctcccggtgaggagccccacgctccgtcatctggcgcgccaggtagggggcgcgtgtgtctttctaagccctcgtcctctttcgtgtgcgccaagcttccctcgctcagcccaatggccgaacaggcagtggcgcacaacctctctccgagcgctagcggtgacgacggggagcagaacccgcgccgtcgagctcgtactccaccgtccccctctcgccgaagtcttgggcgggaggaggcgttcgaggaggtcgaaagatccgcgacttcaccgcccacgggcgatggagaaggacggcgagacggggagcgtcgcctcctcgtctacggcgatggcagcacgccccagggcgcgctccaggctgcgggcgcgctcctgcgtcccccgcccgtcgtccccgatccagagactccagcccgacgttggctggatgacgtggccaacttggtcatgacggcgcagcagcgcctaggcgccggcgggcggtcctccgccaccaaggcctctggcgctgctaccgccggctccgtgtcgtcgaggcggagggcgcggcgagcggcggccgttacccgccgttcgtccgccattccttcgtcaacgcctccgacccaagaagatgtgcgtggggggccagatgcccacctcaatatcgagcgccggcgcaatggtcgtcgtgctgcccacgcaacggagggcgcttcctcatctggagcgccacttcggtccgggcacgggggccaggcccccgtgtccccggttggcggtgccggctgtcgagcctttgtggcgagccttcgaaacgtccgttggcccctaaggttccggcctaccatcaccgaaaaatacgacggaagcgttaaccccgccgagtttctccagatctacacgactgggatcgaagccgccgggggtgacgacagggtcatggcgaatttcttccccatggccctgaaaggtcaggcgcggggttggctaatgaacttgccacccgcatcggtccactcttgggaggatttgtgccagcagttcaccatgaactccagggcacatatccgcgcccaggtgaagaagcggacttgcatgcgggacagcgaagggacgatgagtctcttcgctcgtacattcaacggttctgtcaagtccgcaacaccataccatgcatccccgcacacgcggtgatatacgcgttcaggggggcgtgcggcacaaccgcatgctcgagaagatcgcctccatggagccccagaccaccgcggagcttttttagctcgcggaccgtgtggctcgcaaggaggaggcctggacctggaactcctccggttccggtgtggcagcttcggccgcccctgggtccgccgctcggtcagggcggcgggacaggaggaggaagaagaggtcggcccattccgacgacgagggtcacgtcctcgccgtcgagggcgcttcgcgggccacccgaaaggggaggcctgcgagcgacaaaaagaaggaggccggcgctcccagcagggagcgcccgactggcaagtggtgcactgtgcacaacacctccctccacgacctcgcggactgccgcgcagtcaaaagtttggctgagcggatgaggaagtgggaggaggagaggaggcaggagcgccgtgagggcaaggccccggcggctcccgccggcaaccggcgaggtgaggccaagcagaaggccaccgccggggacgtcgacgatggcgacgatgacctggggttccaggagcctgaggccaccgtcgccaccgtcgatgggggagcgtgcgctcacgcttctcgccggagcctcaaggccaagaagcgagagcttctggccgcggcccctacccatgaggcgacgcggcgggcgtggtggtcggaggttgccctcaccttcgaccagaccgaccacccgccgtgcgttgcccggggagtacagatcgcgatggtggttttccccactgtttgcaacgtgaagttggggcgtgtcctcatacacgggggtgcagccctcaacatcctttcccccgcagcctttgacgccatcaaggccctggggatggtgctccggccgtcccagccgatcatcgatgtgacgccggggcacacttggccgctaggtcatatcgacctcccggtcaccttcggtggttccgccaacttccgcacggagcgggtgaacttcgatgtggcggacctcagtctgccctacaacgcggtcctggggaggcccgcgttggtgaagttcatggcggcggtccactacgcctatctccagatgaagatgccgggtcccggtggccccatctccgtccatggcgaccacaaagtcgcgctcgcttgtatggagcagcgcgcggaccacctcgccgcggcgtccaagcccgagggtggcgacgagaggctcagcacctccgtccctgccgccccgaggcagcggatgatcacgtgtgacgaggtcccggtcaaggaggttgccctgggcgacggcccgtccaagaccacacgaatcggtggtcttctagacgacaaataggaagacgcgctcgtctccttcctgcgggcaaacgccgatgtcttcgcctggagaccggcggacatgcccggggtccccagggaggtgattgagcaccgtctcgccgtgcggccgggcgcaaggccggtccggcagaaagtgcggcggcaggccccgaaacgtcaagccttcatccgtgaggaggtggcgcgacttctggaggccggattcatccgtgaggtcatccatccgaagtggctggcgaacccggtcgtcgttcccaaggcgaacggcaagcttcggatgtgcatcgactacaccgaccttaacaaggcatgtcctaaggacccttaccccctgcctcgcatagatcagattgtcgactccaccgcggggtgtgaccttttgtgttttctagatgcatactctggttatcatcagattcgcatggctagggaggatgaggaaaacactgcattcattacccccataggaacttattgttatatgacaatgcctttcgggttaaagaatgcaggtcctacttttcaacgtactactcgaatttctttgggtaaccaaatagaacgtaatgttgaggcgtatgttgatgacttggttgtgaagacacgcaaccaagagaccttactctcggatctagcggaaactttcgaaagtctccgctccgcccgcataaagctgaaccgcgataagtgtgtgttcggcgtgcctgcgagcaagcttctcgggttcttggtctctgcccgaggcatcgaggccaaccccgagaagatacgagctatagagcggatgcggcccccagcaagcttagggacgtgcaatgcgtcaccggctgcatgactgccctaagtcggttcatatcgaggctgggagagaaggcgctacccctatttaagctcctcaaacactccgggccgtttacctagacggaggaggctgagcgggccttcactcagttgaaggcgtacctcagttctcccccagtcctggtcgccccggagccagatgagctgttgctactctacttggcggcaaccccgcaggtggtcagcgcggcgttggtagtggagtgcgacgaggacaaccctcactccgcgcatccccaccctgtgtcgactcgacccgggagagagcagggaggagaggcccccgagccgaacagcggcccgaggcccccgacggccggagcaggccctccgcccgcttgtccgacggtgccaggcgcccccgacccccaggatggcctcggggccactgcgggaaggccgcgcctgtcgccctctgaccccgaggtcgtcggcccaaaagtcgagtgcgcccctggtggcctctcggacgaagagcgccccggagatgtggcccctggcgaagaggatcggccccgccgaaaggtgcagcggcccgtctacttcattagtgaggccctccgggacgccaagacccgataccctcaggcccagaagatgctttatgctattctgatggcctcaaggaaattgcgccattatttccaggcgcatcgggtcacggtggttacatcttaccccctcggccaaatcttgcataaccgagagggtactggacgggtggtgaaatgggcaatcgaactctctgagttcgatttgcactttgaaccacaccacgcgatcaagagccaggccctcgctgactttgtggcagagtggaccccagctcctgagcccgtctccgtccccgaggccagctcggacccctcgcagctgcctcacaccgcctactgggtgatgcagtccgacggctccctgtctcttcagggcgccggtgcgggggtcacgttgacctcgccgagcggagacgtcctcagatacatggttcgcctcgactttcgggcaaccaataatatggcggagtacgagggactccttgcgggacttagggtggcagctggactggggatccgccgcctcctggtgttaggcgactcccagctggtcgttaaccaggtctgtaaggagtaccggtgctctgacccgcagatggacgcttacgtgcgccaggtgcggcgtatgaagcgccatttcgacgggatagagcttcggcacgtgcccagacgggataacgcggtcgccgatgaactctcaaggctcgcttcctcgcgagcccagaccccaccgggcgcctttgaagaaaggcttgcccagccgtcggcgcgacccgaccccctaggggagacggatgcgcctgaacggcccccgtggcccgtcggagtccaggcctcgggacccgaggggagcgctcccagctcccttagattgattgcttggatcgctgagatccaggcgtacctcgcagataagactctacccgaggaccgcgaagggagtgaacgcgtccagcgcatctccaagcgctacgtgctggtggaagggaccctttatcggcgcgcggctaacggagtcctcctgaagtgcattcctcgggaacaaggcgtcgagcttcttgccgatgtccatgaaggcgagtgcggagcccactccgcctcacgcaccttggttggcaaggcctttcgctagggtttctattggccgacggctctcaacgatgcggtcgacctggtccggcggtgcagggcgtgccagttccacgccaggcaaacccatcagccggcccaggccctgcagaccatacctctttcgtggccgtttgttgtctgggggctcgatatcctgggtccgtttaggcgggccccgggcgggttcgagtatctgtatgtcgctgtcgacaagttcactaagtggcccgaggcttatccggtcgtcaagatcgataagcactccgcgctaaaattcatcaggggcatcactgctcggtttggggtgcctaaccatatcattacggataacggcacccagttcactagtgagctcttcggtgactactgcgaagacatgggcatcaagctctgcttcgcctcccccgcccaccccagaagcaatggccaagtgtagcgcgccaacgcggaaatcctcaaaggcctcaaaaccaagaccttcaacatcctcaagaagcacggcgactcgtggatcgaggagctgccagcagtgctctaggcaaaccgaaccacgccaagccgagcaaccggggaaacgcctttcttcctcgtctacggcgcggaggcggtcctcccatctgagctcaccctgaggtcccctcgggccaccatgtactgcgaggctgatcaagatcagcttcgcagagacgacctcgactacttggaagagcgaaggcggcgcgcggccctccgagccgcgcgctaccagcagagcctgcggcgctaccatcagcgccacgtccgagcccgatcactctgcgtcgacgacctcgtcctacgccgcgtccaaacgcgtgctggactgagcaagctctcaccaatgcgggagggtccgtatcgagtgatcggcgtcccccggccgggctccgttcggctggccacgggcgacggcacagagctgcctaacccatggaacatcgaacaccttcgtcgcttctacccctagtgggggtcgggtgtcaggtctcgggctcaggccaaccccgcacccccccgggcgtgcagggttggccgggggctaccacatgcatatacttatcttttttctcttccgtatttcaataaaagctttttcgatttcctaaggactgtgtctgtgccattgtttccttttgaagaatcttggcttgaattagcacgctcgtgctcgatcctgccctcggtgtcccgggccggctaaaatcgccaaaaggggcccagaaccgagccgtgccccggggcgtggtgaactccgggggggaattggcaaaggcccacaatcgggtcatccataaccctcggtcaccacgctcccggcttggacagtctcgacacgtggatctccccaggcactagccccgacccgcgccgtttgaggctgggacctgggcacgagcccttgttcaagccaagacacagaaggaccgcggcacagaccatcctcgtctcatacacacaacaaacagaattgacacagaaatttcctctttatttgattgcagattaaattagtctatacaagaagggggcccgaaggcctcggaagaggaaagaaaaaactattaagatagacgggggcctgggggctcactccgacgcgcccgggtcgccggcctcgtcgtcgctgtcgtccacaccgtcgtcaccgccctcctcgtcagagtcgagggcgaacgcgagccgaggggccgtaccctcgaagctgtggacgatgtggtcggcggcgtcccggacccgcgcgcgcgtgccgtcctcggttccgggagggaactcttccagcgttgcccacggggagaagtcagggtccctggcctggtaacttgccagtacgagctccaccgccccccgggcgagatccctcgaggatgacttgatcgtctcctcgagctcctcggggagccgcttgaggaccccggccatctctgagaggcgctgggcgaggcccccctggttggcggcgtacttcgcggttcggccgccccagagacccgcttgccgcccggcgtggtatagacgggagacggcgtcccgaagcatgccgggccccacctcgctcgccaagcggagggcctcgacctcccctgcggacgagtccagcgcgccctgcagcttggcgatggtgtgttcggcggctgcgaggagggcggctgggtcgccatggcccgcggccgccccgccgctgtgcgctctcgcgtccaactccttcgctcgctcctcgagctcagcggcacgctgatccagtgcggccctctcggcgcgggcgctttccagatcgcggcgcgcttactcctcccgcgctgccacgcggagggactgtccgccagccgctgcgccgcggcctcggcctcctcgagagctcgctcccgctcggtgagcgcgtcctcgcggaggcggagtgcggactcctcttcggcgcaggcggcctcgtgcgccgccagtgttgcctcccgggtggcgacggcggcctcgcggtccgccaggtccctctccttcgcgcgggcgcgctcctccagcaccgtggcgcgagcctcaagggcctcttcgcgctgccgggacgccgcctcgatctccgctgcccgccgttcccgggcagcgacggcgtcaaggactccccgggtggcgtcgagcttcttctctagctccgccgcccgactcccgtattggaggcggaggtcgtcccgcacctcgtcgagcacggcggtggcgatgagggcagtctcccactcctcctccacctccctggcgatctccgccaggtccctgcgacgggcctcgagctcggaagcgtgccggcggtgtgccttgcggcccgcctccaccatggcctccaccgagcgccgcccctcctcgacgcgcgcccacgccgcgtcgagctccgcccgctccgcctgcaggacctccatctgggcacttaacccgtctaacaccgtagtattcgcggcggccaaggcctgcagaaggggctctgcgctcggtggggcagcggaaggcagaggggagagccgtctcggtgagggtgccgcacggctcggcccgccgatcgacgtgccggacgcggtgtactcccaggtgccccgggcgcgccgttggagcggcgcgatccggcgacgaaggtagtcgccgaacaccatggcccccgtaagcccctgggatcgcagacccgccaggcggtcaagaatggcgtcgtagccgtctcccagatctaccgtcgcccgccagctggaggcctgcgccgggggctggctcggaagtcggaggcgcgcttcgtcggcgaggagggtgtagaaccaatcgctcttccagtcgtcccactttttgcggaggacgcagggaatgtagcggttcagcacctgcccccgcggctggaagtagcagccaccgactaccgacggcggcgacaccggctgtacggtgaagaaccaccggaacagccggagagatgggcgcaccccgatgaacatctcgcacaggtgcgcgaagatggccaacgtcattaccgcgttgggggtgaggtgcgccatctggagatcataaaactccagaatatccatgaaaaaagaagagaatggcgggaccagccctgccattgcgaaagagaggaagaagacggaccgccccgggtagtgtggcgccgggcgtccctcacccagcgcgaccacctcccggccggtgacagattccggcatgaatcggcgcggcagcccggcctgcctctcgctcacgatgcgggaaggcggcagcacgctaccgtcgagcggtgcggagccccgtgccatgatgccggcggaggaggagcttgagagcgagtgagtgcggcaagggtagggcacaggaaacgaagagttagtgctcaagtggcgaaggcaaggggaagaatggcgagaggaaggaagcaaatctcttcctcggcgtctttatacccttgccaacgctattcccggctcctcgtttcccgcgcccactacctcgccccctggtttctcgcgcccacgcctccactaacccaactcgcccgtttgcggcacacgagacggatgtgcggccgtagcagttgagatgggacagatcaagcgcgcattaaccatgctcgccagacgcgaaaagcgccatcatcacgtctccaggcgaaacgaaccggctcgtcccgattcgcgcactgctcgagtaatgtagcggtcttaaagaggccgctcattattgtcggtcggttttcccttgccgatgcgcgcaacttgcgaccgctgggttcctgcccgcctgtagggacctgccccacctgtcaccgggcctaaggagtggcgtcacgtccgagcgcttccctcgaagggggcaatcgccctggcgtaacgccgggggctactgtcggtgacatggggccgagggtatcgtgactagaggcttgggtagccgcggtcacccacgtggcctgaccccctcgggggggtcaggcccgagggtgacgtggccacacctccctctgtctccccgaggggtcgggccgctcccgcttcggccccgagggctggggcgccccgaccccctgtggttttggcaccacgtgtgtgggttaggtgagcacagcggcgctcacctaaccgcacttatagcggattgacgagcgcgtcacgccgcatttaatgcggcgcagtgcgcg

SEQ ID NO: 7655 - DNA, 11205 bp, Oryza sativa
  unsure (1)..(11205): unsure at all n locations
caagggtataaagacgccgaggaagagatttgcttctgtcctgtcgccattcttccccttgccttcgccacttgagcactaactcttcgtttcctgtgccctacccttgccgcactcactcgctctcaagctcctcctccgccggcatcatggcacggggctccgcaccgctcgacggtagcgtgctgccgccttcccgcatcgtgagcgagaggcaggccgggctgccgcgccgattcatgccggaatctgtcaccggccgggaggtggtcgcgctgggtgagggacgcccggcgccacactacccggggcggtccgtcttcttcctctctttcgcaatggcagggctggtcccgccattctcttcttttttcatggatattctggagttttatgatctccagatggcgcacctcacccccaacgcggtaatgacgttggccatcttcgcgcacctgtgcgagatgttcatcggggtgcgcccatctctccggctgttccggtggttcttcaccgtacagccggtgtcgccgccgtcggtagtcggtggctgctacttccagccgcgggggcaggtgctgaaccgctacattccctgcgtcctccgcaaaaagtgggacgactggaagagcgattggttctacaccctcctcgccgacgaagcgcgcctccgacttccgagccagcccccggcgcaggcctccagctggcgggcgacggtagatctgggagacggctacgacgccattcttgaccgcctggcgggtctgcgatcccaggggcttacgggggccatggtgttcggcgactaccttcgtcgccggatcgcgccgctccaacggcgcgcccggggcacctgggagtacaccgcgtccggcacgtcgatcggcgggccgagccgtgcggcaccctcaccgagacggctctcccctctgccttccgctgccccaccgagcgcagagccccttctgcaggccttggccgccgcgaatactacggtgttagacgggttaagtgcccagatggaggtcctgcaggcggagcgggcggagctcgacgcggcgtgggcgcgcgtcgaggaggggcggcgctcggtggaggccatggtggaggcgggccgcaaggcacaccgccggcacgcttccgagctcgaggcccgtcgcagggacctggcggagatcgccagggaggtggaggaggagtgggagactgccctcatcgccaccgccgtgctcgacgaggtgcgggacgacctccgcctccaatacgggagtcgggcggcggagctagagaagaagctcgacgccacccggggagtccttgacgccgtcgctgcccgggaacggcgggcagcggagatcgaggcggcgtcccggcagcgcgaagaggcccttgaggctcgcgccacggtgctggaggagcgcgcccgcgcgaaggagagggacctggcggaccgcgaggccgccgtcgccacccgggaggcaacactggcggcgcacgaggccgcctgcgccgaagaggagtccgcactccgcctccgcgaggacgcgctcaccgagcgggagcgagctctcgaggaggccgaggccgcggcgcagcggctggcggacagtccctccgcgtggcagcgcgggaggagtaagcgcgccgcgatctggaaagcgcccgcgccgagagggccgcactggatcagcgtgccgctgagctcgaggagcgagcgaaggagttggacgcgagagcgcacagcggcggggcggccgcgggccatggcgacccagccgccctcctcgcagccgccgaacacaccatcgccaagctgcagggcgcgctggactcgtccgcaggggaggtcgaggccctccgcttggcgagcgaggtggggcccggcatgcttcgggacgccgtctcccgtctataccacgccgggcggcaagcgggtctctggggcggccgaaccgcgaagtacgccgccaaccaggggggcctcgcccagcgcctctcagagatggccggggtcctcaagcggctccccgaggagctcgaggagacgatcaagtcatcctcgagggatctcgcccggggggcggtggagctcgtactggcaagttaccaggccagggaccctgacttctccccgtgggcaacgctggaagagttccctcccggaaccgaggacggcacgcgcgcgcgggtccgggacgccgccgaccacatcgtccacagcttcgagggtacggcccctcggctcgcgttcgccctcgactctgacgaggagggcggtgacgacggtgtggacgacagcgacgacgaggccggcgacccgggcgcgtcggagtgagcccccaggcccccgtctatcttaatagttttttctttcctcttccgaggccttcgggcccccttcttgtatagactaatttaatctgcaatcaaataaagaggaaatttctgtgtcaattctgtttgttgtgtgtatgagacgaggatggtctgtgccgcggtccttctgtgtcttggcttgaacaagggctcgtgcccaggtcccagcctcaaacggcgcgggtcggggctagtgcctggggagatccacgtgtcgagactgtccaagccgggagcgtggtgaccgagggttatggatgacccgattgtgggcctttgccaattcccccccggagttcaccacgccccggggcacggctcggttctgggccccttttggcgattttagccggcccgggacaccgagggcaggatcgagcacgagcgtgctaattcaagccaagattcttcaaaaggaaacaatggcacagacacagtccttaggaaatcgaaaaagcttttattgaaatacggaagagaaaaaagataagtatatgcatgtggtagcccccggccaaccctgcacgcccgggggggtgcggggttggcctgagcccgagacctgacacccgacccccactaggggtagaagcgacgaaggtgttcgatgttccatgggttaggcagctctgtgccgtcgcccgtggccagccgaacggagcccggccgggggacgccgatcactcgatacggaccctcccgcattggtgagagcttgctcagtccagcacgcgtttggacgcggcgtaggacgaggtcgtcgacgcagagtgatcgggctcggacgtggcgctgatggtagcgccgcaggctctgctggtagcgcgcggctcggagggccgcgcgccgccttcgctcttccaagtagtcgaggtcgtctctgcgaagctgatcttgatcagcctcgcagtacatggtggcccgaggggacctcagggtgagctcagatgggaggaccgcctccgcgccgtagacgaggaagaaaggcgtttccccggttgctcggcttggcgtggttcggtttgcctagagcactgctggcagctcctcgatccacgagtcgccgtgcttcttgaggatgttgaaggtcttggttttgaggcctttgaggatttccgcgttggcgcgctacacttggccattgcttctggggtgggcgggggaggcgaagcagagcttgatgcccatgtcttcgcagtagtcaccgaagagctcactagtgaactgggtgccgttatccgtaatgatatggttaggcaccccaaaccgagcagtgatgcccctgatgaattttagcgcggagtgcttatcgatcttgacgaccggataagcctcgggccacttagtgaacttgtcgacagcgacatacagatactcgaacccgcccggggcccgcctaaacggacccaggatatcgagcccccagacaacaaacggccacgaaagaggtatggtctgcagggcctgggccggctgatgggtttgcctggcgtggaactggcacgccctgcaccgccggaccaggtcgaccgcatcgttgagagccgtcggccaatagaaaccctagcgaaaggccttgccaaccaaggtgcgtgaggcggagtgggctccgcactcgccttcatggacatcggcaagaagctcgacgccttgttcccgaggaatgcacttcaggaggactccgttagccgcgcgccgataaagggtcccttccaccagcacgtagcgcttggagatgcgctggacgcgttcactcccttcgcggtcctcgggtagagtcttatctgcgaggtacgcctggatctcagcgatccaagcaatcaatctaagggagctgggagcgctcccctcgggtcccgaggcctggactccgacgggccacgggggccgttcaggcgcatccgtctcccctagggggtcgggtcgcgccgacggctgggcaagcctttcttcaaaggcgcccggtggggtctgggctcgcgaggaagcgagccttgagagttcatcggcgaccgcgttatcccgtctgggcacgtgccgaagctctatcccgtcgaaatggcgcttcatacgccgcacctggcgcacgtaagcgtccatctgcgggtcagagcaccggtactccttacagacctggttaacgaccagctgggagtcgcctaacaccaggaggcggcggatccccagtccagctgccaccctaagtcccgcaaggagtccctcgtactccgccatattattggttgcccgaaagtcgaggcgaaccatgtatctgaggacgtctccgctcggcgaggtcaacgtgacccccgcaccggcgccctgaagagacagggagccgtcggactgcatcacccagtaggcggtgtgaggcagctgcgaggggtccgagctggcctcggggacggagacgggctcaggagctggggtccactctgccacaaagtcagcgagggcctggctcttgatcgcgtggtgtggttcaaagtgcaaatcgaactcagagagttcgattgcccatttcaccacccgtccagtaccctctcggttatgcaagatttggccgagggggtaagatgtaaccaccgtgacccgatgcgcctggaaataatggcgcaatttccttgaggccatcagaatagcataaagcatcttctgggcctgagggtatcgggtcttggcgtcccggagggcctcactaatgaagtagacgggccgctgcacctttcggcggggccgatcctcttcgccaggggccacatctccggggcgctcttcgtccgagaggccaccaggggcgcactcgacttttgggccgacgacctcggggtcagagggcgacaggcgcggccttcccgcagtggccccgaggccatcctgggggtcgggggcgcctggcaccgtcggacaagcgggcggagggcctgctccggccgtcgggggcctcgggccgctgttcggctcgggggcctctcctccctgctctctcccgggtcgagtcgacacagggtggggatgcgcggagtgagggttgtcctcgtcgcactccactaccaacgccgcgctgaccacctgcggggttgccgccaagtagagtagcaacagctcatctggctccggggcgaccaggactgggggagaactgaggtacgccttcaactgagtgaaggcccgctcagcctcctccgtctaggtaaacggcccggagtgtttgaggagcttaaataggggtagcgccttctctcccagcctcgatatgaaccgacttagggcagtcatgcagccggtgacgcattgcacgtccctaagcttgctgggggccgcatccgctctatagctcgtatcttctcggggttggcctcgatgcctcgggcagagaccaagaacccgagaagcttgctcgcaggcacgccgaacacacacttatcgcggttcagctttatgcgggcggagcggagactttcgaaagtttccgctagatccgagagtaaggtctcttggttgcgtgtcttcacaaccaagtcatcaacatacgcctcaacattacgttctatttggttacccaaagaaattcgagtagtacgttgaaaagtaggacctgcattctttaacccgaaaggcattgtcatataacaataagttcctatgggggtaatgaatgcagtgttttcctcatcctccctagccatgcgaatctgatgataaccagagtatgcatctagaaaacacaaaaggtcacaccccgcggtggagtcgacaatctgatctatgcgaggcagggggtaagggtccttaggacatgccttgttaaggtcggtgtagtcgatgcacatccgaagcttgccgttcgccttgggaacgacgaccgggttcgccagccacttcggatggatgacctcacggatgaatccggcctccagaagtcgcgccacctcctcacggatgaaggcttgacgtttcggggcctgccgccgcactttctgccggaccggccttgcgcccggccgcacggcgagacggtgctcaatcacctccctggggaccccgggcatgtccgccggtctccaggcgaagacatcggcgtttgcccgcaggaaggagacgagcgcgtcttcctatttgtcgtctagaagaccaccgattcgtgtggtcttggacgggccgtcgcccagggcaacctccttgaccgggacctcgtcacacgtgatcatccgctgcctcggggcggcagggacggaggtgctgagcctctcgtcgccaccctcgggcttggacgccgcggcgaggtggtccgcgcgctgctccatacaagcgagcgcgactttgtggtcgccatggacggagatggggccaccgggacccggcatcttcatctggagataggcgtagtggaccgccgccatgaacttcaccaacgcgggcctccccaggaccgcgttgtagggcagactgaggtccgccacatcgaagttcacccgctccgtgcggaagttggcggaaccaccgaaggtgaccgggaggtcgatatgacctagcggccaagtgtgccccggcgtcacatcgatgatcggctgggacggccggagcaccatccccagggccttgatggcgtcaaaggctgcgggggaaaggatgttgagggctgcacccccgtgtatgaggacacgccccaacttcacgttgcaaacagtggggaaaaccaccatcgcgatctgtactccccgggcaacgcacggcgggtggtcggtctggtcgaaggtgagggcaacctccgaccaccacgcccgccgcgtcgcctcatgggtaggggccgcggccagaagctctcgcttcttggccttgaggctccggcgagaagcgtgagcgcacgctcccccatcgacggtggcgacggtggcctcaggctcctggaaccccaggtcatcgtcgccatcgtcgacgtccccggcggtggccttctgcttggcctcacctcgccggttgccggcgggagccgccggggccttgccctcacggcgctcctgcctcctctcctcctcccacttcctcatccgctcagccaaacttttgactgcgcggcagtccgcgaggtcgtggagggaggtgttgtgcacagtgcaccacttgccagtcgggcgctccctgctgggagcgccggcctccttctttttgtcgctcgcaggcctcccctttcgggtggcccgcgaagcgccctcgacggcgaggacgtgaccctcgtcgtcggaatgggccgacctcttcttcctcctcctgtcccgccgccctgaccgagcggcggacccaggggcggccgaagctgccacaccggaaccggaggagttccaggtccaggcctcctccttgcgagccacacggtccgcgagctaaaaaagctccgcggtggtctggggctccatggaggcgatcttctcgagcatgcggttgtgccgcacgcccccctgaacgcgtatatcaccgcgtgtgcggggatgcatggtatggtgttgcggacttgacagaaccgttgaatgtacgagcgaagagactcatcgtcccttcgctgtcccgcatgcaagtccgcttcttcacctgggcgcggatatgtgccctggagttcatggtgaactgctggcacaaatcctcccaagagtggaccgatgcgggtggcaagttcattagccaaccccgcgcctgacctttcagggccatggggaagaaattcgccatgaccctgtcgtcacccccggcggcttcgatcccagtcgtgtagatctggagaaactcggcggggttaacgcttccgtcgtatttttcggtgatggtaggccggaaccttaggggccaacggacgtttcgaaggctcgccacaaaggctcgacagccggcaccgccaaccggggacacgggggcctggcccccgtgcccggaccgaagtggcgctccagatgaggaagcgccctccgttgcgtgggcagcacgacgaccattgcgccggcgctcgatattgaggtgggcatctggccccccacgcacatcttcttgggtcggaggcgttgacgaaggaatggcggacgaacggcgggtaacggccgccgctcgccgcgccctccgcctcgacgacacggagccggcggtagcagcgccagaggccttggtggcggaggaccgcccgccggcgcctaggcgctgctgcgccgtcatgaccaagttggccacgtcatccagccaacgtcgggctggagtctctggatcggggacgacgggcgggggacgcaggagcgcgcccgcagcctggagcgcgccctggggcgtgctgccatcgccgtagacgaggaggcgacgctccccgtctcgccgtccttctccatcgcccgtgggcggtgaagtcgcggatctttcgacctcctcgaacgcctcctcccgcccaagacttcggcgagagggggacggtggagtacgagctcgacggcgcgggttctgctccccgtcgtcaccgctagcgctcggagagaggttgtgcgccactgcctgttcggccattgggctgagcgagggaagcttggcgcacacgaaagaggacgagggcttagaaagacacacgcgccccctacctggcgcgccagatgacggagcgtggggctcctcaccgggagaccgcgcatgcccccctttgccggttcggccgggggcgctaagtgaggttcttcaccctcgatctgtggaatgttcgtgagagagcaaatgcacaagacacgggcgatgtagataggttcgggccgctgagaagcgtaataccctactcctgtgttctggtggatctgtgtgtgaaagagttacagagagccggagagcaagagagttcaggctctagaaccactcttcttctttctctcctctacgagctcaggtattctcagagtcgtctgagagtctctcccttttttttctcgtccccttgcttcggtgggcaaggtcctccttttatatctcaaggggataccacatgcaccatttttacctactcttcttttggatggggacccaccctatcttgaccaaaacttggctcgcgccttcgcctggaagctaaatcacagcttgtccttgagtgaggccttgcgccgtcactcgcctgacacaggggatagccctgtcattccttcattaatgggtggagatttgcaatggccgctgtccgaatgaccctccgatgggatgggtcatacctacctccactccgccggaagcagatgcaatgtgggagcacggttgtctgccgatgacgtgaccggcgtcagaccagtcacaaaccggtcattcttgtctaccacgtgtcagtttagcatgccacacgtctgcccttcttcatacaattacttccttgtaatggttgcgatgaagcctggtatgaatctggccgggactgacatacccactccaggagctagcacgccagctccggctagagacgagtgcctggaggctctcatcatttcgacgggacggggcgaggcgtgtgacaggccgcctgttgccacctaacccgcgatctgaccggtctgtgaccggttacacactgcaactggtcacggaccggataagcgcgcactgcgccgcattaaatgcggcgtgacgcgctcgtcaatccgctataagtgcggttaggtgagcgccgctgtgctcacctaacccacacacgtggtgccaaaaccacagggggtcggggcgccccagccctcggggccgaagcgggagcggcccgacccctcggggagacagagggaggtgtggccacgtcaccctcgggcctgacccccccgagggggtcaggccacgtgggtgaccgcggctacccaagcctctagtcacgataccctcggccccatgtcaccgacagtagcccccggcgttacgccagggcgattgcccccttcgagggaagcgctcggacgtgacgccactccttaggcccggtgacaggtggggcaggtccctacaggcgggcaggaacccagcggtcgcaagttgcgcgcatcggcaagggaaaaccgaccgacaataatgagcggcctctttaagaccgctacattactcgagcagtgcgcgaatcgggacgagccggttcgtttcgcctggagacgtgatgatggcgcttttcgcgtctggcgagcatggttaatgcgcgcttgatctgtcccatctcaactgctacggccgcacatccgtctcgtgtgccgcaaacgggcgagttgggttagtggaggcgtgggcgcgagaaaccagggggcgaggtagtgggcgcgggaaacgaggagccgggaatagcgttggcaagggtataaagacgccgaggaagagatttgcttccttcctctcgccattcttccccttgccttcgccacttgagcactaactcttcgtttcctgtgccctacccttgccgcactcactcgctctcaagctcctcctccgccggcatcatggcacggggctccgcaccgctcgacggtagcgtgctgccgccttcccgcatcgtgagcgagaggcaggccgggctgccgcgccgattcatgccggaatctgtcaccggccgggaggtggtcgcgctgggtgagggacgcccggcgccacactacccggggcggtccgtcnttcttccttttcttttcncgcaatgggnccagnggggncccttttggggggggnttttccccccccccccgggccccattctcttcttttttctggatattctggagttttatgatctccagatggcgcacctcacccccaacgcggtaatgacgttggccatcttcgcgcacc

SEQ ID NO: 7656 - DNA, 6634 bp, Oryza sativa
tgcccctgctttcttcatgaactttatgaataaggtgtttatggaatacctagacaagttcgtggtggtctttattgatgacattcttatctactcccgaaccaaagaagagcatgaagaacatcttcgccttacactagagaagctacgagaacatcaactgtatgctaagtttagcaagtgtgaattttggttgtctgaagtgaagttccttgggcacgtcatctcagcaggaggagttgccgtcgatcctagtaatgtggaatccgtaaccaactggaaataaccaaagacagtttcagagattcgctgtttcctaggcctcgcaggatattaccggaggtttatagagaatttttccaagattgctaagcccatgacacgactgcttcagaaagatgtgaagtacaagtggtcggaagaatgtgagcagagttttcaagagttgaagaatcgcttgatatcagctcctattttgattttacctgatccaaagaagggtttccaagtgtattgcgatgcatccaaacttgggttaggttgtgttctgatgcaagatgggaaggtggttgcctatgcatctcgtcagttacatccgcatgagaagaactaccctactcatgatattgagttagctgcagtggttcatgcattgaagatttggcgtcattatctttttggtactcgtacagaggtgtacactgatcacaagagtttaaagtatatctttactcagccagatctgaacatgagacaaaggagatggttggaattaattaaggattatgacatgggaattcattatcacccgggaaaggctaatgttgtagcagacgctcttagcaggaaaggctattgcaatgctacagaaggacgacagttgccattggaattatgcaaggaatttgaaagattaaatttgggaattgtcagtagaggttttgttgcagccttaaaaacgaagcccactctaattgatcaagttagagaagctcaaattaatgatcctgatattcaagagatcaagaagaatatgagaagaggaaaagctatcggtttcttggaagatgagcaaggaactgtatggttaggtgagagaatttgcgtccccgacaacaaagatttaaaagatgcaattctgaaagaagctcatgatactttatactccattcaccctggtagtaccaaaatgtaccaggatctcaaggaacgattttggtgggcaagtatgaagcgtgaaatcgcagaatacgtagcagtatgtgatgtttgtcagcgcgtcaaggcagaacatcagaaacccaccggtttattgcagcctttgaagattcctgaatggaaatgggaagaaataggtatggattttatcactggtttacccagaacgtcatcaggccatgactctatttgggtgatagtcgacagacttaccaaagtggctcatttcattccggtaaagacaacttattctggaagtcggttggcggaattgtatatggccaggattgtgtgtttgcatggcgtccctaagaagatagtgtctgatcgaggcagtcagtttacttcaaatttttggaagaagcttcaggaagagatgggttctaagctgaactttagtactgcttatcatccgcagacagacggacaaaccgaaagggtgaatcagattttggaagatatgttgagagcttgtgctttagatttcggtggaagttgggataagaatctaccttatgcagaattttcgtacaacaacagttatcaagctagtcttcagatggctccttacgaagcactgtatggtcggaagtgccgcactccgcttttgtgggatcaaacgggagaacgtcaggttttcgggactgatatcctgagggaagcagaagaaaaggtaaaggtcattcaagaaagattgcgagtggcccagtcccgacataagagttatgccgacaatcaccgcagagatttgagttttgaagaaggagattatgtgtatcttcgtgtcacgcctcttcgaggggttcatcgttttcacaccaaaggaaaattggcaccgcgttttgtgggaccttataagatcgtcagtagaagaggagaggttgcttatcagttggagttacctcaatctttggcaggagtccataatgtgttccatgtgtcgcaattgaaaaagtgtttaagggtacctaccgaagaagctaatcttgaacagatagaagtccaagaggatctgacctatgttgagaaaccaatccgtatcttggaaacagatgagagaagaaccaggaatcgagttatccatttttgtaaagttcaatggagtaatcactcggaagaagaatcaacttgggaacgagaagatgaattgaagttagctcatccgcatctgttcgccagttcttccgaatctcgaggacgagattctgtttaaggggggtaggtttgtcacaccctgaaaatcataaatatataaattgttgtttaaatggaattttttttgaaataattttaaaagccttgaagagaagatctaattttaattaataaattccaatataaaatggggccagataaaattttattaaatactttgcttaattctataattcctagatttttctgggattcatttgagctaaggaagtatttttaataaatggaattgcatttaagaaataatttaaattgaaaaaggttttaaaaagtcttcttttggctttgggccgaaagtcggcccaaaacctctcttctctctctcctcggcccagtccggcccagtccgccgccgcgcgcgcgcgccctcgctcgctgacaggtggggttcgtcttccccgagccgccgtcgcccggccgaaaccctagcgcgccgccgccgccgttcacttccaaatccggccgttcctttccttctccggccgaatcaaaagaggggaaatgatctccgggatctcctctaccttttctccgttggaatcatcggctaaaacgttttggaagttcgtggaatcgagttcgattcggatcggcctctttccttcaagccacgaagtttccttctcgtcaccggccgccgtgggccttcgccgccgcctcctagcccctttaaaaggctccccggtgtctcctctacccgccgccaccctcgccttcgcctctcgtcgcccgtagagctctagcgccgtgtgccctagcgccgccgtcgccgccgtcgctccagcagtgcgccgccgccgttccagacgtcgccgtcactcgggaaggtcgtcgtcgtggtcgccaagtcgtcgccgtccttgtccgccgcttcgtcaccgtcggaaaccgccggagcatcgtcgccgtcgtcaagccgcagtccgccgccgttccttcgtcgtcgccgtcgccgtctgttggtcttccgccgctcccttggtcgccggtgagttcgccgtgccgtccgctacctgttggtgccctccgttcgtgccgtagtgccgccgttcgccggcgagcttgcgccgtccgagctgtcgagccgccgagccgccgccgccggtggtgacgtcatcgctgacgtcatcgtccccgtttcccgtgagccgccgtggacccgatcgatctcggccgtccgttttggatcaagtcgatctcggccgtccgttcccgtgaaccgccgccgtgcgcccggtccaccgcgaaaccctagcccgctgacgcaataaatcccttttccttttcaaaaataattcattattgcgtcataattcaattaaaatcaatttaagtgttttaatccgatttaatcttcaaaaattcataactaattcatcttagctccgatttagttggttcaagtctctaaatttttctaaaattgagatatacatattaaaaatatccacatgtactgttcatgcttgttttgtgctgttttggtgattttgctcttttttgcttagattccgtcgtttccgaagagtccgttttcgccggagaagagtttgaagagttccaaggccagcaaggcaagtcacacagatcccaaacaaccctttgagcatgttgatcctatttaaagctattgtttctattcaaatattgcatttattttcgaatgtcattgggtggaattaacctattgtttgttatagcctttttgttcttgattactttattccttgataccttgggttattataatttgactagttgagctttgtttatattggttcaactagacgtattagatataattgcttagccctgcttagaaacattagcacactattgggataacttatgactcactattatttaaagatggcttaatgatagttcacgatggtcaatcgtgattggttaattaattaatgtgccaactaaaacctgataatggtgggttgtgagcacatggttttgagagtcgtgctcatgacaattaaggaccggttcacgagtttcggttgtgaaacattaactgtgccaaccacaagccagcgtgggtaacggctttatcttttgtatagcatggttcattgcggggcaccagactgagaagtggcggagataagcccacgggggtcgctggggagtccatgccttgtttataagggggtgattatgatccaggaaaggtgcgctgtaatggattgtgttgtgcgaggggtattgtcacagctcctttccgaggtaccgtggtggtattgaggcacatggtgacatgatgtggggctgtgtcttgtgggtacagtggtacacctctgatcagagtaaaactattcgaatagccgtgcccgcggttatgggcgggtctaacaatgtctttcgtgattagtctcacacttttcaccatagtaaatgatgctataattggtaataatttgattagctcctggtttggaatggtatattcctggtttggagatagaactgtgcagccggggtggttgttcagaatggttgggcctatacaacagggtacgttgtatagtgttggattaatattgtttaattattacttaacagttttattaaattctcaaatgtttgctaaatgctgcttttgcaaatggaaccctattatgccatcctttgttatcctgtgcacttgcatatttgctgcgtggcttgctgagtatgtcatatactcaccttgcaatcattcatcagaggaagagttttacagtgaagctgatggtgtggaggattaggtgtagccctggtcaagctgcttgtggagtggagccgtctgcgccgtttatcttattttccgctgcttagatctttattgattgagaggaactatctacctctgtaatgacattttattcgcttattaattagagtaataattgtactctattatcaatttgttattgtgtgcctcggctgattcctggacgagggctcacacacatgtaagcgtttggaattttggatagaaattccgggcgtgacagtagacgacgacgccggccggaacggacggcggacaacagcggcgagcggcggagcgaaccacggcgatacaggcaaaagcgagcacaccgggtggttgcacgagaagaggggagacgagccaatggctccgattcgccggagggagcttgacggcggcgaatcgcggcggcggcaaccggcggcgggagaagggggaaacgacgacgaggtcacgaggggccgattcccggcggcaagagcatctacacggctacgggaatccgatgctagcgtcggattgggcggagctacgccgagcgaggccggcgacgagcgggtgctacggagcacgggcggtgagcacatggcgagcggcggcaacggtcggggcggtgccggctagctacggggaggctactcgtgctactaccgaaaactaagggggagagatggagcgaggaggaagaacggagggaggcactaccgtgcggacggggcgcagtgacgagaggccgacggcgcgggagtaatctctctggcctcgggcctgggaagaggaaggagacgagcgcccggagtccccttccgcgtcctcgctcgtgccggctcctccgacgcgcgcaacgacgaacggcgacggcgaaacagagggacggcaacaatatagtggaggcgatgggacaacgagaggagaagagagggagggcgcccggggctttaaagggtggcaatgtcggtttggaaaccgactttggtcggtcaaggcgcgagctggcgctcggcgctcgcgtccaaatcggcgacagggcggagggaggatgacgccggcgggaggaaaaaggggaaaaggagggagagaaagggggcttgcctccttgccgctttggggaaaaggaggagggggagagagagcgacgcggcagagggaggagggctctgcctccgtcccttggcggcttgcgcgcggagtggcggggccgaggcgatgacgacggcgatgacggcggggcagtttggagcggaggggcgacacgggcgacaggcgcgggcaggcgcggacgacggcggcgaccaggcggtcggccaccacggctcgcgcgcgcgggatgcaacgggaggcgcggcggtttgagtggcgcggcgcgggcacgcgcgctggcagcggggccgagcggctgcgcggctgcaggcggcagggcaccgggaccgggtg

SEQ ID NO: 7657 - DNA, 7856 bp, Oryza sativa
tgaatggatgactcaaggatgggtgttttatactgacttaaaggtgttaaatctgggaagctattaacttattttaagccttgattgggtgattggtattatccctttccgggtgaatggggtaaacaaccttctttgccagctttctggaaaaaaggatccattcctttacagggtttttggtcaaaaactaccagggtcttcaacctttttttaacaagttttggaatttaaaggataaccaggcatttttcaacctaatcaattgtgcccactatcaaaatcttcaaaccaagaaccaatgccagtggaaattcaacaagtgctagcagaatttgcacaagtgtttgaagaaccttctggattaccaccgttcaaggtttttgatcatacaattccactcatgccaggagctactccagtcaatgtgcccccctaccggtatacacctgctcaaaaggatgagaatgaaatgccagtcaaggaaatgttaaccaagggtatcattcagccgagttccagtccattttcatccccaatgttgttagtcaagaaaaaggatggtaccctgcgtttttgtgttgattacacatttgaatgccatcacggttaaaaataaataccctcttccgattattaatgagttgcttgacaaattgtcaggggctcattggtttactaagctggatttaagagctgatgaacataagacggcatttaaaacccatcatggtcattttgaattcagggttatgccgtttggtcttactagtgctctagcaacttttcaaggctgtatgaacaatgtcctatctcctttgttgcgcaagttttttctggtgtttgtggatgatatcttgatttacagtaagactcttggtgatcatgttaaacatcttcaggctgtcttgcaaattcttactaaacatcaacttaaggtgaaaaagagcaaatgttcctttgctcaacagagattagcctacttgggtcatattgttagccctaatggagtatcaactgatgaagagaaggttcaggttgtcaaggactgaccaattccaacatcagtaaagttgttaaaggggtttcctgagtctgactggatattaccgcaagtttgtcagacattatggcttgttaagtaaacctttgaccaatttactacgaaaagggcagctctatgtgtggactgcagaaactgaacaagcttttcaggctcttaaacaagctttaatcactgctcctgtcttagctatgcctgatttcaatgaaccttttgtggttgaaactgatgcttctaacaagggaattagggctgtttcgatgcaaaagaatcacccaattgccttcttaagtagagctttgggtactcgacatcaaggattatctacctatgaaaaggagagtttagcaatcatgctggcagtggaacattggcatccttatttgcaacatgctgagtttttcattcgtacagatcataggagtttatcttttctggatgatcaacggcttaccaccccatggcagcataaggctttaacaaaattgcttggtttgcgttataaaatcatctacatccacctcattctgttcttgaacttgtagctgtttcttcagttgttccagattggattcaggaagtcattgctggttatgattttgaccctgatgctttaagtaaagttcagactctttgcatcagtgcagctgcggttccaaactttactcttaaaggagtgctatatttcaagaacaggatgtggataggtaacaatactttacttcaacaaaagattttggctaacttgcatactgcaccagttgggggtcattcaggcattcatgtcacttatcaaagggtgaaacaactatttgcttggcctcacttgcgcactacagttatgcagtttgttactgcttgttctgtttgtcaacaagccaaatcagaacatgtcaagtatctaggaatgttgcaaccactgcctgtacctgaacatgcttggcaagttgtttctttggattttattgagggcttaccaaagtcagctaccttcaattgtatcctggtggtagtcgacaagttttccaagtatagccattttgttcctctttctcaccctttcacagctatggacgtggccgaagcttatatgcagtttattcataaattgcatggattacctcagtcactcatttctgaccgtgataggatcttcacaagcaccctgtggactactctattcaaattggctagtacacaactccggttgagttcttcttactatcctcaaactgatggacagacggagcgagtgaatcaatgtcttgagactttccttcgctgctttgtgcatgcttgtccttctcagtggagtcgatggctggctctagcagagtattggtataatacttccttccattcagccttgggaactactccatttgaagtattatatggacataagccacgatattttggtttgtcagcaaatgcagcttgtcagttgtcacgcccagaatttctatccaaaattccaaacgcttacatgtgtgtaaaccctcgtccaggaatcacccgaggcacacaataacaaattgataatagagtgcaattattactctaattaataagcgaatataaagtcattacagaggtagatagttcctctcaaacaataaagttctaagcagcggaaaataaaataaacagcgtaggcgactccattccacaagcagcttgaccagggctacgcctaatcctccacaccttcagcatcactatagaactcctcctctgatgaatgattgcaaggtgagtatatgacatactcaacaaaccacgcagcaaatatgcaagtgcaggggataagaaaggaaggcacaatatagtctcatttgcataaatggcatttaataaatactttagaatttaataaaacagtaaagtatttaattaaacaatattaatccaatgctatacaacatacccgttgcataggcccaccattctaaacaaccattcccggctgcacagttctatctccaaaccaggaatataccattccaaaccaggagttaaacaagttattaccaattacagcatcatttattagggtgagaggtatgagactaatcacgaaagacattgttcgacccgcccataaccgcgggcatggctattcgaatagtttactctggccagaggtgtaccactgtacccacaagacacaacctcaacatcacgtcaaccatgcgtcgcgatacttaacaagtacccgaatagagattgtgacaataccctctgcataacataattcaaagcagtgcaccattcctggatcataatcaccccccttataaacaaggcatagactccccagcgacccccgtgggcttatctctgccacttcacagtctggtgctctacaatgaaccacagtatacaaaaggtaaagccgttgcccacgctggcttgtggttggcagggttaatgtttcacaaccgaaaatcgtgaaccgttccttaattgttatgagcacgaccatcaaaaccatgtgctcacaacccaccattaccatattttagttggcatcttaattaatcaacctatcatgattaaccatcatgagctatcattatccatcattaagtaatagtgaatcattagttatccattcatatgagctagtgtctctaagcatggctaagcatcctaattactttagctaaaaccatataatgttctagcaaatcaaattattaaacaggtgacaaagaataggtaatcaataatcaaaaggctatagcaaaggcaataggttattcccacccaatgacattcaagaataaatgcaatagttgaatagaaacaatagctttaaacgggatcaacatgctcaaagggttgtttgggatctgtgtgacttgccttgctggccttggaactcttcaaaatcttctcctacaaaatcggtctctccgggaacgtcggaatctaagcataaaagagcaaaatcactaaaacagtacataaacaatcataaacagcacatgtggacatttttaacatgtagatctcaattttagaaaaatttaaagacttgaaccaactaaatctgagctaagatgaattagttatgaatttttaaagattaaaccggattaaatcatttatatagattttaattgaattatgagcaataaagaatcatttttgaaaaggaaaaaggatttattgtgtcagcgggctcgggttcacggtggacttggtgcacgggaacggtctacggaataaacggctgagatcgattcgatccaccgcggtctacggatgacgcggcgctgacgtcgacgatgacgtcatcaccggcggcggctcagcacctcgcgctcgccggcgaacgacggtgcagcgccgcaaacggagggcatctacacatagacggcgacgcggcgaactcaccgagggctcggacgacgacggacggcaacggatggcaacggcggcgaggtcgaagcggtggaggcgttcgggtcgacgatgacggcaatgccccggcggtcttcggtggaaacagaggacgggacgaggacggcgacgacttggcgatcccgacggcggccttcccgagtgacgacgatgaccggagcggcggcagcatatggctggactcgcggcggcgacggcggcgcacgggctctagtggctagggtgctacgagcggcgagaagataaggcgagggtggcggcggacggaggaggtctcggaggtccttatataggggctagggggcggcggtggaggcccacggtggccggcggcggcgatggaaggtttagggttatgaggaaagagatgatccgaatcgggctgaaatccaccgatttccaaacaatattagccgaagattccaaaagagaaaaggaagaagagatcccgaggatcatttcccctctatcaattcggccggattgggaaagaggcgatggaatttggaagggggcggcagcggcttgcgcgcgctagggcgcggctacggcgagaggaggaagacggccctgataggtgggccccacctgtcagcgggagagaggagagagggcgggcggctcggcttggcgggctgacttgggccgggcgcgagtaggctgaaggagagggagagagacttgggccgactttcggcccgaagccaaaagggagattttaaaacctttttctttttaaattattcatgaaatgcaatttcatttattaaaaatacttccttggctcaaataaatcccagaaaaatctaggaactatagaatcaagtgaagtatttaataaaattttatctagcccacttttatattggaatttattatttaaaattagatcttttcttcaaggcttttaaaatcatttctaataattccatttaaacaacaatttataaatttaagatttttagggtgtgacatgagtcgactgagttaattgactggttacatgaaagggagcagattcagagtttgattcgggatcatttgttgcgtgctcaagctcgtatgaatttcaggctgattaacatcgctctgagagaacattttctgtcggcgactgggtttatctcaaattacagccgtttgtgtagcagtcagttgtcactcgcgctaatcgcaggttggcttttcgtttttatggtccttttcaggttctctctctagttggtgaagtggcttacaagttggctttaccagctaccagtcttatatacccggtggtccatgtctcacagcttaagaaagcattggtgccaagtaaggtggtgtattctcaattgcccagaattcagtccactgctggtacatcagttgttccatcgcaagtgttggatcgttgcttcatttggaaaggatccaagatggtggagcacttgctggttcggtggtctggagacgatccgcatgtggtcacttgggaaaatgatcaagaacttcgtcgtcgttttcctgactctgaagcttggggacaagcttcgaccgcaggaggaggggatgtcacggcggcagcatctgtagcagggagttcaaagcagaagccagtggcccagcctgtgaatcggcctagaagggagaagcagcccaactcccgtttccctgcaagtgtgtggacccagtagtaattggctaggcaactgtcagtgagtgagagagactgtgtagttcgatgctatataagccggcacgattgagaggaaggggatcaaatcatgtaatcaaacaaactcaaattcaattccatctctgtcctgttcaattctgttatgatcttctccttcttcttcttcctcaagccatctctctcaatctctttccttctctactcgaccgaatctctcctacgaattcgagaccgtgacagaaactcggcgaagcccttacctggcgcgccaactgtcgaaacaatatttcagcaatataaagagggtagcgcacgagacctaaaagtggagggatgcaaagacaaaggatttagaaaggttcaggccctctcaatgagaattaataccctactcctatttggggatttgaatccgccgagtgtattatagatctgacgatctgattgtatgtcatctgccccctagagagcatcctgcccaccttatataggatgggggcaggattacaagatagaaaccttaaccaatacggtatcagtttcctaaatttactttaccatattatccaaccaggactaaaggccattccataatatataaggaaacgtattacccaagtcatgatttattacatattccatagatataagttatcccctgtaactagtcggataaccatgttatgtgggtatgggatacctataatctgagcaatctgtagcccaaaagccacgaaagtaaatagcaggaatccatggcttgatgatgggacatgacaacacgatgccgacaatctcttgcaccacgcaggaaccggcaaataactaaggcatggattagtttctaacttttttttagaacttttaactttttcatcacataaaaactttttgacacacataaacttccaacattttcgtcacatcgtttcaatttcaattaaacttctaattttagcgtaaaataaacacactctaaagaagaattggataaaccctactacgagacgatatatactccacctccagttaccggtaaccgaagccattggagcggcagaaagagcactttctttttctctgggagagctctcgccgactctgctcaaagtactgaatctaactaaaagaatggctcgtgcctcctgcataaaaataaatggctcgtgttgaagttgtttgagacatccaagaatcggcagtatacgtcatcacaaaagtacgatcgacaaggaagttgcaccaaaagttgctaacctaagttgaaactgtcaattttttttctaataaattccacccggtcgtcatacgtgagagaagtatgtaacccgcttctactaactagaagcattgattcgtcaacaaatttccaaagaaaatcaacatactgaccatccgttttattttaaaaatttataaaataattaagaaaaaaaataagtcacacataaattactattcacgttttattatctaataatcataaaaatactaacaatcaaaaaattcaaataagacaaacggtcaaatgctctacaatgaaacccacaactgcgaaagggcctgtagcctagtggttacaagagcatcaatagcacctgaggtgttgggttcgactctttatgggacgaatttttcagaatttatcggcgttgtgctttcagtggtagacggtgataggcgacg

SEQ ID NO: 7658 - DNA, 3198 bp, Oryza sativa
gtttacttgactacttacctttttactttgattttgtaactttattcaaattaatccaaaaacttgtgctattaattggataaatgtcttaactccctcctttcacttgtctttagatgccgcgctacaagcctgagtacttgtttggtgttgagggatttgtccaggagttacgtacgatgtcctttgtcattggatttgggactgcccctttttatgctcagattcctcatgatcttcatgaagagaagtgccgagtcaaagtcaccttgaacagtaatagtgaagatatcccctcagtgatgttcgaagctggaggaagaaactacatccatgcatgtcaggaggtggcaaggatcgccataggagagcttcagtgatcagttggccgacactgagtatcgctaccatcctcgccaaccccagggaagtgaccgtggcagttaccttgagactgaaggaattgagaatgatgctaccacaaggcatttggttgagatgctgtgggctatggatgaaagtcgtgcggagactgtgttagcagctcaagatcgtgaagaccggaatcgtggtaagatttgcaagctagaagacaaggtggatcgtttggagaaggaactagctgcattaaagggagaagcaccgccacagaaggccaggattcgtctcaccgcaaggaagagagctctatttgtccctcgctaccaattggcgccaaaggtccgtgtggtggagaaagaagttgccccagccctagcggatcctccggtcattatcataagtgatgatgaaggagaagaatcaaagcgcacccattccaagattgagtgggtagcaactcaagatgatgaagacgagccgaacgagccttcaatcgacctccgatgctcggaagaactagagtgacttgttaagtcgttgtcttagatcgttgtgttagtttgcttgctttaagtttggttgtgtgtgtctcgcatgtgatttacatcagtggtgggatgtaagtgcatgcgtttgtttgctttcgagtgttagggagttggtgagtttagtggtgtgagagtcttcagttctgtaataatgaaactcagttaagatcaataaaagttaaagtaattctctgtcctaagtagtttcccccggtttctcttcttgtgccctgtccatgccagatggtgatcactcgcagcaatgggaatggccctaacaaccccaataacaacaatgaagggaacccaacacttgctcaagttcttgctcaacagactcagttaatgaacatgatgatgcagcaacttcagaaccagcagaaccagggaaataaccatgcacctccccagaacaagttagcagaatttcttcgtgtgaggctgcctattttctctagtaccactaatcctgttgaagctggtgattggctgcatgccatagagaagaagttggatttgcttcaatgcactgatcaggaaaaggtctcatttgcatcacatcagttgcatggccctgcctctgaatggtgggatcacttccgccttaataggactactgctgaacctatcacttggcttgaattcaccgctgctttccggaatacgcatataccatcgggagtggtgtctctcaagaagaaggaattcaggtcgctcacccagggatctcgctctgtcacggagtatctgcatgagttcaattgtctggctcgttatgctccagaagatgtgcgcaatgatgaagagtgccaggagaagttcttggaaggacttaatgatgagctttcttatccactcatgggctggagattatcctgatttccagaagttagtggataaggctattgtcaggaggacaaatacaatcgcatggaacagaagaaacgccggattgctcaattcaagacacaaccgggaaataatcaaaggccgcgtcttactttaggaccccagtccatgccacatggaggttcttcgtctgttgttcgtccgcggcgtcagttcttcaacaacaatgctggcaacaacatccgcaatctagctccacgccctgttgcagtttcgacacagcaacagcctgccaagagggagcaaggcagcaagcccgtagtgtgcttcaactgtggagacccaggacattatgctgacaagtgtccgaagccccgacgcgtgaaggttgtccctgcccagagcaactctaccgcaccagcatcaaaggcccgtatcaatcatgttgctgctgcagaagctcaagacgctccagatgtgattttgggtacgttccttgttaactcagttcctgcaacagtgcttttcgattctggtgctacacattcatttttatctatgagttttgcgggaaatcatgggatggaagtagaagatcttagacgtcctttgatggttagtaccccaagtaatcaagcactctctttgcaacgtagcccctctgtcagaatagaaattaaaggagtaccatttctggccaatcttatcttgttagaacccaaagaccttgatgtcatcctagggatggactggttagccagacataaaggtgtgatagactgtgctaacagaaaagtaactctcaccagcaatgatggtcgagttgtaactgttcatgcattgtcttctgagtctttaaggtcaagactgaaccagataactttggaagagattcctatagtccgggagtatcccgatgtgttcccagatgatttacctggtatgccgcctaaaagggatatagagttcagaatagatttggtacctggaacaactccgatccataagagaccttatagaatggcagccaacgagttggcagaagtcaaaaggcaagtagatgatttgcttcagaaaggatacatcagaccgagttcatcaccatggggagctccggttatttttgtgggaaagaaagatcatacccagaggatgtgtgtggactatcgtgcactaaacgatgtgactatcaagaataggtatccactacccagaattgatgatttgtttgatcagcttaaaggtgccactgttttctccaagatagatcttcgatcagggtatcaccagttaagaatcaaagaggaagatatacctaagacagcttttaccgctaggtatggattgttcgaatgtactgttatgtcttttggacttaccaatgcccctgcttttttcatgaactttatgaataaggtgt

SEQ ID NO: 7659 - DNA, 6194 bp, Oryza sativa
  unsure (1)..(6194): unsure at all n locations
taaggggggagggggtaatttgtactttttcatatatttaattggtaatttgtccacgtcttccatatggacttttcgtaactgaccagttgataggtagatatttgggcgattgagttgctctgtttataaatggagagccttaggtgctgcccatgcatggcatctaggcctgtttggcacagctccagctccagctccacccctcctggagctggagcttagccaaacagtttcagctccaccaaaactaggagtggagttggatggagctctctcacaaaatgtactagagttgtggagctgggttttggcagctccacaactccactccagactcaactcctggagttatatttaggagttggagctgtaccaaacaggctataaggctacgttctaaactctcgtttcccaacttctacctcatttatttccgcacgtttgcttttctgaactgccaaatggtatattttttataaaatattacatagaatagttgtttcaaaatatcatattaatctatttcaaaatttattttaactaatacttgactaatcatgcgctaaccgtttcttcattttacgtgctgggagtgaagtttcactactagacatgcgattttcatggacgccggcccctttaggttccaggcgggccgtaagtggctctgccttgaaccaggtgatcccggcgccgagctgtgggccgcacaggataatcgattatcccgtgcggtccacttaagacaaccgcacgggataatccttttatcctgtgtggtcgttaggcgaccgcctacgatggtgagggagctatacaagtcccagcccgaccgttgcaatggcatgccggtgatttctctctcctaaaactccacaaattatgggagaatgttttcgatctcaaatctttgattgggttccatataaaaggtgtagagcttgttctcctccttcatttgcagccatttttgtcagttttcatcggtgcaatacgaagaaacttgcacttttataaatggtatattgtagttacttttttatttttttcttattttttagcaaatacataatgattccattacatgtttataaaagtatttagtacctaaattgaaaagttgggtttgcctctattaaatttattttcattcggataaaaggacgatttttttcatttgtaagaaatggacaatattttattaatgcttaaaattgttgtgtggctgtttaaatagtccgtaaaactttaatttactatgtgattagttccctccaatttaaatacattcttttttaccatcgggcatggatgtattaatgacaagctttattgtaggtcatggatgtacagcaagaaaagagctcatccaacgttcttgaaggaagcagccaaatttgttgaggtcgcaaaggcacatgctgtgagggagaatttgaggagcgttttttgcccatgcaaagtgtgtaagaacgaaatttgctgcaagatccgaatgaagtattgtcgcacatcgtagagcaaggatttaaggagggccacaaaatatggacttttcatggggaagtcggtggtcgtaacgaagtgatggatgatttctgctttgatgatgcagaaaattttataatcaaagacatgtcacagggaaacatcccggaatgtggtggctctggtatagtgtcacgtcccaaaacgactctaaaatacatcctctaaattatgcctagaataattaaaatccgtgtgaaagcctccaacaattaaaatgtgcaaagttaaaagtcaaataaggcttagaggatttttgtatatttcctaaaagcctaaaatgtgtaaataaattttagtggaattttctgagcacaaatagtaattattaagaaataaacaaagttgaaaaggttttataaaaagaaaaaccctaaaaatcccccttccctctcttgggccgaatccggcccatctccctccccctctctcctctccccctcgcggcccatccggcctctccccgcgcgcgcgccgctgacgggcgggcctgcccgccaccctcgctgacgggtggggcccacccgtcatccccttcctcccgccgctcccgccgctccgcccgcgccaagcgccgccgccgccgccgaatccgccgcatcccgtcctccccacgtgcaatcaatagggggaattattctccgtgattccctctccctttccccccaaatttccctccctttctcccttggattcgtttggaaaccctcccctaatcccgccggcgccattgatggagcccgagagcgccgcgccggtttccttcccctccggccgccctctcccccttccaaccctatataaaccctccccgcgcctccctcgcccgtttccgcccttgccgcaccgtctccccaccggaatcgagttcgtgccgtcgccctctctctcctccgtcgtcgacgacctccggctggccttctccgctcgccgggaccgtctcctgccccggcgtcgcctcctccggcttcgccgcaccgccgtcgaccccgtccaccccctcgccgagcccgcggaccgccggaatgccgtcgaccccgttgacccgagccgcgccgccgccttcctccgctccggccgcctttttcgtcgtcgctgtcgacctagggtgagccgaggaccgccgcctcttttcccccttcccttcccctctctcggccgccgctccgccgtgcctatggccgccgccggcgaccataggggcgcgggcgccgtctcccgccggccgcgccgagtggccgccgcgtggggcccggccgtcagccgcccacgtcctcgggtgcggctgacgcgtggggcccacgacgccggccggtgcgagcccgggtgcgcccggtccaccgtggaccgtgaggctgtctcgtgggccccactcccgtggacccagtccgcgcgccccctcccctcggctgacgcaataaagcttttttttaaattaaaatttaaatgaagaaattcgtaaatattcatttaaagagcatataaacttcaaatggccataacttggccatttgaactcggaattggaccgttcaagtctctaatttttccttaagaagtcaagaacccatttttgtgctttgttcctgcttgttatatggagtttattagagtaaaagcccttttattttccgttggtcgtgtagacgttgcagcttcggaagatccgctcttcgtggaggttgaagccgacgtttgggaaagtgagcaaggcaagtcacatcatccttgaacatattgaatcctagtttataaaattattttgatttaaattattgtattatcgctttatttaaattcccgcgttatcactgttttatctagccatgcctatgtacccttgttatgaccttattattgttattgttattattaccttgttcaccctagaataaacaaaacacaaactagtggacactctactcatggtaccactagtatgattttaggtagatgcttcgctggttaattaggcaacattaggtggttttacaactctagactttgggaatattcatatcacctggatactatggaatggttggattattggggaattagattcacaccgccccctctattcaaaatccccaaaagggttttaggctgtgcttggggtgcatggtttgaatagtagcacctcggccatataaggaccggtcttcgggcctgtgttgcaaagcactaccgtacttccacatgtctaatgggtaagggttagtttgtggctcaatctggttataaacaaaagtacacggatggagatggacaagttcgggggtcgatggacatctccagggcaaatgaaggctacacgagctgcggcccggtagtcgaagatgtcatggcacagggccggtgttctgctgctaggggctcaatcatgcatacctgtcctggaggttccggctgtaggtgggattgggtcggtactcttgtttatggataggatgggttgggaactatgtcacgtcttctgtccgtatacagtggtggtatgtggcacgtggttacacgtgaggaagatgtgtcttgtgggtaaagatgtacacctctgatcagggtataatctattcgaatagccgcgccctcggttatgggcaagccgagcaatgtacccaagttagtgttttaattcttaaaatttgctcaacaacgaaaatgtggaatggttggcctgggttggcttgggacgagctgggacccagggtcgggttgccagttcggtctgaatcatcgtaggccttgggttaaggcaggttcatgtgggttcacggccttgattaataatcttgtatagctctaggaccgtgtttacaaagtagctttgagcaactaagtgacttttaatgctgtttactgcaaaccctaaccctttatattatgacccccttgtactcccttgcatttattctgcacttatgcgtgtgtcttgttgactacggtggttgtattcagtcttgctcaatttttcccaaacccagaagaggagttcctggaagatgtaggctttggcgtctagctcgtgcctgccgtcaagcgcctgtggtcgtcgccctagtcttccgctgtttcccgtttgtctttgtgtgtgctgggccttcgccgcccatgtaataaagtaactatttacgcttccgcttgataaactctgaaatgtatcaacttttggtgttccttgcctcctgggacaaggaataatacatgcacataaggaacgcccgttgggttatttccggtcgtgacatatagagaatgaaggcattgaatttgatctggaagatatgttgtggcacgttgaaccagaggtcctaactggtagaagatgagggttggacaattgggaagcgttggagaaagcagcgaaggaccttctgtatgacgaagcgaaaggatgcgacaaggactattcgatgctgcgctcggtgcttgaacttctcagattgaaggccagaaatgaattntgggcacnaanttcaannatttnatgcatnttttgagggnnagccgtgnnaaacnnaacctnntaccaangaacacatatcaagtgtagaaattgatatgtccattttctttaggtgttcagaagtccattcatgtgaaaatttttaaaatttgtttggggggccccaaatttaaaanccttggtnaaccaaggcaaagaaaatttcgcgggatttaggactcttgcccaacatgtgggacgagtcggtacaagacgggtaacggagcctccgatggagaggtggtcgacaaagatgatgcaccggtggatgagaaaaaaaagattcctaggatggtggtgtggtacctaccagtgaaagatcgcctaaagcggctatattccaaccgtgatgatgccaagttgatgggatggcactaggagggtaagaaaaatgacggtaagattcgacaccctgccgatgctcgactgtggaaaaactttgaagcactacacctggaatttgcaaaggacccgaaaaatgtaaggtttgcattgagcacggacggaatgaacccgttcggtgacttaagccgcacacacagcacttggcaagtgctgctaaaccgtgtacaacttgcctacctggatttgccagaagccaaagtatatttttttggctatcgttatacaaggtccaagacagcctgggattaacatagatgtgtttctggaaccattgatggaggacatgcaagaactgtgggaggaagggttatgaatgtgggacaagtaccgtagggaacattttactctgcatgccatcatattcgttacgatcaacgacttaccggctaacttttcgctctcgggccagtttaagggaaagttcagatgtctcatatgtatcgacaagatgtcgtacaagtacctcacctcgtcaaccaagggtgtgtacatgcgtcatcgtcggttcttacctcagaggcataggtgccatgtgaaggccagattattcgacaatacagtagagaacgatctagctccggaaacacgaactggtggctctgtcttcgagctgacaaaggatattaaggttgtgttcggcaagccaaagaagaagcccatcaagaggaagaaacggacggatcaggaaaatactgatgcacctgtagaggaaagtaacttacttttaagaagc

SEQ ID NO: 7660 - DNA, 6237 bp, Oryza sativa
cctgcagcccgttgaatctgtgttaattggttgataactccaaactcccggacatgtagataaaatctcaaacttggttctggaaaattttggagtagattgtggcggcgatggagaagccaaaattgccggagaaataattggagttgatgaagtagaaagcttgctcggaagtgaagacgaagatattgactcattggcttgttaattgattgcttcatgttgacataacatctgtcgaattttgagtcttgtatttgtgtagccccgactctagaactgaagcttcttgttgtcgagtggtcattgcttaattgaagatacgtgttgaagatgtctgagtagaattcttaaaaattgtagaagcaccacttgttgtagtaaaataacacggcatcatatttcgtgatgcatgccgagatgtcgaggctcttgtagacgtcgtggttggtgaagtagcaaatcttgcgaagtaaaggcaatagagtttgccggtgcaaaaaacaatgaaaatgtagtcgctccaccatggtggtaaagttgcatagccgtgatgacgtgaagatgagtcggcggcaacaaaagcaaaccggtgcgaagacgcataatagtgaagacaaaaaatcagttgacggcgaacgagatgactggtggagaagatgacaacgctaattaacggtgaagatggcacgtagccttggatgcgaggaaactagtcggcgtaggacaaggcggtcaacattgaagacgaagacgcccaacagtgacaacagagttgtgcagccatggcggtgggataatcattcggcaattgacgaggcgaccgtagtggtgatgaaaccagtcagcgatggaagaagtagaatgatgatgaaaacgaaaacttccttgaagccagtcgtgaaagtgaagacaccttggacgacggcgaaggaaagctggtggtgaatacaatgatgaccatcgacgactgtgtgaccatcaagccatgtaggggaaaacaccagtcagcggcgacaaaggcaagccggcggtgaagacgaagacgtttggtggagaagatgataactccaataaatgatgatgaagacgcgcaaccatggaggcgaagaaactagtcggcatcaaaagataggtattagtgaagataaaggtgtccagcagtgacgacggagttgtgcagccatggtggcgagataatcagtcggcggtagacaatataccagaagtgaagacgatgacgcccaataatggtggtatgaccaaccaaccatgtaggcaaagacaccagtttgcagcgacggaggcaagccgatagtgatgttgaagatgcccatcaatggtggtgtgacgaaccaaccgtataggtggaaacaccagtcggcggcgacggaggcaagccggcagtgatgatgaagatggccatcaacggtagtatgaccaaccaaccatataggaagaaacacacgtcggcggcggcgaaggcagccgatcggtgaagatgtagacgcccaacaacggtggtgtgaccatccaaccgtataggcgaaaacactagttggcggtgacggaggcaagctggtggtgatgatgaagatgcccatcaacggtagtgtgaccaaccaaccgtataggcggaaacaccagtcggcggcggcgaaggcagccggtcggtgaagatgtagatgcccaacaacggtggtgtgaccatccaaccatataggcgaaaacaccagtcggcggcgacggaggcaagccggcggtgatgatgaagatgcccatcaacggtggtgtggccatctaattgtataggcggaaacaccggtcggcggcggcgaaggcagccggtcggtgaagatgtagacgcccaacaacggtggtgtgaccatccaaccgtataggcggaaacaccattcggtggtaccaaatgcagctggtcggtaaagatgtattcgcccacaacggtggtgtgaccattccaccgtctaggccaaaacactaatccgcggcgaccgaggccaacccgcggttatgttatgactgatccattcctaaagcgtaggggataagcttaaagccatgaatccctattatgcatatgtatatctagatcctgcagaataaacaaacatataggatgggtagtatctgatgtaaatacagtacttgatgaaagttcaagtattttaagatgtttataaatatgtatatctcctcttgtcaattttgatttccctgagaagatgactctttacgtttaaacactctgcccgactagtcatagtccccaagcaccggcagtcggccaatgcacttcccaaacatgcatatgagtgacatgagttcgtcattaatggaactgagtttcatggatcagaatttactacccgggtacttttgcaattgttaagagcagaaaataaattatcttatctctatgcttttgatttcttccaagtaatacttagcaccttgcgttactcggtctatccaacgagtccccgggtgctaggaatcggcccaaaggcaactatccatagacaaaccaaacggaaagcataggaagatagaactccataactcgatagttactttatttttacttggatcatttcgcaagcaatcaagataaatattatgaaaaattgttgaaaaatatgatataacatccgtagccctcgactcactaatcaatggagaaccaattggtgtagtgaggcagcggaaaaaaatatcaaataaagaagaaaaataaatggtgacttagctttttagtgttcccccggtaatagcagatgtagccgatgtgtggagaaagtcgtccatcaatcccaataaaaacaccagtcggcggcgatggcagccgccggaagtgaagacatggtcgccatcaacaacggcagcggattacaccaaccgtggaggcgaagaaaccggtcggcagtgatgacggcggccagcgatgaaggtgtagatgcccaacaacggtggtgtgaccaaccaaccgtgtaggcgaggacactagttgacagtggacgaggcggccggtcagtgaagacgatgatgtccatcagcagcggcgcaatatgccagccgtgaaggcgaagaggcttgtcgacggaagatgaggcagctggcagtgtagaatatgtcattatcagccatggcgataaagacaacatgtttggataaatccaatacacggtatggtaggcggagcctgcagcttgattaatgtcatcggctgtcaccacagcatttgataaacaaaggtgctggtgatctccgttcccgtgcgtgccatcggctggcacggcatggcttgacctcaatccgtccgatatatgcaaacacaaaaaataccaggatggtcaatttattagtaataaaaaagatatatgccttacagtctgattagagaaatcatgcatgttaattgatctctatattgatctcatagaggcttggacgtcagatcagatgcatccatgttgtccctgtaatgcacgaagcgttgttgaaggactcggcatcccaggaggcagctagcttgatctcaattgccgtcgatatatgcgtgtcaaacaaaaatatgacgaagatcaatatgtgtgattaaagatcaatctaacaaatatgtattgaaacaacaaacccggttattctcacgatgtcaaaatccagctgaagcgaaggaccatgccggagatgaacatgatactggtagcactagatattaattccatcacactttgttgatgggaaactgtcacggcagcaacatctgtagcagggagttcaaagcagaagccagtgacccagcctatgaatcggcctagacgggagaagcagcccaactcccatttccctgcaagtgtgtggaccaaatagtaattggctgggccactgtcagtgagtgagagaggctgtgtagtgcgatgctatataagccggcaggattgagaggaaggggatcaaatcatgtaatcgaacaaactcaaattcaattccatctctctcctgttcaattctgttctgttcttctccttcttcttcttcctcaagccatctctctcaatctctttccttctctactcgaccgaatctctcctatgaattcgagaccgtgacaatttggtatccagagcaatttcgatcctggagaagccacgatatacttcccgtttgcaacttcaagtcgaagcgatggaggagcagaacattgatttcggcaaggtgttgatggagatccaggagtccttggtgacgctgaatcgtgctcaaggcgaaactcaagcagcgctcgtcaagctagatcacggagtaagcagttggagacctcaagtagaagcagcagttcaggagctacatgaggaagtcggcgatcttcgtcagcaactggatctcgtcggcaaaatgaagcaggcttctccggtgatgtcttcccctcgagttccgttgatggacgaggaaaggaaggcgccgccgctgcctacgccgccaacttcatctcaagctgccacggcggaaggtggaagcaaagtggccggtggctgactgcatgctcatgaacaccggggaagggtactggggatgaacacaaccctaggcccgactgcggtcaagggtgcgtatgaatctccttccacatctctgaaaaattttgatcaatttgagtttgggggtggggaatatgatggggatcagtttgggcgtcagtataatcacagggttcctaagttagatttccctaagtttgatggaacagacccagaggattggaaaatgagatgtgaacatcattttgatgtgaataatacttttccagggttgtggattagaatagccacaatttatttttcgggtagggcagcttcctggttacgatcttctaaggctcatgttagatttcctgtgtgggagaatttttgtattgctgtgtcacacaaatttgatagggaccaacatgaaactctcattaggcagatggatagtattaagcagacaggaatagtttgggagtattatgagagatttgatgaattaatgaatcaattgctgacatatgatcctcttctgaatatgcgatatctaacacatcgttttactgagggactgtgtcgagaaatcaggaatacagtgctgctgcaacgtcctaaagatttggagaatgctttggcagtagcaatgttgcaggaagaagtgatttccgaggcaacgacagggtcagttccaaatctgaagaaaagtgatggtggaaatttgcagattcggccaaatgttgcattcaagggagcattaccattaccctcgcctccaaatcgtggaagtggctctggtgttttgaatcgatcagaggatcgtaagtttcttcacaataccgagactggtaacagtaatgataaaatttctacactgaaggctcagcgtagagctcaggtgttatgttacatatgtgcagtgaagtggtctccaacacataagtgtgcaaacactatacaactgcatgcagttaaagaattgctcacagttttgcaatctgatttgctctctgatccggatattttgcaaaggaaatgacggtctggacattcctggattgatgtcaatttcagttcaagctatacaaaggctttgaaacagtgggctgtatgagaatgttgggctatgttcagggtaaagaagtgctcatattggttgattcaggtagtgcaactagctttattacctctaagattgctcaaaccttgcaaggcgttgtaactcttgaaccacctgtacaagtgaaagtagcaaatggttccatacttacttgtctttcttcagtactaaggtgtgaatggatgactcaaggatgggtgttttatactgacttaaaggtgttaaatctgggaagctatgacataattttaggcatggattggttgatggctcatagtcctatgcaggttgattgggttaacaagctcttgacagcttcctggagaaaggcatccgatacgttacagggtattttgtcagaaactgaacagtgtttccacttttttttcccaccgtttttggagttgaaggaaagacaggccatttttcacctgaatcagttgggccacatcagattttcagacaaggagcaaattccagtggaaattcaacaagcgctagcagagtttgcacaggtgtttgaaaaaccttttggattaccaccggtcagggtttttgatcatacaattccactca

SEQ ID NO: 7661 - DNA, 10601 bp, Oryza sativa
ccgtgctcccacattgcatctgcttccggcggagtggaggtaggtatgacccatcccatcggagggtcattcggacagcggccattgcaaatctccacccattaatgaaggaatgacagggctatcccctgtgtcaggcgagtgacggcgcaaggcctcactcaaggacaagctgtgatttagcttccaggcgaaggcgcgagccaagttttggtcaagatagggtgggttcccatccaaaagaagagtaggtaaaaatggtgcatgtggtatccccttgagatataaaaggaggaccttgcccaccgaagcaaggggacgagaaaaaaaagggagagactctcagacgactctgagaatacctgagctcgtagaggagagaaagaggaagaggggttctaaagcctgaactctcttgctctccggctctctgtaactctttcacacacagatccaccagaacacaggagtagggtattacgcttctcagcggcccgaacctatctacatcgcccgtgtcttgtgcatttgctctctcgcgaacattccacagatcgagggtgaagaacctcacttagcgcccccggccgaaccggcaaaggggggcctgcgcggtctcccggtgaggagccccacgctccgtcacacctattacagctccaagtccaactgtaaccaaataggactagtgtattcgacacctattctaacagaactagagatggagtatatggatgtacaaatcacgaagcttgacgagcaggatgcaaataatttaaatttcaccccaattttccctcgtggaatatgacattaaggaaatccattcattttattatggaaacctcccgattaatattacaagatgacctccttagagaaacgcacaacatccatcacacacttgatcaatgaacttattacaatactgaaatactgcatggaactaataaatgaagaaataaacatttcctttctgagaactaaacccaaaagctatggaatctcagcaatgatcatctagcactgtggcaagtccgatggtggtggcggtaacgatgtctcctgcgttggaccgttctgaacctcaaacaccatgccaagcccgaactctagatgagcatcgaagtggcagtgcatgaaccaaacccctgcatcaaacacacaaatgtcaaatttgatttcacaatagtcaagtcaacgaaatgatcagaagaaaagaaattctgggttgtagctagttacgggtcatcttccctatgataactaaaaacgtgcaattttagatgtcgacagtctttggaattcaccgttgactattatcaaaaacacaaactctgataaaaatcgtatattgtgacatattttcaagcaaaaattactgcaatcatctgcatatgcgtataatttaaactgtttgaatatttacattgaaagttttaacgagacattaatttggcattaccacgcgtgtgatacacttataattataattaatagtactccctctattccataatataaagttttaaaaactaatatttcactaataattataaccatatgaaagtaaattcaaattttaatctataatattattttcagcaaataaaatttagttcatattatattgattgttgatcgtgctttaaaagttgaatcttgaaccacatgtgtgtcttatatgatgggatggagagagtatatgattttgtgcaaatatatacctgggttgtctgcaacgaagcggatgacggcccagccgccggtggggacggcgacggtgttgcgctcctgcggatcgacgaggttgaacttggccgggtccgtcgtctcgttgtagttgccgaagccctgtgcgaggacgaagaagttgaagccatggaggtgcatcgggtggctctccttggacaccagcctcgtgttctgcagcaccatctgcaccgtcgagttgtacttgagcgtcttcaccttggtcgacttgaacgtgtgcttcagcgtcgcgttatcgtccgatgcgtcagcggtgtagtcgaagacgatcggcggcgtgtcggggaagtcgcgggtgtagacgccgtcgatggagcccttgtacatggcctcgagcatggaggttgtgttcgggaggatgaaggaggcgttgttcatgctcgacgcgaagatggtccctttgtcgtctggcatgcacatcgtctgctccggtccgcagaaggtgtctcccatggagacggtgacgaacatgtgggtgtcgacggcgagcggcacacggttcggcaccagcgccgtcatattggagagaaaccggtgcgcggtggccgtgtcgttgtactccggcatgtccggcaccatgggtggcgaggtcgccgggccgccgccgtactcgacgatggccgtgctgttggtcaggctgtacagaaaacttgggtcggcagcattaacggcgctgttgtacgggatgaccgccatgtagtagcgccctccgacggccgcggcgacgccggcgtccggtaccaggagcgcgtccaccgtctgccccggcgagatgaccaccacgtcggtcttgtacggcttggtgtagcacgcgtcggcggccaccacgttgaagctgtggttggccaccttgaagaagagcggcgtgttgagcgcagcgttgatgatccggagcatgtacgtcttgttctgcttcagctcgaacttgtgcgtttctgccagcaaaaaaaaacacatcaaaattcatccaagacacatctcgattgccatgaatattgcatgtgatcgatcagcaacttacggttgggggcagagcagttgtagaaatcgccgggcttgccgttgatggtgtacgcgtcggcgtggggcgccggattgccagtaacgagggagcgctgctgcaggtcgtacacgttcgtcttccaccactcaccgaggatgaccaccacctcctcatcgggcacggggaacgggtaggccttggcgccgccgcgaggtttgatgatgagcgcgccatagacggtggcgcggaggaaggaaaaatgggagtgccaccacagcgtgccctcctgcccggtgacgttgaaccggtaagtgtagttgcctccgggacggaccggacactgcgtgaccatagccggtccatccgcccatggcgtaccgcgctggaagataccatgcctgcatccaagacacaattgatgataatccttcgttcaccgtggatgaacgtagatattaattttaccgttcttgagaagataaaatattaccagtggatggtcatgttgtagggtgactcgttgaccatatgaacaaccaccgtgtcgccctcagtggcaacgatcgtcgggccggggagctgaccattcactgcagttatgatcatttcctgctggcatagctgactaatggagaggttacctacctgctcagttcaaaaatgtaagattaagacatggtttagttcgatcacctttgacaagtaacccctccttgaacacaaatgaagttctactccctccggtcaaaagaatatatttttttttcttgtgcaattttgcacccattttttttatcgtaacaactaacgagtacataaaatctaatatgttaatgtgaagaatcttgtcacaccagttttgcagtttcaaactaaaattcttaaacatattaataatagtccatatttggaaactgcaggaaatagtattaaaatttatgtatttgattccaggagagttttttttatgccatgtctacgtcttgagccaaaagccctatctcatgaattaaagataacagtgttcatgcatgttgcgatatatatgcgataaaatagaagaaaaaaaactgcatgcataaatggaagtatatgaaaactagatagaatattacattgaaagtgtactccacaacagcagcttgagcaacggaagcaaccaaagcaagcgcaaatggaagaagaagaagcgaccatgatctcgccatattatccttaactatttgtgtaccaaatggatgttcgagatggacaggtgacttcatttgattttggatgaagtaaattatggttcaagatgaactatttatagagatgttggggctgactggttcaatcatcaaggaagacaattaaacagacttgaaatttcatgcttaactacagagaaagaagacgtgcttagattcttttctgctgcttcagaagttttatttctctgcaagtaattatggaggcagttaaaaattcctatatattccttcccaagcttagctttacttgctagctagttacgcacatgcttatgttgcttttctttggaaaaggttgactaatcaatgcttctagtttagtactcatgtatgacgatagcaatatagtagaaaaaaaattgacagtttcatggttagtttggtgtggtgcagattccatatatatggtgctgatgtgatgacataattatagaaaagtatgtgcaaaacttttggccgtcgagcacatctgatatccctgacagttcttggacatctcaaacaacttcgacacaggcgatttttacgcaggagctaacccatacagtttctcatttagatgtatactccctccaaatttataattcttactgtaacacttttaatatggacatggtctccaaaacatatattaacaacgattttttaataatatataataaaagaaaaattttattttattaaagtacactgtctctacttccttcggttccgtaattacagatattttagttaaggatgagaggtgaaacaattagaattttaccaatcaataactttaaaattatttactccaggtatgtatttaacgtgaaaattgtgtggcaccgtgtatggatttacattaaaatatgatatatttttttgggtttttttagcccgaaaaatcaactcatggacgcgcggctggaatcaacgtgtgtgatgatccacatcatagaggctttttatccgtgtaagtgataacccacataacagacgtagatacagagacgttgtctctcgtgtttgtgttacgtgcccgtaatattgggggcatgttgaatgattaaaatgtagttgttgcttagggccggtatcgttatgctttttgtagccttgccaattttcggcaatggtagaattgactattgcagatgtttagattgttactccctccgtttcagtttataagactttctagtattgctcacatttacatatatattaatgaatttagacatatatatgtgtcaagatttattaatatatatatgaatgttggtaatgttagaaattcttataacctaaaacggaggtagtaccatttttttttaagtaagagttgctagctaggctagctagtgtttagtttcctactaaagagtatttcgtcgtggactaactaaaatcaaccaaaccaaaaaataggcagtcaaaaatttggctacaaacaaaataaggcataaaattttcagcaacaccattattttcgtatggttaagtttgtgaggcaaagaaccaaacaactagatcttaatgtgatataatttgggtaaaacaagaaatacgacagggaacatatcctatgcacataacatttccatgcgcgccaactagcaaatgtcatgaaaagttctaacatatactcttaatagtattacacatatatacatatatatatatatatagcaaagtctcatattcaaatttattatattttagcctaaaaattgagaaatttaacaattttaagagtagaaatctatcagaattttatcttccttttgtcacggctaaaatataataaatttgaagatcagatttcacacatgggccggtgtaatactattgaaagtacgtgtctatttttttctaaaattttctgtgacatttgttacttggtgtgcacaggaatattatgtgcataggatatattcacacctatataacgttggatatatagatgaaaacgatacgaaaactttatggagttcggactttttcggaaacggaaattgttgctcggatttttttggagtcttttagaaacggaaatgaatttgaatttttatatcggaaacggaaatgaatgtgataagaacagttttcgtcgaaactcggaattggttgagaactttctatacaatttctcgaaatttctagagttacaaaggcccgtactatagtccataaccataataatagcctagcccaatccaagttagcatcctattgattgtattgattgtgttttctgatataccgttgactactgagactagagatagtaattggacatgataaagttttaacctcagtttgagggggtcttgtattcagataaatttacgtaaccgtatccatgtcagttcttattcgctacattttttttcaacaatattcgattccatttttattctgggtttccgattttgattaaaaaaatagaaacggaaactatagaaatgatttccgatccgttttcatccatagtgggagtgcatccatatattggtagtcattctcacattattgtaaggcaaaatttactacagggcatcgaaaaaacgtgtaattagcttgtggacatcgcaagaatgagaatttgctgttggtcatcacaaaaaaaaacgtgtaattagctcctggacactctgagccttattttattatttaatgtgaatttggagagagaaacacgatgagagtacgattttgcccctgccctcacactggccagagcaccgccgccaccacctccgcatggcggccggagcccacgcaggccaccaacgcacgccatcgcatgcacttctgcaccgccgccgccagccaacgcacgtgcatgccgccaccgccggcggcagccgacgcacgcgcgcgctgctgccttttcccccatctgcgccgccacgccggaagacgaggaagacgacagcgacaaggacaacaggaaggaggaggccgtggggcttgagatgctgcgcatcgaccgcgcgtggaagtccgtgaagccgacaagctctgccagcggcagccgcgggctgatgccggtggagctgctccggcctgtggtcgccgccgtcgcatcgctggctcgctgcgtgcgtgcatgtgctgaggaatcgaatcgaatcgagggaggaagtggctggtgcgtggcggcgatggacggggacgccagggtgaggagtggctatggcgcgagggcgggtcctggtgctactactagtgctacgacgtcgtcgtcgccgtcgtacatgagcattgacggcgacgacaatggtggtgccggcggggcgaaggtgtgggtgctcgtgctgctcttcttgctgatcgtgctcatgttcttgccgtcggtggtgcggcgaggcaggccatggggaggagggggaggagagcaccatcgaggagggggcgggcttagcctcaagagcggccgggatgttgtcaacctctgcctcgtggcgttcgccatcctgtgcgggctgcttggccgcgccagacgacttgctgcctcgccgccgagccggctggaaagaactagctcggcgccatacacgaaagggaattcactgtatgtgcatgtgctctcgccctcccgatcaaaatttcccctcattttttttgtgatctctccatctctatattcaaattgttgtttgatccccatttctctcccttgcaattgcgaagtagctgccattgacacggcgggagaacgggatgctggcgtcgaggctggcgaggagcagctccgcgatgttgttgttggcgtcggtgtcgtcgatcaacacgtccgttagctccacgccaagggggtcggcggcggcgacgagcacacgtatgccggccaaagcgcggagcatcccggcgatggccgcgctccaccgctcggacccatcacaaggacagaacacaagtgctgcacgtgttcagctccgtcgccgcctccggccaacccaatgtgttgtctcactgtccaggtcgagacccaagggcaaacttgtctttatttagtgtttctctctccaaatttacaggaaataataaaataaggtcccgagtgtccaggagctaattacacgtttttttatgcccgacagcaaattctcgattttgcggtgtccacgagctaattacacattttttcgatgccctgtagcaaattttgcgttattgtaaaagaagggccatcatgatgtatgcaaagtggtcacctttgtcacatgctgttcaagtggaactagaagtaaagaaagacaagtattgtataacttattccgggcttctgagaaaaggttgaactacgaatgtcataactttctcatatgaactgcacctacgatcgcaagttatccagatgtgatagattggagcctaatcatgaaaactatcttccggacaatcattgagttcattgagtacgtaaaagtgattactacctccgtcccaaaataattacagttgtaggtatctgtatacaacgtttaaccgtccgtattatttaaaaaaattatgaaaaaattgaaaaaaaaatagtcacacgtaaagtactattcatgttttatcatctaataacaataaaaatattaatcataaaaatttcaaataagataaacggtcaaacattagacatgaacagtgtaaaactgtacttattttaggacggagcgagtacttatgtggtcttcaaagaataacatctagatctcctaaaacatgtggtgccaaacatcgaactcttaaaccattaattaattattaaaaattaggacttccatatgtgaaaataatattagtgaaaacgcaatttttttttctttggaacccaacatttgaatgtgtgaaagagagaaagcacatcttccttgggcagtcagccatcaaccttttcttcggtgtgctcagctgtcattatgtttatcggatgttacaactgcaaagtcatgcatacttagcaaaggtcattttattctatagtagcatatatcattctcaatttgaagaaaacataaaagtaaagttcatgtctaaatcaagattaacgtgtgagttaagtccttagaatttaatcacacgcttagctgaaattttaccggaagcatattaacatatatatgcgcacctccaattaccaaataatgttgtatatgtgtgagtactgtttgacctatgtatacttttcaagagtttgacagagaaaaaaaattaatggatcgatttgggcaaatatcctacagctattttccttagagagtctgcaatacagctcatatggctgtcatcacgtctctggtaaacctaatccttatcctttacggaactgtccacacccttctctttcatccttgtattggataatgggatagcatatcgtcacaccttgccaacaaaccgccctttcactaccaaagctacctatgatctaagcttttccaagttatcggatgatctatttgttggacccactttgggcaaccatgctcaaaccaaatgcaagatcttcctttggacaacgcacaagtgacgtgcaaaatcaaaggtgtttttgattattattctgtgatgaacaattggcataggagattatttgtttttttatttagaatttatttacgaagtggttttggagatgattggattttacaggtgaatctacaggatactgctgttattttttgtagacctgtcagaccgggcatgtgctgctggtcagaccggcgtgtattgcgcggtcagagccttgttttcttctttggatttttatcgatctagagtttttgccatggctactcctgttaggttttcaactaagcctcatgttttcgatggaacggatttttcttattggtgtagtaggatgcaatcttacattatggctgaagattatgatatttggagaaaagtttctcattcttatgtgatttctgaagtaattaatactgctgctgcaaaaactgagtttgaacaaaattgcaaagctcgcaatattcttttgagtgggattaatcgttcggattatgattgtgttgcgcattttcaaaccactcatgagatttggattgctttgagtaactttcatcaaggaataaataacattaaagaacttcgtcgtgatattttcaaaaatgagtacattaaatttgagatgaaacctggagaagctttgtatgactatctttttaggtttaataaaattttgagtgatcttagatctgttgattcttcttatgatgctaattatctataatatgagatttctcgtcactttttgaatagtcttgacatgtctatttgggagatgaaagttacatctattcaggagtttgttaacatgtctactttgactttggattcgctttacacaaaattgaaaacacatgagatgaacattctttctcgtaaagttgattctaagtcgagtgctttggtttcttcttcttcttctttggatgttgatgcttctacatctaagccttcttttcttgctatttttaatgccacatccgatgatcaactcgaacagatcgaggaggaggatttgatttggctttggttgctaacagaattgctcgagctatgaataa

SEQ ID NO: 7662 - DNA, 10722 bp, Oryza sativa
  unsure (1)..(10722): unsure at all n locations
gagagagagatagccggggagggagggggagatgggccaagagagattcggcccatcgaacccgggggaggcaaaatagacttttgcggaggaatttgatttggaaggatttggattcggaattgaactcgacaatagatcggggatttgagatcttgagatggcacggacactagacaataagcaaagaaacaaatttcgcaattagggtttttaagagataattttcccacttggcgccacgacggaatcatgtcgtcgtctcccgctgttgtcttggcgccggtctccgtcatcatcgtcgttatggcgacgtcctcgaccagtattgtctggcacccgtcgttcgcgatcgttgtgatcgtggtggttgtcctggtctcggtcctcatttgagcggtctcctcgattttcgttatcatggtgccataaagagatatgacatcgagaacgattcacatcgagaacgataaaggggtagctcactgaggcgattccctccgttccgggttttcaccattggcatcgccagttggtggctgctccgggtgcgctgtggtagcggcctcttcgaacgcattgctgaggttggtcactgattcccgtagtcgttctgtccaacgcgcgaggtcatcgttcagaacgggatcgtatgggggtttccctcagtatagcgtggatggctctgatgtgctgggctggagtagtcaattgattctccgcttctgcgttggtgcgtgctgacgtgccaacgtcatcgatagccaatacctcccgcggcgcgctcgttgtcgatgacccatagtcttcgagaagctataagactgatggttcgtgaggatcgatatcgattaccccaacaaatcgatctgaagttggcgtcgctccttattccttgtcgttatccctgatggggacgtgtgactgttggaccttaggagatggagctttcatgtcgctgagaaagaccttgcagcttgagaggtcgtgattatttgtcttgtgaataggacaatagacatcacgagttggagagatacgctgaattccacgctctttgcaggcgcgaatttcatcgcggacgttgaggaaaacctagcaggcttgcaaagttttgtggataggacaccaggaccttgccgcttcggaagtcatcttcgtcggctcgtggttcatgtcggaatgacaaggtttggccgcatcagaatccttctcgagcttggatgtcatcgatgctccgttctccgtctcagcgggaggatttttcgacatggattcgccttggtttgtagcaactgcgttctcgtttccggtcattgagggaccggttgagatcggcgtcgtggtgtaaaccgggaagacgatttcgccgactttagtccacaccagcatcgttgaagcagggattacttggctgaggttggtgttgacgctgttgtcgacgaggctggatgacatagtagtagaaccttgaataccaagtgcccctacctggcgcgccactgttgacgggtggtacccgtagaccggatatagagggtattggggtacgttggtataaggatctacgtaatacgacatcaagcaaacaaaagacgaggattatactggttcagtccccttgataggtaatagccctaatccagttgatatgggattatatggtggaaaatacaggttacaaaggaaacaatggaacttgacggatccgacgagatcgtggtcgagttggttcgactagatcccggcgagttggctccttgcaggctccgacttcgtagactgtgagggttgtgttggctctgagattcgatgccccatgtcctctccgaggggtcccttttatatcgcagatcagggggtttccaagtagaactcggagatatcagaccttatacgacatattgacgacccagtcttgtccgagtaggactcttcccatccgtagactccgtgaaggatttccttagagtacgcaggaaatatccgtatgcgcatgggaataccataccgatatgtgacgtatatcgaagggtaaagggtatgcctaacccataaccctgacaccacgttagatgaagaccgggtcaatttagccacgtaagctaaaaccaccgtccaaaccgccatgggacctatattgcactggttttgatagttgagagacccattatatctagttttcttgttgaaggatgaaaatcggattcgttaacaagttaagggaccttgggtgaacttattccaaacgaaaatgcttctgaaacctgatgggctgttgttagttgatacatgttgaagcgtgttatctttgtggatgtctttttcccaaagcctagaaacacataacaaatttatagatgcaaaacatcaatagttgatcaattttgtaactgaagttgcacaaactgaaagagcatccatagaattgcaaaaaaaaaaaggaaaaagaaaaagaaaagaaatatgagctgaggccacccatgtgtacgtatgtgttccctgaatatttgatccatattctttcactacatgaacaaaagaatgttgaatctctgtgtgttccaaggtaattgtgacaaaagaaattgttaaaaaggtagattcctcgggatgtttccccagaaccatctgaaacggaattaatcctttcaaagagagtgagggtacatagaagtaggggcaattccttacatacccctaaaagtttgctccatcccttgcatgcccttgaattttgtcacatcccttgtatacccctgagatttcgtcttgatcccgtttatacccataccgttagttcaccgttatcttttttccaaaatggccatgttgccctttttatagtcatgtgatcacttcaaaaggctaaataaagcttaatgtgaactttttaaattttgtatagatagttgagcctaaatttcaaaaccaatatttattttttgaaatatttttaatagattttcaagcaagctttaacaaaattaatgaaactcatatagaagtttcaccgaacatttagaaattaaaactatatttaacttgaatttaaatataaataagaatgttttatgaaatttgatctaaatttttaaaattttaaatttaacttttcaaactttgaggtcaaataaacacattctttttgttgtttactaataaaatatttttcaactcgaaaattatgttggtgaaaaagctagcgcataggtactctaagtaggggtaatatagtcattttgaaaataacttaatagttaactgatggtcaactaacggtatgggcttggaggggatcaaaatgaaaactcgggtgcatataagagatacgtcaaaactcaagggcacagaagggatggagcgaaatttcaggggcatacaaggaattttctctaagaagtatgctgagtctataagaattaccttgaaggccaagcatgaaaaaaacacacccaataggtaatttgggccggtttgctgaatttaaatgtgtggatttgtagtcttctagacatcatatcaaagtcaccttagcaaaggattattcttaattacatgaccaaggtttggcataattggtttcaaacatcacgccaaaacaagtcggacaatatcaaccataggggctatacaattactatctgtatagaatagtgttccaagatcgttctcggacggaagagaaaaacaagttgcctagaaagttgttataggagattaatcggaggaaccggccttgtattgaatttatagttttatgttggcctgttgggtacctggcgaccttggttatgtatagtttatcttttctatatgtaatctcttaaagtactacctccgtttcaaattagtattcgctttgactattttcttgtaactttggccattcgtattattcgaaaaattaatacaaatagaaaaaaatgataaatcatacttaaagtaaatagttgataataaagcatgtcacaaacaaaataaataataattttataattttttgaataagacgaacgatcaacaattgtaaataaaaactcaaagcgataagtattttgggaaggaggtaagtattttgggaaggaggtagtatttattttcgttcttctcaatatacagtataaccaaatgaactcctgccgttcggattaattaaaaataagaaaaagaaaaagagaattaaggttttaactgccgacaaggaatatcgatcttttggtcagcgcgaactactgtagtaacaggatgaccatcaaccactaccttcatgtatcttgttactacaagcaatggaggctttcttctgaagcatgcatgctgactcagacgagaaaaaggtacagcatgcaaagttatgcaagtaactatactcgacatgggaaataacaaaataattgttgagcgaggtttctcacaagttgatcaagttaatttttttctcgctaagtgagcacataactaggtagattttttttttaattttggggggggttttggggggggnaaattcaccccactaaattttgaatcgaagactgaatttaaaggaaaaatatcctattatagtgaatcgtacgtattgatattgcttgtatagaaaaagttagtgggtttcgtaactaagtgagcagcagctcgtagaccacctgaaaaaatatttattatttgagccgtgctcgtatcgatggctaataatgttttcagtgataaacaacgtaccaatcgaagtgaagtgtccgtggtgattcatcaatctcaagatatacctacttagtctttcgaaaattctcatagggtagagtgcgtgtgattatagggtgagtgtgcacgtgttatgagcgcctgtgtttatacggtgtcttttaaagaaaagttaatttctttgtcagaactagttgtgctgcttacatttctctgtgacttcattgccaattgcacagacatctcacttgtactgcttatacattactctaggacttcacctgtcaatttcacacacagctcgcttggcatctccataaatgtattttagatttctgttggatatataattcaatgcaaatgaatattatctcgtaaggaacgttactaaatactcctatataatctagtcataaatatatgacaacatctggtactgaaacctccaagattttgactatcaatgaattttactccttcaggtcccaaaattaagtattttgattttttttcttgagtcaaaactatcctaaatttgagtgagttaatagagaggggtattaatatttactattacatcaaacaagtaaactaggaaaatatgttgcgtaacatatgtaatgatgcccatttgatatcgtcgtaaatattattttttctatgaaattgatcaagtttaagtttttttaagaagggtattttttttacccggcctctacatctaatcagatatatgcggtccttttaaattaggaacttagccctcaactaatccaatctgaaattcgctcccacgaagattttgaattcaagatcttggggtgctaattaagtttaagatagcttgacttaaggataaaataaaaaaatgcttatgttttgggatgaatgaagtagactactttgaacatataaatggtgtatgtggacctgtgtattgaaaagtacgttcataagctcataaacttattacatttataaacttattatagtaaaagttatgatcaaaatcaaataccatatataaaaatatcaaacagtgcatatttttaaagagagggaatatgaaataagtagtaaaaatcagattgacttttctttacgatgaaaatcagtttgacttctgtttgcttgggcaagtagattgcttgccgtattcttatattttgacatataattttctctttccacagtcaatgatttgtgatgaacgaaataacacattatgtagacatcccctttttccattttaacatgcgacaatcacatggagaaatgtgttgaaatttgaagcccgtacactgtacaccaaagaagaaaatttttttgagggaaactacggcaggtgtgaacaccaacctgaactttattcatatggtaaaaatctttacaaagagggagctttattcatatggtaaaaatctttacaaaaagggaggtacagagggacagggagaagaaactaaaaattaggatttagcgcccaagagtagagttgttgtttgcctacggcgtcgttacatcggtttgaccacaactcgatatagctggcgcagcgacgaaggactagcgtgttggtttcatcgatggagttgaagatcttgttgttgcagcgtttccatatgttccaaactgcggcgagtaagatgatgcaccagacctgtggggtcagagcattgccgggggtgggaggccccataggtcttcgagttgtgctaggaggtaacttgctgttcatcaaatccataggagtgccaaatggctgccactccggagcagcgaaggaagagatgttccacatcttcgtcgatggggcagaagtggcagcgcgcggaagttgctagtctgcgtcgcatccgcctgtcgtggtgatgatacgtcgtgtaggatcaaaacacaagaactaagccaaccagagggggggtgaatggttggtatacccaaaaaccaaaacttttagcggaaataaaaggtaccctcaaattcgacggattgcggtctgaccgaagtagttgcaccggtctgaccgcgtgatgaacgtcggtctgaccgatgtagatcgatcggtcgaactgccgagatgcctgcctctgcctgtcaccactgccggtctgaccgccgccttgccaccggtctgaccgccggtgagtcgtcggttagaccgccgaaacccagtgaaacacaaatcgaagaactcttaaaatagatgacgactttattgattatctctgtgtttgcaaagtgcaccaacagcactccttacaaaaatttcgactaaactcgaaaccctaactcaaaactcaactcaattgctctcaaaagcaatacagggaagcctcacgctccccctttatttatacccaaggtaggcagcctaaagccacggaacaaactcatactagaagtcctaaacaccttaggaaaccctctagtacaagacacaaactttacataaccaatcatatcaaatttggactccttccaaattcgactccgcatcccatacacacacaatacctccatcgtatgccatatggaatctacatcacccacgtgcatcaactctagcctaagtatcccgcatgatctctgaccaccacggacgtcgtcttatccccaagctgactcccggtccatcaccgcaaatactctcccgaggcatcgagtcacctacacatgaaatctatacctaaataaaaaatacataaggcttccggaaattattttggtacatttttttttgttatcgccgtttcgcttgatcgcggtgcccctaccccacccctcccgatctctttttattttcctttttatttccaaaaaataaataaacaatctaacttcctaatctctatctctactattataaaaattaaagatatttttgccggtattttggtaagtcatctatgtatgagtcggttttttaagttcgttcgcttttgaaaatgcatatctgtatttgagtcagtttttaagatcgttcacttttggtaatacagaaggaatcatataagaaatctgtagctcatgaattttgaaaaatatatatatccaagtgaactcccacagtgaatttcatcttaactaaaccatataacaataataagattaaaataaacttcacccgttgcaacgcacgggtatttttctagtaaacaaagaaaccatattccgagaccaagctatctctaacttgactcattagtagcaaacaacagtattacatacgtatagtatccatctagaagccataatcataaaacaatcacggatatccaaacaaacaacccggaaccgaaaccgacacagcgtcggccggtcagaccgcgggctgcaccggtctgactgcgcaatgcacgccggtctgaccagcagcacatgcccggtctgaccggtccatataaaataacagcagtatcctatagattcacctgtgaaatccaatcatctccaaaaccacttcgtaaataaattccaaataataaaaccaataatctccgatgccaattgttcatcacataataataatcaaaaacatctttgattttacaatgtcccccttgatgaacccattggcaaacacataaaaaatattttggtgtttggaaaaataaaaacaaaagtggtaaaaagcacacttcgtacaaatgtacacatcgtgctcgaaaatccaaaagaaaacttctctcacttttgaaaagaaagaaattcccaatcgaaccaaaaacaacatgctcttcaactcatttgcttctccaaaaattttcacttttcaccttgcttctcccaaaactcatctcttcttccccttttgacaatgatttcatcaagaataggaattatgttcattaatgttcaagagcttagcatacatatagcatatcaagtcatgtgttgtaataaaaagaagatgaacccatctataatacagcaagcgtgtattaaagtataaccatgaaccaaagattttacaattaaacttgaatcaacaatcaaaattcatgatttcatacgatttataatgcaacatcttaacaagcacataggttgaagaataaacactaaacacatatacatattgcattactctttctcaaataacctttagcacaaaataaccaagagaattttttaaccttttcttttcttgagcctttttgctcatatttttctcttttattccaggtacgtccctgtcgtcaagactgtttccagggattcggcacacattattttgctcacatcgaatacgtccttgtcgttaagactgtttccaaggattcggtattcattttttttttcatatttttattctcttttcacaatgagcaattaaagctatttgaggaataacaattcaataaagcatatatataaagcatttagaaatcaaaccatatgctagcatcaacattgcatatttgcataattcaagtagaatttaagtgtcatgcatcatctcccttaaaagcaaaatctaaatctcatgaaaagactagaataaagctatgctagagacaaataaaccttcaaagtattgctagcatgcaaaagaaaatgccatatgcataaacaaagctctcttttatcaatttttctcattgtcatactattgcttgataaaaccatgaggtacaaactccctctcaaaacatgccaaaaggatgaattattcccaattcaccacaaaaagaaaaacaaatcgattagaatccaaaggtttagtgaaaatatcagcaagttgcaactttgtatcaaaaaaactgcaattcaacatctcccttctcaacatgatccatcaaaaagtaaaaacgaatatcaatatgctttgtgcgtgagtgttgaacatgattcttagcaatgttagtagcactaatattatcacaaaagagtggtactttctcaaaagtaagaccataatctttcaaagtagataaaagacaaagaatctgtgaacaacaactagcagcagcaacatattcaaattcagtagttgattaagcaacactagattgtttcctagaagaccacgctaaaacctttcccattgtaaaacctttcgcaagcaaaaagttcttaagcctatcataccatgccgtaggagcttgtttcaaaccatacaaagttttagacaatttaaaaacatggttgggaaaattaggattttcaaaacctagtggtttgacataaacttcctcctgtataaaaccatttagaaaagcacttttcacatccatttgatacaatttaaaaccttttgaagcaacaaaagccaacaaaagtctaattgcctcaattctagcaacaggagcaaaagtttcatcaaaatccaaaccctccacctagctaaaaccttgagcaacaagtctagctttatttctcacaatcaaaccatcctcattttatttatttttgaaaacccacttggttccaataatattatgtccagaaggtggttcaactaaagtccaaactttgtttctctcaagattttcaagttcttcatgcatggcattaatccacgattcatcagttaatgcatgtgacacatcttttggttcaaaagaagcaacaaatgcagaatttgcacaaacatcatgagtcgttaccttagaccttgtagtccgctcacctatattaccaataatttgttccagcggatgttgtcgttgaatgtgcaaaggagcagcgacttctgaagttgatccacgttctgtatcagtactggtcgaagttgtaatctctggaggtccatctcgagcagcatcaacagtacccgaacccgacgagcctggtcagtttgaccgcacctcctgtgccggtctgaccggaggtgtgccggcggtctgaccagcctggcgtccggtttgaccagccgagccgaccttgtcatcgttgtcgtcttcgctctagttttcaaaaatagggccatcctccccctaaacctgtgacattatacctgcaatatcgggtctagtacctggactagcttcatcaaaagaaactgggctgcag

SEQ ID NO: 7663 - DNA, 5260 bp, Oryza sativa
  unsure (1)..(5260): unsure at all n locations
cagatatgaataagtgcgctcattatgcaaagttataacagaactctcaactctgaatattaaccaagctaaggcaggtaaaataatcacaacaaaggccttcaaaattttactcatgtaatcatatggagttctccaaaaaaataaaaagatcaacacatggtggttcccatcttggatcctgtgatctggtgagttgatcaatgaaaggattaattccaagcctgcaattgcatctgctcactctgaaccattggcatatatacacaaactggggcacacctagctagatatatgtagtaagtacatatatacacacggcctatgtgtgtgtgcatgatgcagaggcggcattatttgctggatagccttgtgtgcatctcgatcgatcatgtagcaagtgtgacaatgcacacactgcatatatatgcatatacatatatgcagcagcagcagcagcagttatactatatactagtatagtagttagctgtaggcttgatgaagtgaagaaggccatagcagaaagatgcaggaacacatactatgtgtaattacattgcatgcagtagatgctgcacaagagagggggtcagagctacatgtttgtgtaaggtgttaatgtccttaattggtatttctctttcgtacgtacgcatgcatacgtggctgcctgcctgcctgcacaactgcatatgcatgcatacttggcagttggcaacttggcatgcagagaacagttgaaattctggaggctgagaggaagctaattagctaaatcaagctaataactaagggttcatttcgaaaacataagaatagagggcacaggatcagtggcggagtgtcaagtccggatgactaatagtgttttctagtgatcgattaatttttataggtgtcgatggccatcgatagtagagacagcaacagcgaatcctgggcagttacccgacctgcccgagaggtggctctgccactacatagaattacaatgtcttatattaagaattcctatgggaattagaaatgtaggaatactctaatatagtcatttagacgatatgcagaaaaaacagagaaattatagacacaataagagagaactgtgatgtacaacctcatgttttgttttcttccaaaatttctatgaactagctcattccatgggttttccagaggaattttcggacatatatatcctttgttttgaatgagttcatcataggaagtttatcctaagaatttaaatcctctaaaaatccttcacattttccctttgttccaaagaaagcccaagtgttttttttccccttttcagggtaggttgggtgggcaattttaaatatttttacctttttcggttttatgtacacgagattcagaggtcatctctataaatgaatgctgatggatgatcatgttaactataggaatggattaaatattatatgaaaatttgaaaaacacccacaatagccgagttaatttgcatgtataggttgtgtttagttccctcaaacttccgaaaaccaattgcacagtttgcatgtaaatcgcgagactaatcttttgagcctaattacgccatgatttgacaatattgtgctacagtaaatatttgctaatggtggattaattaagcttaatagatttatctcacagtttaccaacggaatatgtaatttattttgttattagtctacgtttaatattttaaatgtgtgtccgtatacgtaaaaaaaattaaaaaggaactaaacacagccatagtattttagtttacccatatttatatctcacctccatcttcacgaattaataggaataatctcaaaggtgcatatgtcaatcagctagctcatgtgggatgcatgcatgtgtacaattgagcaaaccctactccagggacatctggtctaccgagaccaccacctaccaccgatgtcattacggatctgggattgggcttctcagccgtaaggncncagcgacacactctacactctgcggccaagtgcagagaacgagctcacgagatagaaatcaaaccacaaaaacatccatccatgttagtatcatctgctacactcctcattgccttcattatctttctctcttcatctcttgatcagctcttgacgatggtttagacgacaggccgtacggtgcacggctggtcatggccatcactcatcagtcatcaccaacggcgccacacattccgtcttgtactacaagattaattaattgaaaataaaattgtactacacgagatggccccggtgggcccacctggcagccgctcacagagttacggccgcagaggatcccgagccccccccctaaaattaaccaaccaaaccaaatcgcgtttaatttttcgcgcgcctcctctaaacccgcctagcttaaaccccctcgtccaccgatacactgacatgtgggcccacacccactgacatgtgatcgcccaagccgacccgggcccacatgtcatcgactcatcaagcagccagccaaccgtggtagagagattttttgaaaaaaactggaagccacgggcccctacgcctacacgtacccccctacccaccgggtccactcactgacgaggtgggccccactttgtcagccttcctcctcctcctcctctttctctctcctgccaccaccaccatggcaccagctcagctcagctcagacacccacacagtgagcccctctctctctcttctctctcctctttctctctcttggttgctgctgcgtgctgcggtgcagtgcagtgcagcggctgcctcccgaaagcaacaacagtcacgtcgctatcggcaccacccccacaaaacaccattgctcccccccatcgatcgatcagagctcagagaaagagagagagagccatggtggtcgtggtggtggtggtaactcggccagggtcgatgcactagtgacacaacgagtgcgagtgccctgaaaggggggaggaggagcggcttgagagggaataagctaggtggtggtggttcttggatcaatggcggcggcgagggcgccgtggctgtggtggtgggtggtggtggttgttggtgtggcggtggcggaggcggcctccggaggaggaggagggggagatggggaggggaaggcgctgatgggcgtgaaggccggtttcgggaacgcggccaacgcgctcgtcgactgggacggcggcgccgaccactgcgcgtggcgcggcgtcacctgcgacaacgcctccttcgccgtcctcgccctgtacgtcctcctccctgcgaagctcggtgttctttcctgggcagacatggcgcgcggcggcgcgggtggttgcgttcttgttcttgcaatcttctcttgtggtggctgttggttttttcttttcttttctttttccagcgtgcactctgtgcttcatgtgatttttctctcttgccgtgctcgctctggcattctgatcaggaggagcaaatagttcaactgttctgttctattcttgcctcccttttttttctgaataaaaaccttttcttggttggtctatttgtgcctagattgctgtgaatgtttcttcttgataatcttgttgttatcgtatatatctaatggaaaagaaacgggtttttcttgttatcttgcgtaggtctttggatattagtgaggctatcttgtttgttatgctaaaaaggatttttgtgatgagagtgtttccctgtgtgaaaaacaggaacttgtcaaatctaaacctaggaggtgagatctcgccggccatcggagagctcaagaatctacagttcgtgtgagtacggatatgagtagagagtactatttccccttgctttgcatctacctgagtttttgtgcatttgactagcctgtattttctttttataatcctgcacacttcacctgatttgacccctcatgccatgatgtgacacagttctttactattttactttaagcctgtggatttgctcgctgattagtttatttgtgctctaatgatttgcctctctgcagtgatctcaaggggaacaagctcactggccaaatcccagatgagattggggactgcatctccttaaaatatttgtacttcacctaatctaagtcttcttttattctgttactttttgtaacagggtgttctagctaattttttaattgggctcttttgattcttgccatgcagggatttgtctggcaacttgctgtatggagacatccccttctccatctccaagctcaagcagcttgaggagctgtaagctctactttttttaaatcttttcctaccttttctttagcaagagctatggcctatagctgttgagatatgggcacttcctctcccttctttggaaagttcaggctaatactgagacatcagagactaattgatttacattaagttttggaacatcttgttctagaatccagattatgatactgaacatcttgttggagtagtagtagtttttttcatggttttgcgatgcttgggttgtagtggtaacattttttctctctcatttattgatgcaggattttgaagaacaaccagctcacgggacccatcccttccacattgtcccaaattccaaatctcaagacattgtgagcctcttagtaccttactctatccgtgactatttacttctttggggttcttggacaaactgggtgatctgacttctacttgtttaactgtttttgtgttataatgtgcgtgccacgggaaacatggcttgctgtgtcattttttgcatcttaagtactactagttcttacttactgataaaatccttccttaattatcttggaatagggacctggcacagaaccagcttacaggcgatatcccaaggctcatatactggaatgaagttctgcaatacctgtaagaatcctataaaagaaaattgtctaactgttttagctggtagtataagaaggtatttttcaggcattaacactttgcttctcttaatcttcagaggtttgaggggtaactcactgactggaactttgtcacctgacatgtgccaactgactggcctgtggtacttgtaagtcatctcctctccctttggagatgttgctgcatattgtgcaacttggccttgttgacagtggttactgttcttaatctacagtgatgtaaggggaaacaatctcacagggaccattccagagagcatagggaactgcaccagctttgagattctgtatgttcttg

SEQ ID NO: 7664 - DNA, 26297 bp, Oryza sativa
cacttatgatgcttgtttttgtattctaattactgtgattcctaataggtagctgttagatcttgtttgtaaaaaggaatagctgttccatgatcatgtcaggcatctattgcctattttttgtagcatgatcaaagtaatcctgtcagtggccatctaaaacttttcaaggtcatgtacgaaaatagagtaattcgcacctgcaatgagttagttctctgtggtgtcttgggagtgagaaattacatggtagttgactggtcattgaaccgttcgtttgattgcttaatttccatgttttaaatcatgaaaattcatggttaattttgcaggctacaaattcgatgaacatgatcgcaattcaccccatttacggctccagtttgctcgttttactggccccaggggaggttcaggacctggtggtggtcgtgttaggcgttaagttgttcgtccttttatcaggtgatttgacaactctggctgctcaatgtttttttagaaacaacttgacctcaagttcttcggtggaccagataacatgagtcaatcgcttttcctaccttgtaggcatgatcacatcgaatgttcaagtgaaatgatgatagttcgttggtcgctctagatatattactccatagtgctaggattggtaaccttctgttgttccaagttccaactttggtgccttggctttgtgagatgctttctgacattaactagttattaaacatcaaagctgaaaacaattcgtggcatcgtgcagatgtgatgcttatggccggttatattgggatatatatatatacttctggagacaattttgccgattaatgcgtgttgggagaattttggtgcacatcacatatttgtgtacaacatattatctcccttccgcgtggtgttatatttagtagtctgttctggtttctgatttgcacgactcggcatgcttacattgttttgctacttgtaatcctctcggagattctaaaatgcctcctctggagcgaaaggtagaaattttacagctgcttccatgactcagaaatttcacatgttttttgctgaaactagtttaattcccacaaaacccctccaaaattatgtggtaaatttagatatgaatacctttgaactattttgcttgatgtgggctatgtggcctaggcctgtttagattcaggggtataaagttttggcgtgtcacatcggatgtacggacacacatttgaagtattaaacgcagtctaataacaaaacaaattacaaaatccgcatgtaaaccgcgagatggatttattaagcctaattaattcatcattagcaaatgtttactgtagcaccacattgtcaaatcacggcgcaattaagcttaaaagatttatctcgcaatttacacgcaatctgtgtaagtagtgatttttttcgtttatattaatacttcatgcataagtccaaacatttgacgtgacagaaggtaaaattttgccaatgtgacggaaggtaaaattttgccagaatctaaacagggcctaacagcatggagcaggacgatcgcatcaatcaaccgtgttatcctgtacataataaataaataaaagataccatcgagccataaaaaatgctgaaagagacggcccgcttgcctctattgtaaggcttgtagcattggatcgaacgaattgtcctcctcacagcgacgcaattctcccaaatctgccgtttcattcgtccattagctgaaaaagaaactctacaatctatctataaacagaaggttaggtacctgtgtctcaattttctcactgatgcctacaggtccggagtaaaatttgccgcaccttggacatggactgaaccaaaactttgcagatgcaggcagatttttgcacaaaaagtcaagagtccacataagctactccacggctactagctacaaaggcaggcactctggctctctggcacactggcacagctcccaactcctcccattatccatccatggcgtcctcccatcaccaagaagtacaagagcaaggccatggagatggagaggaagaggaacaagataatagccaaatcacctctccactgtgtaagcacggcaaagcctagtcgtctcagctgttttctttttcccgccatggaacaccactagaagaaagcaaactgttctgttgcctgatgagttcttctcgtgcagtgcgatcctcaatgcggctcggctcgccggaggagaactcgccggtggagcaggtggcgctgacggtgccggtgggggacgacccggcgacgccggtgctgacgttccggatatgggtgctgggcacggcgtcctgcgtcgtgctgtccttcctcaacaccttcttctggtaccgcaaggagccgctcaccgtcacggccatctcggcgcagatcgccgtcgtgccgctcggccgcctcatggccgccgcgctgccggagcgcgtcttcttccgtggccggccgtgggaattcaccctcaaccctggcccgttcaacgtcaaggagcacgtgctcatcaccatcttcgccaacgccggtgccggttccgtcttcgccattaacgtcatcaccgccgtccgagtcttctacgggaagcgcatctccttcttcgtctccctcctcgtcgtcctcaccagccaggtagaggtgacatcaacgtgctgcagtaataacagtacaaggtgtcatgtacactcatgttcatgaacttgagcttcattttgtaggtgctgggattcgggtgggcgggaatattccggcggtatctggtggagccggcggcgatgtggtggccgtccaacctcgtgcaggtctccctcttcaggtaataagcaaatagtaattcacaataatttactctccacatgtgctataaatctgattattcagatatagcttgcctatgattggttaaaaggagttgaattgccacttgtaaagtaatctttccaccagtagaatacattttttttgcgtcgcatgatgtgtgcagccagttgcttgcaattgatgtgttaataaggtacagctaagtgctagactacccaaagataaccaaccaaccaccttcccaaatctcaaaaccaacgtcaacaaaaaaaaagatactttgaactttgaaggacaaataagggtttttattaagctggtgttcaagtcgtatgttgtgtgaacagcactgaatacgatggcactgctattcagcaatatgctaattatataaaaaatattatctgtcctatatcatggttttgtcattttcattcataataagcagagatatattggcacatcatgaattgtctaaaaagtagatattgacataatgactcaagcgaacaggaatcatttaccagtcaattcaataataaaacccacccagcatcatcttcatctgaattctacgcaacaattaggagatttaggcgacttggacactcagctatgcaagtgcatgctgctgcagaaaaccagaattccgtgtatttggagatatcctgagtaataaaagaagcagtcaatcaattttgacagataaaattcaaagaaagaaaacaagatatataaaatatcatatcacttcaattatagacgaagagcagctattaaaactataacaagatttttcgtcccaaaccaaggcataacaattttccatttacgaccaaggaaacaagatcagttacaaccagcaacaagcatcaactaaaccttatacaatatcaagattcatttgagtaaacccgactagacattttaaaacaagatgtttacttccctagaggcttcaatgatttgtcagaaaaacatggatacaatttgtctgcaaataaaaaaaaaggttcagcattttgttgagatgacacttataaatcataataaggcataaatctgtgttgctctgccaatgagtgaattcatctaaaactttcagtggcaatctgaaaagtgagcttaatagccatactggacacacttgcaaatgcagaatcaaattagcagtaaaataataactttctccgtagtcaaaggatggctaaaaaaaaactaccatagaaaagtgaataacagatttgctgcacatgttcatcagggcacttcatgaaaaggaacggaggagcaaaggcggcatgacacgcacccagttcttcttggtagcatttgtgtgcagctttgcctactacattttcccaggctacctattccagatgctcacttccctctcctggatttgttggatctttcccaaatctgtgctcgcacaacagcttggatcaggtctccatggccttggcattggtgcaattggactcgactggtcatccatctcgtcatatctcggaagcccactggctagcccatggtttgccactgccaacattgctgccggcttcttcatctacatttatgtaatcacaccaatcgcctactggattaatctctacaaggcacaaaacttccctatcttttcagatggccttttcacagtgactggacagaagtacaacatctctaccattatagactcacagtttcattttgatacaaaagcctatgagaagaatggaccattatacatcagcaccttcttttctatcagctatggtcttggttttgcatgtcttactgcaacagttgtccacgttcttcttttccatggaaggtatcctccccttccttctccctctaggtctattatgtaaaattagatacacagataaatttgtgacacctgtgtccagtgaaatttggcagctaagcagatcagcttttcaagataaaaagatggacatacatacaaagcttatgaagaggtacaaacaggttcctgaatggtggttcatctccatccttatagccagtgttgcaatcaccatgttcacttgtgagtattacatagaacaattgcagttaccctggtggggggtactacttgcatgtgcccttgcaattttcttcacccttccaattggaatcgtcacagcaacgacaaaccaggtaagaagtaaaagcataaaggcaaatgctaatgcacacatccaagtgtagcacttcagcttattatactgtatgtgacagactccaggcttgaatatcatcacggaatacatcatggggtacttgtatcctggacgacctgtcgcaaacatgtgcttcaaggtatatggttacattggcccacagcaagccctagcattcctacaagattttaagctgggacactacatgaagattccaccaaggaccatgtttatggctcaggtcagcttcactagtcacatgaataaatgggtgtattgcttgtaaaaaaggaggataagcagattatcattttattcagtgttgattatgtccctaatagcaattcaaaaatagcaggtggtgggcactttgatagcagcatttgtgtaccttggaacagcatggtggctcatggatacaatccctaacatatgcaacaccgagctcctccccccaggcagcccttggacctgcccttatgatcatttattctatgatgcatcagtcatatggggccttattggcccacgcagaatatttggtgatttaggcacttattctgctgtcaactggttcttcttggggggtgccattgctcccctcctcgtctggtttgcacacaaggcattcccaggtcagaaatggatcctacttgtcaacatgcctgtgctgatcgccggaatcagccagatgcctcctgccacttcagtcaactacacggcatggatatttgtagcatttttgtcaggttatgtggtctataagtaccgtcgtgactggtgggagagacacaattatctactttcaggtgcccttgatgctggtttggcattcatggctgtcttgctatatttatgcctaggactagagaaaatcagtttgaactggtggggtaatgatttggatggttgtccattagcttcttgccccattgcggaaggtataactgtacaggggtgtccagtggcaagtgcatagccaagtttcttctcatccacagtaccgccggcaatggtatctcaatcatcttaaggaggatgcaaagatcaaagaaccatgcagagaggctttaaacaactcaaaatgaagaccaaaaagaaaatgtccatatgttacaaggaagatgatactacaaggtgtaccgaatacaaaaataagtaaagttatttggtgcatgctaaattgttgccggtgacagaaaacagattatgataatagatgaactgaatttctgaaaccaacactgaattgaaagacagtagccatcgtccatagaaatagttaaagtctgaacatgattccacttacctgtaaaggtaacatcaggatcaccttagcctttaatcatcacaagaaccttgcaggaaaaagtaagaaattcagatgttacttttgctttgagggaaaatgaaacaatacggtcagcatgtaatcctgtatgaaacatggataatataaactgcattatatattgtttcattggaagtataaacagttctgattcatcgtcatgagctagcatatgctactagaatatggtgggaagtgcggtgctgttcacctactatcggcattccatgatttctcaactctataatacacacacacacacacacaccacgattgcaccagcttcagtgcagtatgactactcttacggttctcgctaggaaaataacagagaatgtgaatggacgggtgaatctacaaacgtactctttccgatccaaaataaacttagtgctggatgtgacacatcctagtacaataagtctagatacaaagatattcagattcatcatgtgtgacatccggtacgaggttggtttattttggaacggagagaggaacaaatacagcaagggggaaatcatggagctgttgcccgaatatacttaccacttgccatctcccgcaacaataggtgtactctgaggccttgagcaacacctggtggaatactggagatttggagtgcgtgatggcatcatccagggcgtgctacgcgccagcaagccgggtaggcatttggacgagcaccgtgtgagcgaaaccgacgccgcgccaccagtgtaactttgggaattgggagcacctcgagcgagcgaggccgcacgccgccggggacgaacaggagccagagccggttagcggaggaaggtcttcgcctagggtttaggaaccagaggcggctgccggcggagggcaaggggtgcgcgcggcgcaggagctggagaggtgagaagcgcgtgggcgtttggagaagaagcggatggtgaccgcgccggccgggggcgtgtggagcgcggcggcgaccgacgaggtcgccggcgcctgacgcggcttgccgcgtgtccttgaagatgggcctgaccgggccggccttttagagatgtgggtgggctggatgggctgcatttcgtgaggcctaatagcaccgtggaatacaattcagattagcggacgccaaaactgaagctcttcagagagagccaaaaaaagaagaagaagaagaagcaaactataacatctcttttggacgacacatcaaccaatgcaattcagttttgaattggataccatcaaaacaagagcaaaataacagatgaaagatggaagtataactttcagatgacacaaacttcaccatccatggagaaatataacacatgtttcatttcattctgattctgaacagagattacatgtagaatgaatgatgaaagaatttgattgtaataataatgttgtataataacagccggagacactaatagtgactgtgagagatgctgcccctgctaatctatctactgcttctttgctttctttcttctacatgcagctacattttgcaggggactctctctcaacagccaaaagaatatttataaagaattacaatctaaaaattgaattgaatttgatttaattgaatctttccacctatcaatctataaaacaaaaaactacacctttctttcttctttcttttctctgaatgtataaaagaattgtcatactgtatgaactaatcatcattaacaaaagaagcactgtaaaaaaaggctttgttctttctttctcttcacctaatcaccattcatcgtcagcttagctttgctgagaatgtgatgctgttgtggacgccgacacggtgctgcctcccgcgccgtcgcccgccggcgtccacgccgtcacggtgtacagcggctggtccagccaccggagcgtgagcgcctcgccgccgccgctgccgccgccgccgtgcgcctgcacggtgtacttgtccggcccgaacatcctcgcgatcatgcgcccctgcatcgcctcgcgctcgccgatgccggcgttcttgaacccgccgccgtcctccatgcgccgccgccacccggcgaagctctcgtggcgctcgaaccgctcggggccctcgaacgccaccgcgttgcggatctcccgcgcgaacatctcctccgccttggccctcgcggggctcgcctccggcagccccgccgcgtccaccgcgtcgaacgccgcggcgtagtaccgcagcgcgcgcgcgaaccgcgcctcccacctccccgagttgaggccgccgccctcgtgctcgccgaggaggaggatggtggcgcccgtgctgcgcgctagccccaggaagtcggtcagcgcggcgtcgtcgcggagcaggcggtgcatggcgaggacgcagttcacggccacgcactcgccgcgcttgacgtggagcatccacaggcggacgtcctcgagccggtcgaccacggcgtggaactcgaacgccaggccgagcgcggcggcgacgcgcgccagccgcgctcccgtctcctgcagctcctgcctcgactcgccgactccggtgatccgcacgtgcgccggaggcaccgcccgcgcggccaggctctggagcaagcccggccattggagcccctgcttgatgtcgaagtcgatgacgtggacgcgctcgtgcccctcgaactcgcggaggaggcgctcgttgagcgtgaagtgcaggaacctcgggatgggcgtgatggcgttgagtatccgcagcgccatggcgtcgtcgtcgccgccgccgaaggcgtcgtcggtgagctcccgcggcgggccgatgtcgaacatgtgcggccacatgcgcacgacgcggagcgcgagcgcctcggtgaagtaggcggccacgcggtgcatcggcgtgggccccgccggcgaggccatctcgccgagccgggccaggtagtagttggcggcctcgtggttgccggcggagagggagtcggcgcacgcggtgagcgcgcgcaccagctccagcgcctcccgctccgcctgccccggcgccggcacgccgttcctcgcgtcgaactcgggcggctgcggcggcggcatcatcgccgacgagccgccgtccgtgcccgacgaggacgacgagtcggacggcgacttgctgtactcctccttcttggccgcggccagcgatggccccgcggcggccatgccgtgcgggaacgccgccgcgctcggcaccaagaagaccttctcctcctccgcctcctctccttctcccgccgccgtcgcttgcatcgtccctgcaatggattgatggaaccatacctcatcgccgtcgccgcccatccgcgtccgcttggcgcgaacaatggggccatactcctcgaccgcgtcctcgtcatgcgcccgcttaacggcgcggtgggcgccattgccattgccgccgggctccggcttggcgccccaggacacggactgggtgaccggcggcgcggggtgcgtccggaaggagcaggtggtggcgccgctcctggcgtcgccggcgacccgcggggcggcgccgtcgccgcggctgccgcgcttggagaagccgcaggggaggatgtcgaaacgctgcgcggtgctcatctgatgcctcgacgacgagaacgagcaacccgccaacatcccggagacacgtcactcgccggaacgcgacgtgccaagaagagacctcctcctcctcctgctcctcctcctcctcctcctcgtcttcttcttcttcttcctcctctgtttctcactctgatttctctcacactctctctgtggtatctggctaaggctttggtggaatggaaatgtatatgattcgatgtacaaaagaatgagcagataaaaaccagatgatcttgttgttcttccaaagaatttggtcagtaaatcaacaaagaaaaaactgagaaaaaaagagagagaaataatgtttgtgagatcagatgggggctatgtgtttgtaagtatatatgcaggaaagaatgggtggcttcgccttagaatgcttagtacaaaagaatcaaagaataggatcaagaacaaatgggccctaaaacatgtagaaaaaacaaatcacgaacgatcggacatgccggggcagagcccgcacggcctcctcatcggcgacgacgacgacgagcagcaggcggcgaatcccaacaatacctccattcgtcaaaacaacaaaccaaaagaaaaatcaagaaccctagtagaacatcctaaaatgatggatgcaatgcgaatcaatggcgatggagatggagatgcagcctacaaactacgctatcctagtgatgatatgaaatggaacctactcttgttgcctcaccattaccactcctctctcactaacctctccggtggtggtggtctctgctctcactctctcactctcactcacctctccggtgtggtggaagggaagggaagaagaggccgggaggggcaacccaaggggaggaaaagagtgcgggaggcgcgaatctcgaggcggctcccacgccgtcggatcgcgaccggacggtgcgagatggggtggtccgggatgtgaccgttgcctgattgcctccccccctctctggtcaatgtgaccgttgcggtcaggtgcgacgcacgtgaccaccccccctaacgctgtcacgcacgcgtggacgcggtcacgcagcacgcccccgttcttttgttaccgttgggctcccaccacctgacacgcgtgtctgacgcgtgggcccccgcgccgaaccgacggcccagatcgcgtgagccggacgccacgcggtgcggccacgtcagcgcggcaacggacgctgagctgtacgtacaggctagtgtacagggtggggtacggtgtgctgtacgacgtactacgtggctgtatcctgcgtgtctggtgatgatgatgtttgtgtgtttgccaccgtcggatcgggacacgtacgcacgcatgcgtgtcccgtgttttggcgtcaatgcggggctcagttaatgatgtgccattgctgtcagaaaaaaaagtgtcattttggtacgtgacaaaataccgggtgttttacttgcagacagctattgtcattagctgggttagctgctggtatatttgttttggctactaagtaagctcgagttttgggtttgttttgatcttgaaatgcatcattgtgttgtgccaccacttttgagtcttaatttgtttcttcctcttacttgaaattttgtgggaaattacaagaaatgcgacggtgatgagtagcatcggatcaagctgtacaataaccgttacaattgaaatgactgtttagtacaaccgttatgcgttgccctagcttctactcctaaatggcaacattagtattgcctatctatgaaccactcgtacatatacgcctgtaatggttgatttgcatgatattttgctgtctaaatgttaacattagacgtcggggacgtaaattcaattaccaggttaactacatgtaatatttcacactgtagttcgcgctataaacaaacgttggtttgcttattaacagagtagtttatttcaagtttttttttcaaacaatgtatgtgaaccggcaagaaaacatgagattaaatccacaactgcagttcatagggtccacgtctaactactggagttactcataaattcatatccaaagagccatttgtatttcatacacacagcacctctctaacaggacgtatagtagcagtaccatccaggaacattatggtaacaataaatgaagtttcaatcggatgttattcctggcgcgagcttgaaatcttcaaatcgaaatcttaaaggcacatttcctaaatgtgtgttttatactaataagaatttaacttctcctctctcgtttcatatgtacgcatttcctcaattattgaacgatatgtttttataaaggttttctatagaaaaatattaaaaaacaaaattaatttagttttaagttttttatataatacttaatttattatgcattaatgaatggttctgtttgacatgcgcagcgagaagtttccaaccattttaccgagcacaccctaatttgctttacctaggccgtgtttagttccaatttttttttcaaacttccaacttttctatcctatcaaaatttttctacacacacaaatttttaacattttcgtcacatcgttccaattttaaccagactttcaattttggcgtgaactaaacacacccctagctaaccggagaaagtgtgaggtccaaagcaatagccgttattccgttacaggctttattacaggtcttcttatcgccggtcgtacgttggcccacaatcccggcccgctcaaatcttagctctaaccacgcggcccaacctggaatttgggcccactacacaactggatgttgggcctgatctgcgacaggtgccggcccatatagagtggatcgcggcgcatttaacctccttttccccaattcacggggcggctggcttgacgcgtcatcttccccgcgaaaatttcaaagcagccgaggagaaatccaaaatttccccccaaatctttcccggcacggcgccctcctgctccttccctcgcaagccacccccgccgccgccgccaccaaggcgcgaaatccaaaattcgcgcgcgcccgccgctataaaggcgaggaggggatgcctcctcctccacacccactcgccgagccaactccaatccccaaaccaccagatcgaatcgcggttgccgcggcggaggcgaggaggaagacgaggatgccggcggcggcggcggcgaagacgctggtgccagcccgcggcggcggcgacatggaggagccgctgctggcggagtcgtcggatcgcttctcgatgttcccgatcaggtacccgcagatctgggagttctacaagaaggcggtggcgtcgttctggacggcggaggaggtggacctctccgccgacgcgcgccactgggacgccgcgctgtcgcccgacgagcgccacttcgtctcccacgtgctcgccttcttcgcggcctccgatggcatcgtgctcgagaacctcgcctccaggttcatgtccgacgtgcaggtcgccgaggctcgcgccttctacggcttccagatcgccatcgagaacatccactcggagatgtactcgcttctgctcgagacgtacatccgcgacgacgtcgagaaggaccgcctcttccgcgccatcgacaccgtccccgccgtgcgccgcaaggccgactgggccatgcgatggatcgacggcggcgagcgcttcgccgagcggctcgtcgccttcgcctgcgtcgaggggatcttcttctcgggttcattctgcgccatcttctggctcaagaagcgcggactcatgccgggcctcaccttctccaacgagctcatctcccgcgacgagggtctccactgcgacttcgcctgcctcctctacgacctcctccgcggcaagctcgacgagtcacgcgtccaggagatcgtcgccgacgccgtggacatcgagagggagttcgtctgcgacgcgctccccgtcgcgctcgtcgggatgaacggcgagctcatgagccagtacatcgagttcgtcgccgaccggctgctcatggcgctcgggtgcaagaagatgtacaacgtcgccaacccgttcgactggatggagctcatctccctgcagggcaagaccaacttcttcgagaagcgcgtcggcgactaccagaaggcgtccgtaatgtccagcctcaacggcggcgcttcttgcaaccatgtcttcagcatcgacgaggacttctgatcacatcgactgccatagtagtattaaagtagaaatacatgttctcccaaagtgttcgtatggtttcttgttttatttgttctggtttgacatgtactcctgtaatgaatcaagtaaaaagtttctcaatacatcaactggtcattgcctgtatgcggtgtgttcgacgaaatgcttattagaactcatgccattctgggggcgcaaccagggcgttcgatgaaatgtctctgagcataagatgttccaagcgaaggagattgtgttggggaaatggattatggatcgcttggctccagccgcacgcgcgtcgcctgttccgtttctgttcaccaatccccttcccttcaatccttcccgaaagacgaaacgagcgccgcgccggcgactccaaccaaccgtccaacagaaccaagagttggagacttgctgacagctgactttagcattcgttttcccctgttggcctctcctacacatgaacacatctgttttagagctaggagagagtttaagagaaagggttcagatcggcgattcttgcagacaaccatggtatgattttcttgattattacataggagtacaatacaactaagggtgtgtttatttcacgccaaaattgaaagtttgattgaaattggaatgatgtgatgaaaaagtttaaagtttgaacaaaaagtttggaactaaactcggcctaatatatttttttgctgccttgcaaggttctaaagactatataatatatttttaggtgtttttttaagagattagagcttgccttcttcatgtttcgttgacacgttttcagattccagccgatttgcaatttgcaaatcaaggtactactatattgtacatttgtactactgttcttggtattatgtcagtcaggaagtatttatctagaagtgaaaaaggaaaaaaaaaaggaaacgagtagatgagttaactgaatcttaatgggagcaatcgagaagttctttaggaataatactgattcctttagaaatcccgatgaattggctttagttgttttcaacgagcaaattaatgacagttctagagaataccaataaggcaatagcatcaatcagaatgaagatgtcaataacttgagtgagcatgaaacctaacatgattcggctgatacaaattctgtgggtgttgatgaacaaccaacttttgctattgaatttttgatccaagaaattggggtaatcttgataataaagcaggagatatctaaataccgatttcagggtgcaatctctaccgaatcattgggccacgtggccaaagctaaaagcaagctcacatctcgttaaaatgtgccatgtgtccagaagagcacgttccattccgcacgactgtgaagactctagataaaacaaaggaaaaatccagagcattccaaactcggttgaaaatcacaccaaaacacggaaagaactggtgaaaaagattgcataccgaggaaacaatggagaagaaaaaaaagtgtctaaaaaagtgccccaagttttttaaaggaattttttttaaatctaactataatataattgtaatataattccactataactatactataacaatattataacttgtatataaggtcctttttagttggtgaaatgaaaatttttgggtatcacatcggacgtttgaccggatgtcggaaagggttttcggacacgaatgagaaaactaatttcataactcgctggaaactacaactatactatactatatattgtagttacactgcaactatactatagtaatatttgaaagtttttttttccaaaaaatataaacagcgagccgatgttagctgtcgtaaaccggcgacgaggaagacatctacaacagtattttccggatccacggaagctatttccaacgagcaagatccactcactcaacggatcaagcgaagggcgtcgagccgtaccagctgtgatggtccgcgagtgtggacgcatcaaccagccggtgagcgtcgaggtcgaacacgtccacgccatccacggtagcaacgaccacgacctcgagctcgaccacatccaggagaaagagagagggatgaagaagggcccaatgaggatacccagatttggaggatcaagggacgagggcgatgttgcctctgctaccatcatcttcctctttttctccttattctcgcaagcgtcatcttcctcaattgctcatgcctttctcccagcaccgacgcggcaatccggccttgttctcgcaagcgacatcttccccaacggttgtcgcctttctcccagcaccgacgtgccaatccttgttctcgcaagtgtcgtcttccccaaaggttgtcgagctgagaggtaaaaagaaaagaaaatattaaaacatgaggttttatcaacacttatcataaaacaaacaaatgataaccgtaatattgataagtatatgttaaatattataaaaataataggtatatttgttaaaatattattaaaataatgtgagcgatgatgattagatatacttacatgttgatttgtagaattaaataaattatagatgatgttatacgctagcatgagtttaaatatataaatattgcttttatctgtagtgattgggccacgtgtcctctctcacatggtagataaatctggagaacaccaaaaggggaaaaaatgataccaagagttgggcagttgtgcgtcgagtgcgaaggaaaaaacagggttgtgggtccaatcaatggcgtgcccacatataacttaccggtgtcacaggacaccgggtaaaattgttaaattctaactaatttatgctattttgattagtatactagtgaataattagataactactatgtagtggacctcgagtaatgtagtggaccccgggtaatttttattctagattcgccgctggctccaatcctcccttgcagatgaaaggataatctaaaaggatcgattaggcaatcagcaaatgcctctgtcaatggagccaatggtggccacctgctcaaaatgtatacgttcgctgtgtgtctaggagtacgagggaagagcatggctgtggcagctccagtcctctcacgcagaggaaggataatctggaagtatctatatatcaggggaaggagcaaatgcctctgtcaatggagctcacttgctctacatgtacatgttcaaagatagagtattctatagtacatttgcaaaaaatgttagaatgcatatacaactactcatattcatatatatctctataagtattttcgaaatattgagctgcatatcttaaatgaaaaaaaaaactattttatctcttcgaaccaattcaatggacactactaaaaaaatctatcatgagttaataacttaattgtaatttaaaaaaaacaaaggaataactaatggcatggatggaaaaagggagaaaatttgatgattttctcaacaatatgatctattacgttaaactggaactcaaaaaattccattcaactaagatttttttaaacttttatgaacaatgtgctaattaataacacaaaaataatatatacgggctataaatcatgcgcgccaggtgcgcatgattttctagttttagtggaaatggggcctacaagagaagaaaatattgttttttttgttgtgttcaacttatgaaaagtattattaggcgattggaaattggaatgacagttagtatgacttacggatgtttttgttcaataatataatgaattattatattcactattgcaaaaaaaaaagttatgagggcctctatctttatttcacccaagggcttccaagaagttaggactggccctgaataaaaccttcattggaatgaatggatgaattttcagtgtttgttttgtgagaatcgaactaatttcgatgatgatcctgtgaaatcttaaactattttctcactaattacttcaggctgtgtttagttcacatcaaaattagaagtttggttgaaattggaacgatgtgacggaaaagttagaaatttgtgtgtgtagaaaagttttgatgtgataaaaaaattggaagtttgaagaaaaacctttggaactaaacacggcctcaatcttcgtaaaatttctccgaaattcgtcaagtccaaaggctgcatgccttgctgaattctgtccacacaacaaacgctggtctcgtgtcatctccacatcgccggagaagaagacgatgatgacgtcgacgacgatggcgaggcccacgacgttgctggcgtgctgcaagctctacatctccgagagccgcaacgacgccgccctgcgcgccatcgagcaggcggcgcgcggcggcggcggcggcgccgtcgtcgtcaaccgcttcaccgacgacgcctacaaccgggtgggctacacgctcgtcgcgccgctcaccccctcaccggcgccgccgccgctccggcacgccgtgctcggcatggtcagggcggcgctggaggccatcgacttcggcgcccacgccggcacgcacccgcgcctcggcgccgtcgaccacatctgcttccaccccctcgcccatgcctccctccgccacgtcgccgacctcgccggagccgtggccgccgacatcggagacgagctccaaggttggtgctgctctccactcctcttctcctcaattttcacttcaagaaacaatctaatggcgagctcgccgctgccgaggccgcagtgccgacgtttctgtacggcgcggcgcaccgggaggggaggacgctggcctccatcaggaggcagctcggctacttcaagcccaactcctccggcgaccaatggcggggagcgccggagacggacgccctgcccgtcgcccctgacgccgggccggagaggccgccgagatccaagggcgtggtggtcgtcggcgccaccagctgggtcgacaactacaacgtgcccgtccacaccggcgacgtggaggcggcgaggcggatcgcccgcgccgtcagcgagcgcggcggcgggctcccgtccgtgcaggcgatggggctcgcgcacggcggcggcgtcgtggaggtcgcctgcaacctgctcgacccggcgagggtcggggccgagcaggtgcagggcatggtggagcggctcgccgccggcgagggcctctccgtcggcaagggatatttcactgatttttcccaggataaaatcgtcgacttatacttcagatcagcagccaacactgagggttaactgcagcgcgagtgaaaagtaaatctttacagaaataaatttgatatgatttcacagaaacaagctctcaaccagtggatcactgatgagttctaagttccaactcaagaaatgcaatcacattatcatgcgtaaaatttaccaaaaaaaacagaacaaacgaattgattcaacttaaacttcggtctctgctatatatatatatagagattacatctcaactgctggccagttgattgaactaatcatttgcatatcttgggctacttaactcctgactgattaagctaaacctttagtttgtaccgtgatggccacttgattgaagcggctagctatctctctagctaggctcagtgaagattttgcgagggaagctgagattttagaagaaactgagagtatgtctaaattttcagtgaaattccacgtttctctccattagagttaagtgagttttttaaagaaaattgttactatttccactagcaaggtatatgagacaatatatcgttttccaagtgttgtcactagttaccaattgtttcttacacttgccatctcataaacccactaacctcgcgttattaggtacccatatataaagaaaaataagcgatttaagcatataaactccattgcttagctcttaacattatagcactccctctctctctctctctctctctctctctctctctctctctctctcttataatagttgtataataatatgaaagggaagaagtgttattcgagttctcactttttcttttttctttttacttcaattcagcagactgatttttttatgacacatgatgtatggtatctcgttggcgtatctcagtgaaaactatcatgatggagaggattagaaaagtcagaatatcattggtagtataaaaaaacacatggaggcaactggaaaaggcacaaacaaatctaaccagacttagtttggactaatcagctcaggtcacagggagctaaatgcttaggcttgaacaacaactacagtaatcctcctgtccacttgtgaaacacaggtagaggagatgtagatccagaaaaggcattcttctttaactaaggctgagtttagatccaaagtttgaatccaaatttcagtccttttccatcacatcaacctgtcatacatacacaacttttcagtcacatcatctccaatttcaatcaaaatccaaactttgcgctgaactaaacacagcctaacctcaaattaaacaatcacaatggactgatccccagaaacatttcgatatccagagtcttcttgtgcattcatagaagaaaatattcagactttttgcagatctgaaccagcctttgtcagattgggaaaatagctgtttttgttgttgcaaggatagattcttacatacataccatggttggtggtgtcatgtagaagtagttagtttcagaacttgttggccggttgttgcctaccctgtttgtcactgacctggttagatatctctgaaaagaatgaaaaaaaaaagtattagctttgacaaacgcacacacccatccaataaaaaacaccattcgtgcaagtacaatcctgtggtctgtcattctgtaaatcaacaagaacatgagcagcaatttttcaacgagaacacaaaagatttgcgtgaataagagcaacaaaaccaggccaataaaccattcttgacacttgacaggatacagtgacactgtgttgttgcacatggtaatggcaatcagctattgagctcaccaagcactagcatccatgacactatgacagtatgacatcttgcagtttgcaacaggtgtccaccttccatctcaagcaagcacctttcaaccacctcccctctcttcctcccttctccacacgatctgaattgcacaacagtgaacgaatctgaactatctgaccgaggagatagcaaatttcagttcttgatcggtgattgattcagtgattattcccaaatttccagtagctggcaaaggggaggagaagtcagcggccatgctgctgcgtaccatgaagctcccgctccccgccatggccgccgtcgtggcgctctgcgccgcctcctacctcctcgccgtgtggacgcaccctgccccgccgctccccgcctcctccctcgccgccgtcccgtgcaacacgcggcagccaccggcgcccgcggcctcgaagaacgacaccgccctcgacttctcgatccaccacggcgcgtccgaggaggacgcggccgaggcgggggcgccgccatcgcgccgcgtcccggcgtgcgacgcggggtactcggagcacaccccgtgcgaggggcagcggtggtcgctgcgccagccgcggcggcggttcgcgtacagggagaggcactgccccccgccggccgagcggcggcggtgcctcgtcccggcgccgcggggctaccgcgcgccgctccggtggccgcggagccgcgacgcggcgtggtacgcgaacgcgccgcacgaggagctggtgacggagaagggcgtgcagaactggatcaggcgggacggcgacgtgctccgcttccccggcggcgggaccatgttcccgcacggcgccgaccggtacatcgacgacatcgccgcggcggccggcatcacgctgggcggcggcggcgcggtcaggacggcgctggacaccggctgcggggttagttacttttaccgcgtttacttctcagattaacctggtgatgatagtcactgactggtgggcccagtccccagtgcagtttttccttgttggttgactggtggtcaacgtaatctcgaccgcacatctctgatctgacggctagtggtagagtttgactggttgaggttgatatttcaccatcgagtccctattttattttccaaaatttgtttgcaattcaatccctatgaaattcgggctgctatcaatatttctccaccacagttgtgttgttttcatgtttttttttactgtttcttgatcatcagcgcgtagatcagtgtacactttttggagcttgtgttgtgtaccagcgagttaaacacccatgattgtgtttcctagtgctggtttgtttgtagtgaaaaatttcctgatgtagcgagttaaacacccttgtttttttctatcgtatttttgccaaaatgtaggggaaaaaacccttttttttagccctgcgaaaaaagtatggttttttttctactgggtaaatgcctgtggatctccatgtagtcatctgtgattaacaccttcaccagttatccttgccttatctgtttgttaattgttggattaaaaatgccactaggatagttgaatgttcacaactagtactagacatagagtacatggatgcttcgaggacagacagcaaaattagatatatttggatcagcttctggatgtggatcaaagctggttttatgttaactaagtaccctctccatgtgtagagtcggtgtgagaaattgaaaaaagaaacaatggattaattgatgttaggtctgagtcggtgattgatatctagtttggtaggagagttcgatagaagtgtgcacatggaattgtgtactgatgagagcttatttggataagaaaatactaatcatagtccaactaaccagacggcagatagctttatctgaactcaactgtgcatctttggatctggttgctcgtactccctccgttcttaaaaaaaataatcaaaaatcaagtttttaaattagaaattggttttctttcaggacgaagagcttaccttactaattgatcattcttgctacctttgtgttcactgtaaagatggtacaagatgtctgatgcgacatatatatccagctatcaacactattgaacaaaatgtccaagacatgattttcttcccccttgttgttggcttgtgtttcttggctaacttcaaccggagtacgacgagtttaacactagtatcgtttacccttcggcctgtaatttaatcatcataaataaaacgatggttgtataaaacgcgtcaaataagatttctcgtaaacaaagttttttcatcagacaaatcatccttactcgggaaacactcatgcatgagtcaagctgttggctatgacaattgatgagaaatgcccaggggttttccggctagctccacagggtggtgggctagacgacttgggttcagagcttcacctcttctaattatttgatattaggtcatttcctaatatccgtgtcttctttgctatgacaattgacaaatcaatctgatgctaatgtgcactgtctactactctgaactctgaagtgtgaacgaaccacatgtgcaggtcgcgagctggggagcgtacctgctgtcgcgcgacgtgctgacgatgtcgttcgcgcccaaggacacgcacgaggcgcaggtgctcttcgccctggagcgcggcgtcccggccatgctcggcatcatggccaccaagcgccttccttacccggctcgcgccttcgacatggcgcactgctcccgctgcctcatcccctggagcaagtacagtacgtgctttgtaactccaccacctcaaatttcacccctgcaaaatcaaacttgtgcttaatttgatttggaagccaccaagttgacaggctttttcgaagttaaggacgagattcggtcaaacttttgaaattccaaccatccatggataatacctcaaatgcttattttaaaaacgaaagaagaaaaagtactaaagtagtatcattgtatcatacttattataataaaaaactagcatggtggcccgcgcagattgcgcggctagtatcattatattttctctcatataatagcatatatgttttctcattatattattcaaatatattaaaatgacaacataattttaaattttgcaataactttacaaaactactaatgtgtaatattcatattatattttatatatgtttagttattaattatttttaatatcaaattttagttatttgtaaattatatatattcctatatggactctagacttgtcttttaatatttattttttctaattccgaattttctgtaaattatatttctatataggctctatgctcttcttccaatattatttatttttatttttgaatgttcatattatattttatatacgtgttagttattaattatttttaatatcaaattttagttatttgtaaattatatatatatatatatacatatatatatatatatatatatatatataaaatttaaaaatatatatatatatatatatatattcctatatggactctagactcgtcttttaatatttctttttttaattctgaattttccataaattgtatttctatatagactctacgctcttcttccaatattatttatttttatttctgaatttttattatttctaattgtatttctatgtggactctaaactcatctttcaatattctttaatttttagttttgaatttcagttacttctaaattgtatttctatattgaccttaaactcttcttcccatgtttttcttaatttcgaattttagttatttgcaaattatatttttatacgaactctaaactttacttttaattttcttatgtttattccaaattttatttagtttaaaatccctatatggactctatactctacttctaatattcctttttttaattccgaatttcttttttttcttaattgtatttctatatggactctatactctacttctaatattccttatttttaattccaaatttatattatttcctaattgtattcttatatggactctatactatacttttaatattccgaatttctgttatttcctaattgtatttctatatggactctatactctacttttaatattccttatttttaattccgaatttcagttatttcctaattgtatttctatatggactctagtctcctcttctaatattccttatttttaattccgaatttcaactatttcctaattgtatttctatatggactctagtctcctcttctaatattccttattttttaattccgaattttaggtatttctaaattgtatttctatatggactctgttttttctttttctccgattaatgtgagaatttctaggccatgagagcgaacgtagaaattctattcctttaataatataatagatttttggtcgggaatttcgaagtttgattaaatcttgttctaaacatcgaatatttatgatcggaggggtagctttgattgatcatggcaatatcaacaatggttgttgcatttcagacgggctctacatgattgaggtggaccgggttctccggcccggcgggtactgggtcctgtcagggccgccggtgaactgggagagacatttcaaggggtggaagaggacgccggaggacttgagctccgagcaatcggccattgaggccattgccaagagcctttgctggaccaaggtgcagcagatgggtgacattgctgtttggcagaaacaaatcaaccatgtcagctgcaaggctagcagaaatgagcttggtggtcttggtttctgcaattccaaccaagatcctgatgctggctggtatgcatgtttatcacctgaaaatgatccaaacatgattccattcgaatgaaaatttaagatttgatttgattaacaatatgtagttttacacattataccttaaatctgtagtttcgtggtaaactcggcattaaatctgtagtttttttatactccgtcgtaaatatgtagttttacaatagtttggtcaaaatatcagtagttttcggaaaatactaaaaaagggggatcc

SEQ ID NO: 7665 - DNA, 4056 bp, Oryza sativa
tactgtagcatcacattgtcaaatcatggtgtaattagactcaaaagattcgtctcgcgaattagtccaaggttatagaataggttttataattagtgtatgtttaatactctaaattagtgtataaacatccgatgtgacagggacttaaaatagtcactgtttcccaaacaggccctcagttgcatggccctgaagaggggagcagaggaggtttctttcaatttcatttcaattggtacaaggaaaagagaaaagagtgatgggataggagtcctcatacatcttggcactcacaatggcacccacatgccacatccatccgttcatccatcaatgcctcctgaactgaagcatttctttgaacaccatttctagatccatcatggaatagagatagcctcccttgtgtagaagagtagccgtactgtagtactgtagttaaggatgtgagaggtttcttgtaggtgtgaaaagtggctgccatgtggggccatggtcgaacaatcaaaacaaaagctggtgctatcatcttagggggatgggaacctgcagtgcatagtactgtatatgtatggtggtagactgtggagtgtatgctggtagaaaactttatttattaattatactactcccaaccaaaggtccttctatcaccttcctataggagtgctgcatttttggagtatgtgtgtgtccatgctccataaatttcaagattgacaaaatgctgcattttggatggatatctgaactttatactctatccagtactctttgttaggagtatatgatttatgaagaattattgaggtctaatgggtttttatgtgatagcatgcagtttcttagagtaggtgccagaagagcatgggttcttttaccactaaacttcatttgtctatgcaaaaatagtaactagtggagtaagtaaatagactagactaatgactgtacttactgtatgaaaagctgcaaaatatatataccttgaaattcgggcattgggatatggcgtcaagatgataccataaacctgcaattggtgctgaaactgctgaacctgagatccacatcatcaccagccagggtatgtaggagaagaggaacattctgatccaagtaacctggcccacccaccagtggagcacagacaactgggccctcaccacaggccccacacctcagcacaaaacaggattatcagaaccattcaccattgccactgcaattccccaggattagtaggcgtttgcaggccaaagccacacagtgacacatattccctctctgaatatcttgcacagaagatagctgctgtagagctgagaggaaaagatatggcttttcagttacagcaacaactttgcatctgatcagatcagatcagatcactatctgtggagagagaccagagaatgtgattgtagtagtagtaataaccatctaattggcttaattactctggtcaagtggtggtcagctcaccaaaacaagaatcctaagccaggattgcattgatgatcccagcctgatctgcttccttccttccttgtcacatggccatgaagaacaagtctttggcgacactgtggatggacatcactcctcctaactaactcggccgcccaacttaaaaatcactgctccctcctctgcctccatcgccatcaccgacaccagccgacccgacaaccaaatctacttatcaaacccgtcacgagtagctcgcagctgccactgcagcctaaattctccaatttcttatctatacagggatcagaagcattctcaggacggttgtatcatcttgatgtaattggtcgagttcagtaaactctcgccgcgtgtcatcggatatcggcggtttgcaatcactcactgacaggtgggcccctcgccagcatgtgaacttcgtcccagctcacatgtcatctgcaatcgatcgaataccggtggtgagatgaggatttgtttcttggttcttggtaataagaaacagtgaagttcgtatgctcatgatcaggatgtacaggggaggtggaccaaccataggtggtgtggtgctgctgctgcgagatccagctctgtgcgacggcacatgcattgcgtccatccgcgccttttcttttcttttcttttctccgtgatgctgcgaaaaatcgcaaatgggggcgctaaatgggccatgcggatgagtaaacgtccacctgctgctgctgccatggcgatcgcgacgctggcttcgtccggacatgattagctcctcgtcgcctcaccaattggccaccaccaatcattcttctccaatcatgagatggcttatctggattctggatttgtagagcttgcttagatctgggcatcagctgataaaaatggctatatgattctggattggtagagctatttgcctcagtttgaaataggttattgtacatattgttgctgcagattatctacttgattatattttgattatatggatggacaaaatattttgataaataaacttaacaaatgacctaaaataagtgatctaagaaatacaatatataatataagaaagtttttttttgagaaaatgcatttttaaagcgtggagcgcaaataattcgtttcaacaatccaataaataattcaaaaagaactaaagccaaaggttttaatagacctgggcatcaactgatggttcgctcgtgtgttcagtttcagttgtgatggcatctcaagaatttgatcttttcaggctttcagataggcctgcaagagggcagaaagagttcggtttaagtgacgataactgaaataccagtatatggcatggaattcgaaagtatctgcacacggtacaaagaaagtaacggaacagtggtatatgtaaatttttagcagtgtttgtttacatgactgttttggtacgggttgaagctatgggcgtttatttacaccgtgagttcatctttagcttcccctctcaaatggctcatgaaatatagggttttcttgtacatgtacatgttacagatggcaagggatatcaatgcctgaatgggcgcgcgaccacttgcaaaccaatagttatgttgaggagatggtaatactggccaaattaaaactgctgatgcatagggcgcaccattgtctagtgtcaacttgaaccaaattcttcgttccatttctctagctcgtcccacttgctcttctgcaggcttggcctaatcacagtcatggctttcttgaaatcttcgtatttcaggggccgcaactacaatgaagtaagaaaaggagggatatgattaggacacttcagaaagctcacactgtatgaagatgtaactcgaaatacctgatttgcttttatagtgagaatattttgtggaccaagctctctgattggcatcatggcagcttcctcacacaatgctctcagatcactcccggaatatcctataacatatttatttcagcaccaagtaacacatatgtcgtcttatcagaatggcaatataccagaaaaataaaactaccttcagtatctgcagcaagcctttcaagatcatgacctgaaaggggacagttccagatttagagtggtactacatatacaaaagccgaaagacatgcagacatacagaataatctgggaaattccccagttctttcgaactagtctttccacaatgcagtgatcactaagtgagaagtccatgtttcaggtaaggaacaaaaggctgatttccaaagaagcttttagtatgaaaatccagagttggtgacttttgaagggggccattgcaaatttaggtcactgtgatttttgaaaactatttagggatcatctaggaaaaattaaattgtgatatagactcaatcatgttaggattaaaagaagaggcgaaaacatcattttttaatgatctccagtagtcaaatattcaaatatataaactgtaatccagggcgaacttttgtttccaagaaattttacttttggttaatgtacttctgtgaaggaatgaacactagtgctgtagtccaaagaagctaccaaga

SEQ ID NO: 7666 - DNA, 9082 bp, Oryza sativa
atttttgaaaactatttagggatcatctaggaaaaattaaattgtgatatagactcaatcatgttaggattaaaagaagaggcgaaaacatcattttttaatgatctccagtagtcaaatattcaaatatataaactgtaatccagggcgaacttttgtttccaagaaattttacttttggttaatgtacttctgtgaaggaatgaacactagtgctgtagtccaaagaagctaccaagagaaggccttaaacaacaactagacagagcatttgtgaaacctaaaacgtaataaagaagcagctacttactggataatttgaatgattgtcctttgagctgagttttcagcagtaatcttcggacatttggatcaggtaatggcacatatattctctttacctgtttataggaataaatgttatggcattcacaaaaaaaggagcaaagctagttcaaattactggctcctatacatactactacaatatataagcactagaaattcaggagtaaaaggtttatataaacaagctgcattatgtaccaaaatataagtgctcagccttttttcaagaatatggatatatgcattatttataagtaataacacctcagactcttctttctaaaagaacctggctaccacaacaagctgcctgcttgtaaacagtgaaaaatagcattttctttagtccagttcctaaccaattgcttgtaccacaatacccacgggcaaaggtggaacttgtaccaggcattaagcagcagaaactattgcatagaaattttgaagacctaaatgcaatgcaggaaacatgaagccaaaatagtggcagtagtcccaaatatatatcaatcttaccagtctacggagaacagcatcatccagctcttgtggcttattggtagcacctaaacaaataaattccattaatagatgacgcaagtaataaaagaagacacttagtataaaaaaatattggcgacaaagaatttttgtttttcgttttaacatacactcactaagtgagaaaacgacctacatacatgcactaaaatcaggaaagctgtatcactcaagatcacaaacttttgctgataatgttggaaactatttagaagtatcctagtatacaaaaaataataccaaaaaaatgagtttggagttatttaacaacacccgaacacacttttaacaatttcttatataaatgaattgaatcaggaaacaaatcagtagcatgtcataaatactttccctatttcagaaatgcttttaacatggacactcagtaatatatgaccatgacaaatagttatacgatactagtagtaaataaatattttctccataaccaatcataacacaagctaacttcaattaagtaactagaaaaagatagtgatgctaacctataacaataacaagatcatcagggtttgaagtgaccccatcaaactggataagaaattcagatttcaaccgcctgctagcatcattctcattagctaaccttgctgacatgacactatcaatctgtaaaaggcagtcaacatgggcaataagcaactatctaaaataataaaaataaagtagctaaacacattaagatcctagaccgactaagctagcacagaaagccagatatgcagataacatctttgcattcatctatatttcttgatagatttgaatggaaaggaatgctttagaaccaaacgttaacgttctggtagaatttgtggacaacaataacaataaaaaaatattctcgatgtattaaacaaatgacctcagcaggcaagcatcacaaaagttcaaaataataaaaggggtgacatgaaaccatagaagccttaatgacaacatcacagcataacagagtaagcctaatagcagaatgctatgatgagcacattctggtattctgtggaaagtttacacaaaacacgtgtgatgcagaacacatatatttacatgttctaatcacatggtttaaatggatagaagttctcagaagcaaactatttagagaaacatccttttttttcattccaaaaagatgatagacatggttccaactcatgttgatgggctacactaaaaacactcctaaggaaaaaaatggagtcgagaaaacattttgtgttgacatcaatttatacttcataaatttaactacaagtgcactacaagaagggtttataatgaggacctcatccataaaaattacagatggttgtctatcgacagcgaccatgaagagtgtccgtacaagcttttcagcctctcctacctgttttgcaatgaaagaataaacttgattcagagtggggaatatgtgtaagcatgtaacgtatggagggatggccacatacccactttgatgtcagtgaagaagctgaaacattaaaaaatgttgcttcagattctgatgcaacagctttggcaagcatcgtctttccattccccgggggaccaaagagaagaagccctaaggtatattatgatgtacataagatggctattattacaaaacaatgtatataacagaaattatcagagcgaagatgtttacctctagcaggcctccgaagaccagtaaacaaatcccttcgcttggtaggtaaaatgaccatttccatgagtgcttgctttgccttgtcaaggccagctgcagatcaaagcagaggataagaacactacaatgaacactaggttttatttgccatagcatgaaaaacaaattataagcttcctaccaacatcttcccatttaacagcaggacttctatccacaatggtcgtatttatcatttcaacaagcttatcatcatagtttgcaccagctctttgcacaggtttggcacctccactgctactcttctgatgagaagatgcttgaccacctctattaaaggtagggctaggctgcgaagtaggcctatggaagctagttgatgcggctctgtcattcctattaacaggattgtttgtaacaacctgtaaaatataatacacagctattgaaaaaaatacataatcgattcgcttgccacaagtaactcgttaagaaaatacagtgttcaaaacctcaacataactttgcaaacaatcttacttaattttcttagattggacattttgctgaacgcatgtcattaaagcagcaaaccgtcaaagccaaataagtagagacctaattgcattttgaagtttcatgagttacttcaattttcaaattttattattgaaattacaaatactcattagaaaaggctacattgatagcaatcacacttgaatggctaagtcagaagtgaagtgtagaaaataaacagctgagtaaacaattattgaacaaaaggaaaaaaaaccaacaggcacgctcgctccacctagaaaacatgccatcttatttagaagtaagagagttgaccctactgcatattcagtttcgcatgcagcactcatgttaattgcaacaaacaaacaccaatgcactaagattcacagcctggaaaacaattaaagctaaatttgacagaattacaacgttaacaactacagttcaatgaaatccataccttctttggcactggtgcagccgctcctgcaaaatcagatgatatagatagttaactcccagtgaactacaatacaaaaccaaagcaagcacaagtttatgtacgttaacaaaacaaaagacaaaagaaactcaagcgtccatgtattatgttggtatgaactatcatagaaactgaaaagcagaacattaagacctgtaactgaaaacacaccccacttgcttgttgtttaatccaagcatacaagcaatggacgttctaagcttctatctatatcatatacgtaaattcctaaattaacaccaacacgcaggggcggaactgggcctagggcagcttgggcccgaggcctactcgtgagagaaattttagtggacttgtactagggatggcaacggggacccgaatcctgaatccccgtggggaaaaactctattaggggctataaataggtccatattactccccatggggttgttaacgggcaaaagcaagccccgtcgggtggggcgggttcgggggcgttctctaggcccccgtccccgaatccccgagcccccgagtgtagcacatgtgcacctctcctcagcccatctagagatcagaagcccaactatccaggcccaattcacatggacagatacacatataaatagagaaaccctaggtcacaacacagctcgtttagtcactcggctaggtacccaagcgccgccacacacccaagctacagacgccggcgtagatcgatgcatcaccgaggcagcgacgactccaggctgtgccccacgccgcgtcctgaccctctgccgttgttcgccttgggcaccggccgcgtcgtcgcttcgctgcgcgcctgggctgagccgccgccgatgtagcggcctgccgatgcaaagcacagcgtgagagctgcacagcagccacatgaactttgattctactgcttttgattggtgcatagcttgctcttgggaattggaatgaatcatgtaacttctctcttctgattcatggatctgatgtgtgtctttatcaaaaaagaaagaaagaaaggatttgtcatctgggtgcatgactaagcatttccttttcttaattcttgtgcatctattctctctactcccaaattcccaaacttttctgaatttgtatttgtgtctcctctcaattcccaaattgatgcaccgtgctgcactgtgtttcctctcgggtgcgcgcccccgtcagagccccggaaccccggttggggcggggacgggaggaagattgcccccgactgcagggacagggatggggagcgggggatttccaactgctcgggggaggggacgggcgggcactatccgtcggggatgtccccgttgccatccctaacttgtacccatatattttcagattttgtcaaactccaatggcccagccctatgcgtggccattctcagcctcgtgtccttcaacccaattggaagcccatagcagcccagtagcaactaaccctaatccccaccaatcccaccgtccccctagccacgacacacgagcgcttgcgccgcatctgctcccaaccacagccattgacgcagcaggatgctcgtcgcctcgccctcacctcacctcctctcgtctcgccacatagatggccacggcacgcatcggcatcggcagcgagctagcaacagcaacgacgtttccccttcctcagcaacttcgtctcccaacccagcatctttgctcaagtctcaggcctcaagtcaagcacccaagaaagtttgattcctaaaatataggttggtcttctctcaaatgttcgatccgtattctcattgtgcatttggtagctattaatcaattagaaatcttgtttgatttcctagatgaagagcagagtgataaaatcattctatcaagtcttccaatgaatccacaccaacctcataaatagtataaattgatgattcctcgcggtattaattgatgaggcatgagatggcgaaaagcaatcgattgtttccgttgccaagtgttgctcttctatcttagattttttaaaaaaactaaactaatttgattgccaacactgttaattaagactgagccttcttagctatgtatataattaaaacatagctcacaaacaagatgaatgatggctggatgaatattgcatgttatgctatattgcgctagatttgtttgctagcattgaaaatcggcggattatactatacttctaccgtactgcagtgtacaaattttcatgggtagttttagccttcaatttgagccctaggcgtcgagaaatcctggctccaccactgccaacacgcaatggttcacgagtaaactatggagtacaagttaatgtctctagacgaataagtggaggacatggctgggaaaccacatttcatgagctcggtggtagttgctctctagacgaataagacggaggtaaattgatggggggaaagaagtggatcgactcaccactcctctggccgagcacccggagtcgttcctccacctgagtctgccactttgcgatcttctcctggtagaccctaacctgccccctctcgctgcaatcaaaaacgcactcacgccaatcagcaatcacaaaccctaaccgcgcagtggggaagggaagggcgcacgcacgcacggacctggaggatacggcgtccgggacgcgggcggccttggcctcgagcatgacgcggagcgcgttgcggtagtgcgcggcggcgtcgtcggggagcccccactcctcggcgcgcacggccttgtcgatctcctccttggccagctcgaagtatcccctgagcttcaccgccacgcgctcccccaccaccgccgccggcgacggcgccgccgcggccccgtccatgtctccccccttcgcagccgccgagtacagcagcgacgacagggagtccgcgagcgcgcggaggaagctcatgcgccgacggcgagcagcgccgccgggagcatccggattccgcgacgcgcgatcgagttggtggggaggaggaggaaggggaggatcgcgtattcgcgtgggcgtccactagtccacgcaagcggcggaggggaacgaacactatcgggctcggggctacatgggctcatgggctgagcccaatacaataccgctatacacttatcaggccagaccagtgggccacactgattcatctcccagtctaaataagtctatttggcatccctccagtcttgcccatggtcgaattgcatcgcatacctccagacttattccgtataagagcacttcagagatactccaatacttactacacaggcataggattattcatgtctgttatgttagcatcctgataattcaatttcaagtcatgtgccattgatttgctcttgtgatgaaaagagtaatacactacttcagagatactccaatacaggctgcacaagtcatagtattatttcagatgaaaaaattggcccttggagttattttctgctgaagctccttgcctttgtagactcttgttactggcttactgcagaactcagcctctcattgttgaattcagtttcatcttccctgagacaagaacaagggagcttttcgaatcattgtagtacttcagacaagaacaagggagtagtatattttttttagaccagaggcgaggaaggtcaaacctatttacagtatttaccttctcgtgtagtcatgtaattattctcgctaaatatatttgattaaaaaaatctccaaaatgactcagtatgttctctgccgaattaattgtttttctattgcagacttccagtgcttcgactgttagcttgttgctaaccaggggcggagctacattgaagagggggtgcccagaaacccggtcaataaatttttttagttgtagttcatttattttcaccatataggcacccctctaatccaaactcaggcactcatatcaacctaaactcggcctaaagtagagtaaagcaagcgaatggcacccctctccattttgttctagctccgcccctgttgctaaccaaatccaaggatgaaagcaagccgatatttcctccattttcccttgatatgaactaagattagatttatggccatgcaaagttggaaaccttggggtgaatgacaatgacacggcaactgataaagagtcgtagagtctcatcttttcgcttaggcttatcagccaaaatttaaactttcaaccttaaatttagagttaattttgagttttttttatcaaaatttattttacaacctttatttttaaatcgttaagaacatgtatataaaaattttatttataaaatatttttcgtttataaatatcctgtttaacttattccctcaagaaaccaaatgatagggcgtgtactctctctataaaaaggaatccaattgtgattttgaaactgaacatacacgcactttggataattggatggtctcggacagctgcgacgtcacgcagatgcagtttgtcagatttgccagttccaatcaacagacttttttcgtttctgcatcccaatcagatagagccacaacgctcgtgacaatgaagtgaagtggcgatggccttcagcttctagaaggaaaccacaaaaatgcactattccataattaatgcaattgtccccagcagtatgtgtcgccttccgaaaggaaaaagtcggagagaaggccgcccaaaaacaggtacccctccgtcccataaaagtagtcattttaccccttgctaaatgtcccgtaaagactgtcgctgcagttccgtgctgccattactacctcttctggtgattctggtccattcatttgaactgagtgcatacacattaattcttttttatttctcaagcacttaaacacactgacaactggagggcacattggtaactttaactgtgagctaatttatctcataactactagaacgtccacctttgtgggacggaggtagtattatcataaagtcgttatataagatgaaatgaaagtatgcatttacgtatgcagacttgtaaaatacgagtagtatttggttgcaaagtctcactgaatttgaagatctcgtggatgacagttctgcagttcacttctgctcaacagttcagaactgagatttattcttcaccaaccaaaaaaagaaaaagaaaaaacatttgagattctttagagcaatcaaacaatatactgttatccatatgccatagcacatgacatgactgcctaaatagatactcatattacaatagtagacattgtagtacttcagaaacgggatcaattattgaaaagagacgtgttcttctagaaggcaagggatgcacacaaaaacaaaagcaatggccctgtttggatccggaggccctccagaatcttgttatttaggagtattaaacgtagattagtgacaaaacccattccgtaacccctaggctattttgcgagacgaatctaacga

SEQ ID NO: 7667 - DNA, 15141 bp, Oryza sativa
  unsure (1)..(15141): unsure at all n locations
aaatcgtcattgtcttctttcgacagtgaggttacaattggcagcgttctggtacacacattgtaatttacaaggtcaccttaaaaggtttcctttcatgtaacgtgttttaggcgagagctaggcagctagcatagtgagattcatgagaggacaagtgcctcacaattttgttggtgagaaatttatcacatatgtttatgtatctcttgtggcctgagtttttggagctcttctcgttgaacttgtgttggcaacttgaaatgttgtcatttaaagctcctcaaagtcgcctttctaaggctgatttcatttttggatgttcccaacttacgttttttgttcgcacggtttccaaactgttaaactgtatttttttctaaactaagttataggaaagttgtttaaaaaattatattaattcattcttaaattgttttaactaatacttaatcagccatgaactaatctgttttgttttctgtgcatgggatcagttcccaatccactccaaagaacacatctctaaattttcatgacatggtaccatactacaaatccatcgcaatggcttgttttgatgtaacagtagaaatttaaatgaattttgtttttgatatataggatgactcttcggaatcaaacaaaattattggttgtgtcaaagcccagttccggttttgacactatcaaatttgagaattcgtactagcctaggtaaaatttggaaccaaacaaaaaatccatacagtacactattgaaatagtcaaaaaatagcttcaatccaaaccacaaatttgctcatttgagaaaatttgggcctgaactgtacagcacatagacagacaggtgggcccgaactgtcagcctcctaggtagcaaaatccccaacccaaccgtaaatttccccgaccaaatccacgcaaaaaccctttcgcatctaaaccctcccctcccgtggatcatcgccgccgccgccggtatctcgctgacctttcctctcgtcggaccaagttttcgcgcgtcccaatctgcggatccgtcggtcgtcgccgtcgtgatgctgtccttgtcgagggcgctggggaggcggctcttctcctcctcctccgccgccgcatctgatgccaccgccgcggccgccgcggtggtgaggaaggcgcaaaacccactggaggagttcttcgaggtcgagaggagcaccgaggaagacaagccccctccgcactacggtatccatacctcccatttttccttcctatataatcattcacacgttctacatctccactagatattttattttgttttgttttgtttgcgtgtggtttgcgaaattcgcaacgagtcggctctaaaatgtcttatggttgggaatttcattgtgttaatagttagtggaaaaggctctggaagcacagaacaactggttctgttagagagcatgccattacattgtattgctcatgattgtaatccagattaacgaaaataatagcacaatttttggacctgctggtcaagcatagagccgagttttccttttaagaaaattaatgatttcgtataccagggtctatatagacggcttacgatgatctgtgtatgaatcttctgtcttggtctttgtaaagccagaaaccaggcatctccagatacattctgttgatgccagtggtagattgtatgtgttcttaagtgcttctgtcggtacacataggggtgctaatgggttgaaatccaatccattattgccccaaccaaaccaacccagaccacttctccttcttcaagctccaaaccaatccaatccatgaacattttcaaaccaaaccagtccataccattctagtaaagtgggttcaatccattctaaatccatggactggaaccgcagtgtccaatccttgattcaactgtccctgggaaaaccatggtggcatgcaccatgcattggacaccatgcttggatgcgtatatatccactgcagtatcacaaaagctgtggttgctgagaccctcctccacgcatcaggctgaccaccggtgccgctgtcgctgttgctgagaactccggccacatgggagccccgctgctgaccgtcagcttgcatgtcaccacattattgctgctgtccaacagcccggtgagccagagcagaggcgaaaacgtctttgctgttactggtccaccagtgacagccgatgccgcgctccccaccagcagtggcgccgcgccgagcgcgaacagccagccgagcaggcccgcatgctgggaagaggtcaccgatgccggcgggagcggcgcgaggtgatgatgatgagccggtggggtgctgtggcggcactggcgaagtggacggcaacgaagtgatgatgatgaaccatggtgatctccctgtcgtactcctgccgccgccggcaatgactggtggcgcagaagggtgcaggaggtggagaggaatgtgttgagccaccggtggcgttgagcacagtggtggcggcgccgtggctttcacctgccagtgtcgcaggaagacgaacgggatttgggcacaatccaatggatgcccatgggctgaatccactttctatctgaactttcctaaccaaaaccaatccaatactttcctaaccaaaaccaatgcaatcaaaaccgttctgcatctccatccaatccacccctatccattagctgcatcaatccatttccacccaccgaaagccaacccacactgaaatccagcccattgaatccattagcaagcctaggtacacgtacatatggtacagctatcagaagaatgatatattaggaattttaaagcttaccgatcagaattaataatttactatggttagtttgcaaatgtttttcttgcatgttgacatctagtttttgggtttcttctgatgcactaagccaatgctagaagcctgaagtgttgctttgatactgtgcttgacaaggacatagttattaacatgtcggtgcttctttatggtcatgtcatagccctagcactttgcatttaatccaggtgtttaggtatgaagttctctgttatgatcaaataaaattatccaatgatctttgtcaagaaagcttatcagtgccgccttttctttttattaattggcaggccgtagttggaaggcttccgagttacgcctaaaatcctgggatgaccttcagaagctatggtatgtccttctgaaggaaaagaacatgcttatgagtcagcgccagatgctacattcagagaatatgcgttttccaaaccctgaacgtgtttccaaggtattgcacggccatcttaacaccctgcctcatgcaagtaactgagactatttaagttctcagttttgtgtaactaggtcaatacgggacaaaatttggaagaattgtgactaatcaaataactatatcatgctttttgttgatattatcttgtttattctgtggatggtaatctaacgacaacatgttttttgttagacgttatcttgtttattctgtggacggtaatatgctaattgcaaatcaaaaggtttcttgacttcttggtttggctgttcatttcttaacgtttgaactttacttattggaatatccttatcaattacaacttgttcttgtttgattgagaaacagagcagacattggcctctctcataatcatgtctagttaatccaatgccacaactgatccaagttacacaattttgtttctcttagaacattatttttttttgtccttgaataatgctaattttagtgatttaatcatataactgaaattcttcacacctactatttgtgtgttaggactccagaagcactgtccttttgtacttaaactaaatgatcccttccatatattgtcgatagacagttatgtggaatgcctgaaagcaatttccatagcagaattacagataattttgtgactacggatatgacttgcttcctaagataacattttcttagaatttcttgtcagggtgcatatcaaacatatttcatggcgtcttttctgttcttcaatcagtagttgaaacattgcatcattgattcttgtcatgatttcaggtgaagaagtcaatgtgtcgaataaagcatgtcttgactgaaagggccatagcagaacctgacccaaggagatccgcagaaatgaagcggatgatcaacgccctttgatcagctttcatgtttcatgttggattaacggttgaaaggacgagtagctatttttagaaatatctgcttcttttctgttgtatgctattctttatctcggaaagcggtacaagactggatccttttgatacccatggaatgcttgaaagatcctactatactattgacattaatagctccagggctaataattttgatgtcatctagaatccatgcaatgtgttttgcatgtccatgtttctgcctcactagaaacgaattcgttcctctgtcagtttcaagtacactgtactgttctgatcctcacttggcagcaataaaagtttgctgttaagtccatgagaaaattgctcatagtttgctagtggttggcggtggttaccgccatgcagattcaggtgtcaattttgcctgaaagcaagaaatttggtagctgtctgcagactgcagggccaaaatatcatgtgacgactgattatgagtgagacttgtgtcagcagcagatcttgtgctgcgtcaaatgggtgtgtgtatcttctgaaacaaagatggcacagctgctagcctggtaggctgcccgttgctgcagctgacgattctgaattattttttttggcgccgctgatgaggaacggatgatgtaccgacgccggttttgacaaaatgtggccgtcaaattaataatatgtacctttttttatgggtggtgttttggtagaagtattatgcaagtgaacatcataattgtgttttgttttgctgtcttcagaagaaattggggattgctgctgttaaaggtacagcactggcctgcttggttgacgaggctacgacattatcaacagtcagaaaatacagtactcctacacccaatcaatgtctatttgtcatatgctatccgacgcaatataggatggatctttgaaatgcaggaattttactgaatttcatgtgaaacagtttaattcctacgaaattccttgaataaatcctatgttctaaaataggcctaaattaatctgagatctgcacttcagaacaagggagttttatctgcctaaaccaggctcacctgccaaccaccccttcttgcctatccttatcatatccttcattcacatttctctccttttttttttagggaacacatttctcttcttcttctttcttagaaaaagggagaatgtttgccattctctgatgtcctctacatttatttgattgtagcgtttttcgccatgctttgctttgacgcttcgtccaccacagttgagctagaagtagtgacaaactgacaattaaccagcagatagatatatcacccaaaagtccgcaatacacacggaacttgtatcactagtcaccggtcattgttaacttatactcactctgattttgaatatttaatgtttacgataagactcatcaaacttttaaaattgttaaaactttagtcatcaataaaagaaaatcatatgcatagattcctctcaaaagcatattatcattttatcatgaattcactctattaaaaaacacagcaacatctacaaccccaaagtacttatattaaatctaatattaaatatgtattgatattatatttgttttgcgttcaaaattcaaagcatcttataatacgatgaaacggatggagtattatcacactgtgtaggccccacgagcagtgggtcccatgtataattcagcggcacataagtgggtgcgagtgttgatactgccgtaaacgaaagtaattatccggctagtgatgatgtgcgattccgtgggggcaatcgtattgctacgttgcgttgcattggatcaggtcgttttcggttgcgccacccaatcacgcacacgtatgcagggcgtcctgctacgtgcacaccgctttgcaccccgttttgttttatttcttacacgtgtaagatgtgttggccttctggctactacctgagtagttgtgtacttgtgtgtgttgaatcttgcatgtaaataaagtatagaggcatgttgtcttttagttatctaacaagttgaaacattgttaggggaaaagcttgtattaaatattaatgatttctgtaggttctctaaacagtgattttctttttggcaaagtctatgtggttggtaactagtggttttgctaggaatttttaagtgtagtttaatattaaatatttctttttaagcgatgagtgcgcacgcttctcgagtttcaaagcgacacttttttttctttttaaaaaactttgtgtatataaattttaggactattttaaatctagttttaactttataaaatttaatcatttataccctcgaataattatcataagttagtcaatcatccggtccaaaataacatgttggtgtctccaaattagcatatgtacatccttactaataattatgtagctctttgcaagtaatcaagttgaaatgacaattttatgcaaagggtttagagggcaattgaaacggtttcatcttgtggataacacatgcctctctaaaattgacaaggctgatgacttggcgtggatgaagcaatttttcagcatttcttgttttcttgcaagaatcgaacacctcagagagatgagtttgctgtggccacgcttccagattcctactagattctgttactttcagcttacggatgtagattccatcaacgatagatatatatatccccagacaaaaaatatttattaggtgtttaatcgataataattactccatcagttaaaaaaagacaatgaatctggacataagattatccagattcatcattctaagtagtgccaaattcttatcttaggttgtttttttagcaaaggaagtatgttgtgacgatgacaagttcatgctttttttttacgtaggtgtcctggatggaacaatttattttgaactcagtccatctcattctcacatcctatttctgacaagagatcgaatattgctgcttcacggcacagctatatacttgctccattccaaaatgcagctataccttatataatgcaaactacatatcgtatagaagactcaatcttctgatccaatagtaatattactacttgattgttaaattacaattgttcatttgaaatgcttttccttaacaacatatattttttcgttgtatgctgttatcattaccttttattctgttgcctgcaaattcatcagtgtatagatatatgcatggggtttggtattagtatgatgttatatatatatattaattgtaatgagatgacatgtcctttgcattggactactttcctaacgattacctaattccttgaaaccaatcagagattgagagtccattgctcttgaacaaaatttgagatattataacattaattgattggtatcctctacgtccattggaggcactgacttcatttcgaggggtcttattcaaagtcgctattatcttttttgataataataacaacaacatcttctattatttttataagataaacatggaatacattgatactatatataaaagagtttgctggttaatttcttctccaaatttttctactccggctcatcgatggactctagttaaataagttatctttctaattattatagatatatagtgggcccaaatttgttgagacatgatggacgtgtattctggtaatattgcattatctttgttaccactagattatttttactagctggcttagaggtctgtggttgcctagtttgactagattatttgatcagggtacatttcgaatttaatattaggacgttccccctttaatttttgcaatgggaaattcctcctttagatctgtaagaggtttacatgttctgtgtactgtcaagcgacaactaaccaaggctaatcttgtttttttatttacaagacaaattcccatcagatgaaaaaaattgcctgaagcactagatagatcaaattaaagacaaattaaggaggctaattaccgatcgactgttatggcatatgttgccaagattgattagtaactagtagtactctagcttgatatagggctattttaggagcttatagaggttataactttttctagaattagaagctcttcaaattaaatcaccagaagctatatatagctgcagaaaataaattaaaagctagaagctgtttttctccagtttctctaaattctcaccaggtaaatttctttgaactgcttttgggaatctaaaaactccctattcaaggttcatacgagtacaggactgtactagcttctacagtagttaatgctagggggttggcagatgggcactacctctaaatccacttcaaacatataatgcaaaaatgtgacagcggcatacatgaatatgatctcaaccctaccctaccatttgtgacaaaaaaaaaaaagctcacatccaaatttgtacccatttctgaggcaaccaagatgcctagctacaccacataatcaacagatccacagggatgtttctgcaaattaggccacacacaaataattaatgcactaatcatgcccagcttctaggctctccagccagcttagccccttgatatacatacatacataccaattaagagatcatgtatcactcactatatatgagggacacaaaatgagaggagatgagatggatgtgtagtttgtgtacatggttagcttagctctagtactactagcttttgccaacaacccagctaagctgagctgatctcttcacgtttgtggcgtgagctagctgagcttattaactatctctctaccaaatcaagctaagttaattagctggatagctagctcggtgtggtggtggttgtcgtcgtcgtcgtcgtctccggcgtcggtgagacggcggccggcgaagaagggggtgcgtatatatggggaattcgcttggctgcgtggggcttggggagaggttggcggcggcggcgaaggacggcgacgcggcggaggcgcagcggctgctggcggcgaaccccgggctggctcggtgcaccaccttcggcaacctcaactcgccgctccatgtcgccgccgccaaaggccaccacgaggtaagcatacgtccacaatgaactgatcacctctagtacaaaaaccatctccattgatggtgcagcaagctagctaagctatgagctagcttctcctgtttttttttctttcagattgttcattgaatcattgaaatnnnnnnnnnnnnnnnnnnnnnnnngcaatcctgctgcactcatttttttagaaaaaaaaacttttcttaaaaatattcattatattgcattgaagaaaccacttgtagtacttgttttaagatattagttaagtttatttctataataaaatagataatttactgtaataatatgctcaatgatcaaatcacagacgaggtaatagctagattggtttgctatgttttttactattaaccaggcatatgagtgatgttgccctaggaacaagttttttaatcttttcgtttttaattaatttgccaaaagaatatattcaactgattttttttggaaaaagtttatacacacacacacacatatgcatgtcattaaagaaaaaaaagaattcgaaagaaagagagagtaaaaaaaaaagaatttactgctgtcctggtagatcccatattaattattaatcttttaagtgttgcgcaaaaaatggaaatcacaatcagtcctagctagctttatcccgcgatggctgaatgaggtgacagaaaacctaacggcaggatgattaattcttcaaatgaccaattgatcactcgtctcttaatctgatttgcgtgccaaaaatgaagaagaaaacgtcatcattagtgagatgtaacatttacgcatgcaagttgcctctattcattttgcgggttattgttatgctgatgtgtgtgatttgtaattgtgtaccaacacttatatacttaaaattccttttcatgttgattgggaatcgatgcaactataaaagaaagtgacactattaatggaattcgtcaattatcatgcttctcctttgtagaacggtaaaaactaattacaaaacaaaaaaaaacaattattcatcatggaaagagagagagagataaactaaaaatttagtctaaaaaatgtgtgaagttatttgctgcaaaatcattatgaaaagtatggccatggacccatactaatttgttccccaatcgtacagcctagtacgttgcaccagaaaatttaatgccgtcgtgttcagaaacactatcaacgaaaaagggacgtggtcgtacgtgtccgacgtccctgacgattcagacgacaaatctttcgctaaatcaactcaaaccattgtttattttgtcaaaaaagagagagcaaatttcatctgctgttcaatctctgaacaattgatatgttctgaattttgaacagttttgacagtctgttcaactaaccaactgtgatgttatcgattaaaaggagcaaatttcatctgctgttcattctctgaacaactgatatgttctgaattcttatcagtttttgacagtctgttcaactaaccaactgtgtgcccagaatcttcggtaatcagctcaaatcaattgtcttattatcgattaaaaggagaaaaaaattcagctgctgttcaatctctgaacaatcgatatgttctgaattcttaccagttttgacagtgttcaactaaccaaactgtgtgctcagattgctgcattgctgctggagaatggagcagatgtgaatgcgaggaacatctatggacaggtgagcgaactcaaactgtacaagcttagctctgcacaagctaagccaagccatcggtttttgactcgaattaatatcgagccgtttgatcgatcgcccaaccgaccaaccagctagtccatgtttctgacctggatcttgaattctgaatgcacatggggattgattgaactgaagacgccattgatgcaagcttgccggttcggtcactgggaggtggttcagacgctgctggttttcagatgcaatgtacagtaaactgattagctcctgcacttcagttaattgcaacgattaatcagtaaattagaaattaacttttgtttttactgaaggtgtggagggtggagaacctgagtgggcggacggcgctgcacatggcggcggccggcggacatgtcaagtgcgtcaggctgctggtggcggacgccgccggcgacagagacgggtaagccattgttgttgttgaggagctcgagcgaggtggcggccatggtgatctcgagttggttaattgacaggtacgtgaacaaggcggcgaacggcggcgtgacggcgctgcacctggcggcgctgcacgggcacgtcgagtgcgtccacctgctcatcgacgagcgcgccagcctcgccgcgcagacgctgccctgcgccgcgccgcccatggcatccatcggcgccggcagcacgccgctgcactacgccgcgtgcggcggcgaggtcaagtgctgtcaggtagtatacgattccctttttcttcctttctttgatgatagccaaatttagtgtgtgatagtgaaagtttggttggtatgattcagtcattaattgagcaattagtcgatttgaaaaatattagtttattgttgatttggttgttagtcggttagtgtcgacaatcccatcaattgaatagatggatgagttgaaatgttaactcactcgagttaaaacgaatcagttaaaaaagcgaattcaagtttcagactgatcatttcttggccatcgatttcctctctgaaataacagaaacttcttcaggtttcagactgatcatttcttggccatcattttcctctctgaataacacaaacttcttcaagttgctgactgatcatttctttgaacatcgattgctctctgaataactccaaaacctttcctgctgttcttgttcagatactcgtgtcaagaggagcagacagaacagccatcaattgcaatgggtaaattagccagctcaattatcccccagattaattgtcactagcatatcaacaaatttgatgctcatcgctgcaaggattgtggtagtcaggtggctcccaatcgacgcagccagaatctggggctgcaactggcttgaacacgtcctctcccccaagtcgcatcttccgatccccaagttccctccttccggctacctctcccagccactccccagcctcatcgccattgcaaggtactttaactgatcgctgatcaccaatgcaattctgcaaattcaatgtgatctgatcagtgatattcagaacttgaaatgcactgagttggagtggtgttttgtgtgttgttttgtactatggttttgtttggtttggtgagatttgcagggagcaaggtctgaacttgtcttcggaggtttctgatggcttcgatgaaggagcagatgcctgcgccgtctgtcttgagaggccctgcactgtagctgctgaaggtatcatttttcttgtttatctccatccatgcacaaaaacattcagacatcgaggcaaagaactaactactccatcttgttatacatatttgatgtttataagattcaatcagacattttgatcatcaataatttctcaaatgctgattttagaaagaaaagaatggcatgcgtagatttatcttgaaaggtattatcatagtattgtacctaattagattctatgaacttactcgaatgtaaaataaaatatgatgctcaaaatttcaaaagttgaagtaatattactgtaaactttagatatttgtgagcgaaagaagcaatcgagtgctcccgccgtttcataatataagtcgctctaacttttctcttagtaaaacctttttaggtttgactaaatttatagagaaaaaaactagcaatatctacaacactaaattaaattcattaaatgtaatattgttatattttgataatatgtttgcactgtgttacaaatattgttatacttttctataaaattggttgaacttggactaggaaaaatgttgacatgacttagacagtaattaggcggtgaatttaaattaacctgcaatgattgtattagtaatactagtaatagtgttttgcttggtgaattaaatatagtacttgatcacttgtgctgtgcaggttgcgatcacgagctgtgcgtgaaatgcgcgatggatctctgctcggtgatcaaatcctacgactcggcggggatcgccggcgagatcccgtgcccgctctgccggaccgggatagcctccttccggacaaccgccgccccgccgccgccgagcctcgccgggtcgcccgcccgccgcagccgccgcaacaactccggcggcggcggcggcgagcacgaggcctccaactccggcggcagcgagaagggatacggcagcatcgaccccgacgccggcgccgtcgtccccctctactacgcgccgcccttcgcgccttctgccatcctgacctgatcggagattggagattcagttctgaagcaaaaatgtttgtctttgcaagagctctgaatttggcagagagatatgtttctcggtttctgaagagatgtgtctcgcaaaaaaaaggcagctctgaatttgggagaggtgtgtctcttctttgattcgtcaagcaaagatcattaaggtgataactgataaagattaaaatttgttgtatgcaatgtataattagttggggttaggagtgtacatgggtgatttgatttgatctgttttgtttggtttggtggtggcgttgatgacttgatgctggctgggggagtattgggttgtgttgtgttgggttggtctgaatgtatgtagggtgggctgtagggaaaaagaataaacttttttttattttttttgcattctatggtaaattaaggcattctctttttaaaaagatgtgctcgataacgatggcttgtgatggtcctgatggatctcagtagttgtaccgttgtaagacgcggatactaggaaattaactaatatcaaataattagaaaagatttaatattaaataattagaaggattggtgcttcaaatttaagttgtctagccaaccacctcgtgaagctagtcggaagacctctgagcgtttctctctgtaccgttgtaagatctaatcatttatttttcgtacgctttctttgtttttcccaaattaatcatgtggttctaaagttctttaacacctgattttacttataaactgaataaattctcctcatcctactgaaagaaggagctcctggaccccttttgacccccccccaccccacacacacacacaaaatcataacaagttagcaatacatgtgtacattatcaagcaatccaaaagggggcaaaaagcaataataagttcttttcgacttagggtttctcttatcaattcatctcacaatcaagtggtagcaatcatttatacagttacaattacaaaacccctgcaaccccctggtcccacagttcagtcacatatacaccaccaatccgagtacagccacttatgattgatactatacgtacgtgggttgtatgtacatacgtatagctgcgagaggaagcttccgggcatgtacgtacgtatatacgtacacacgcagaacaacgcgacgagccgacgagacgtttgaccaacccattaccgggttagtcaacgtctcgatcagaacaaaaaataaataaaaataagtccgacccggcgatgaatttttccaccgtttttccacgggtagtctctctcgttgcctcgccgcgtcgcgatcgatcaccgcgacgccgccgcctcgccgccccacgccgcccacgccggcatccccaccacggcggcggatgtccccgacaccgggatgcccatcgcc

SEQ ID NO: 7668 - DNA, 33724 bp, Oryza sativa
caagatttcgaagggctatttaatagctcagaggatccaaacaaggccaatatagctgttgcctttagccttgtgaccttgtcaactgcagagataagattcagtgagtataaagtagagaagtgagcttactcaaatcagcaagcaacatcagtatagcagctatggttacccagctcacctacctagctgcatcagcaggagtgtgcttggcttcagctctagccatcgccttgctgtccatcgccctctacatcatcggcgtcgtcgcctccttcgccgtcctctgcgccaaggagttcgccgagagagcccacgaccggccgccgctcgtcggaacagttttccggcagctcaagaacttcgacagaatgttcgatgaacatgtcaactatgcaaccgcgcatcgcaccagcaggattgtgtatcccggtcactgcgaggtctttacttctgatccggccgtcgttgagcatgtcctcaagaacagcttcagtaaatacagcaaggttttttacttcaatctttcttaccaaaattttccgcctgtgattctgtatgtcaggcgtttattacctgcaagatttgtacaaacgatgatcaaaagcttgcatgctgtacaatacggcatatgctatgatatgttctattataaaaaaaaatatagcttagtgcaatacacatgactatattcatttctgaaataaaagctaaaatgaccgagtaacattaccatatatggctcggttaaaaaaaaacacatttccatataaataattaacttaagagaacagtatatttatataaagttagttagcatgtccatatgagttaaactcataagcaagttactagtaactatggaaagtatatatagttgagcctatgagatcttacagtgtttgagcctgattcacagggggacttcctcactacagccatgaaggatctctttggagatggaatttttgcaacagatggggatatgtggcgtcatcagaggaagctagcgagctacgaattctcaaccaaagtgttacgtgacttcagcagtgacacattcagaaggaatgctgcaaaactggcagagaagatctcatgtgcagcagctaacagaattagcataaatattcaggtacttccatgactaagatcagcacaaaagaaagttttggtaaatgctaagatcaaatttatagctgtaatctatacgcgttttagttcagcacctttacagaactgcaaaaattaaaacaaaacctacatataaatgaaaaaactggtagttctcactatttcacccttttaattgcaaatcaagttattgtcattcaattttcctcaggatcttttgatgagagcaactatggactcaatctttaaagtggggtttggttttgagctcaacacactatctggatcagatgaatctggcattcaattcagcaaggcctttgatgagccaaactcccttgtttactaccgatttgttgacataatgtggaaactgaaaaggtatcttaacattggatcagaagccaaactcaagaggaacattcagatcatcgacagctttgtgatgaaactgatccatcagaagagagagcaaatgaagattgcagctgactatgtaagggactcaaaattctatctgtaatgttgttttctacagtttatgatatcatgcctttccaaatagctcatgtttctggagcaacaagtagatgcataaagttgaatttgctagtgaaataacagcagcttcccaaatatttcattttcaacttgcttgaatgcagttctgtggtctgatgtgctccacaaatccaaaatgaactctgaatttagtcactctaagttttcttaatacaaaaaaatataagacagagctaacatactgcattgttttatttctaattcttttttatggcacgcagaaaaccaaagaggacatcctatcaagatttgtactagcaagtgagcaagatcctggaacaatggatgaccgctacttgcgtgacatagtcctcaacttcctgatagctgggaaagacaccacaggaaatacccttacctggttcttctacctgctatgcaagaaccccatagtgcaggataaggttgcccttgaaatcagagagtttgttgaatggagcaaggaagataacactattgaaagcttcaccaaacgactggacgaaggtgcaattagcaaaatgcactacctccaggctacaatttccgagacactccggctatatcctgctgtcccagtggtatgaataactttcacggctattccctgtatagagtggagttgaactaaaataaatctagtcatgatttggctcgatatggatctggtattaagtaggtcacatgccaacaatggatattagtattggaagtgttatctcatattgaagggttcattcctcagcatggaaacctacattaccatgagatatctgaatataacagtaaataatgagaaacaaagtaaagagaatcttagttatccttgggaattcttgcccaaaagaaaaaaatattaaggagtattttcatttgtccaccatctttttgtaaagtaaggaaatattataggaagaggctgcaaggcaagtgttgttcaaagagaagtcttaattatgcagcatagctttatggtactgttagattttagtgcaatctgcaatattcattaaagggaaaatcaatatcacatttctcaaacgttgtacgcacaaaaaaaaaatatgactaaaaacatcatcgccttcgtaaaaatacttttatattgtttttgcaggatgctaagatggcagacgaggatgatgtactaccaaatggctatagagtggtaaaaggagatggaattaactacatgatttatgccatggggaggatgacatacctttggggtgaggatgcacaggagttcaggcctgaaagatggcttgtgaatggagtttatcagcaagagagcccgttcaagtttgtgtctttcaatgtaagtactaccagcaagaatcatttacctcaacatgtttaaatctagccttctgtagatcaagaagaaaagtcaaatatacaataccgcattccaactgaagcagggaaaaagaatatcatgctacaaaattgcaagtaacaataaatcatcccatgcatgtctttcttttcagaatgaggtgataatatcacctgtattttgaggatgaggattgaaacttgcatcatgcggttacatttagccaaataaaaccataattgcatgtgttaacacttaacaccagttctcatattctaaaaataacccaagacaatttcactttcctgtagacaagaatctccattaataagtctattttaccatgatcaggctgggccacgtatctgcttggggaaagaatttgcacacaggcagatgaagatcatggctgctaccctgatacatttcttcaagttcagactggaagatgaatccaaggagccaatctataaaacaatgttcactctccatatcgacaatggtctccatctgcttgcaaaccctcgagaaatttcaccatgaaccccaaacaagctactgcatccttttgttattttattggaacatatgcatttctaacatccgtcctattaggcaagtaataataatctgtcccaagtagtcgtatgaaaacaacaaagtagcaatgggacaatttgcccggtaaaagtaaggtgcttgtacaatttaatatgcttgtaatagggtgcttaaagaaagaggatgcagctatatcatcaactacgtatttaagcttcatttctttggatgcaagaacctctttgtatgtgcctggaaagctatagcttatattgtccataactaaagatagtctttgtgcataagaaacttttaagtatcaatccagagccaggtaagcatcctgccaatcctatgaggtaaggaaaagtagccttcattgtgctaaaaacctactgagaatgaaaccaaacattttatcaatcacataaaacctattaccagtattaaaaagattacttcaagaaaataaacagagtagatgacccagaacacaaaaatcaacgtttgttacaaaattgcctacaagagggtacaagacctgtactataagctactctgatttcagcagagtaagttcgctaaggatacaatgagaagatatgaaataaatggtcacaatgatttattttcagctagagttggaagctggagcccaggccttgatgtccaacccttgatatttctgtagttctcaatcgcctcttttcttagcatctcacgagtagcgtctaaagcattcttcaccttcgaaagaagaataccacatttaatccagaaaatagattaagtgaaaggagtttggattgagagattagggtgcggagaagggaagataccttagggaatgacaactttggtggagcctcaacaacttcaccgaatttaaccttttcacgtccagggaattctggaagagtttccatcttgtcgcccttgcgcttctttttcttttcatccaggtacctgtgacattgagatatgttattcatgtctataccttccaatgggtgagacagatagcacaacgattccctttaggcaatcatcagacatgtccaacttccaatagagattattagactagcatcaattcataagggaatatccgtgttcttggaaacaaaagggcaatcttcgatttacatgatgcaacaaagaaataatcaaagtgatatctctagtgtatcagacatttagacaataaacaacttacttcttccttttctgcttctttgaaactgcaactgcctcatctaattctttaaaacgaagatccacagctttccccctcttccgcttccttcggttttcatctacactcgcgttctcatcgccaaccggtccatccttgccactaatctctgcggctttgctatcagcagtaggctccaagttctgcttcttagttttctacatggaacatacagaatatgacaaggtaccaactgcggaagcaaatcgggcacaagctaacaaattgcattaatactagagtagtagagttctcttgcatttccaaagagcaaacgatagaatgcgatgaacaaaagtattacagcaaccagatgaacggactaaatgcaacgtaatagcaggaaaatgtacttaaagataccgtgtttatccaggaaattaatccgcagtaccttgtctttgcgagccttgttcttcgccgcatcgctctctccttgtttccctgtagaggacgtaggaatttcatcaggctataactacagttcagcggcagccggggtgaaaggcgtaaggggagcgcacctgaggagtctccggcaacggcgcccttctcgccgcccttgtgcttctcctggatggcgatgaggcggcggagcttggacgggagcgcgtcgagctcccgctgcttcggtggtgggggcagccgcgattcgccgccgtgcgccgcccggtagttcttctccctccgcctctgccctttccccggcatctcctcctccgccgccgccgctgccgccgcctctcactgctcccttggtcgccgccgccgccgccgctcggttcgattcgaggaggaaggcgaggtttacacaatgggccagttgccacatgggcccaaagcctatttatcattaggctttaggcccatgtagatataatggaatatgtctaccaacaatccctcttatttaattggcatccgcaacaactgaaatcttgaacctccaacttataaaatcaagttaaactagttgggtggcccgtgcaattgcgcggctagcacccaaacaaaatcatatatttttcagtatgattttacttaaaatttattaaattgctatcacgttgtcttaagactttgaaagaccaaagcttatcatccccgtatttctaattatatagtttttaaaagtcacaccagctactaccccttacttctatcatatcctttttatttgcttgcttgatctaccactatttgaaacctttaaaaatcagatcatatagtttttataatttctagaagtcccgtcaaacgcagtcataatactcctctacgagccgtgaactgtcttttctctatattgtcattgggattttacaaatcgaacataattatcgttcgggttcattttttacgttctaaagtcccgctaaaccgtcagcggctttgccattgttttcctttatggcacgcccgctgcctcccttctttatcgtcattgagattttaaaatcgaacatgattatcattgtgttttttttactttttagaagttccaaacctttaaaaattggacctcgtagtttttagagtttatagtcttgttggtttcttttttataatttttagaaatcccgttaaatgatgtcactatactcctctgcccttccgccacctactctttattgtcattgagattctaaaaatctaacataactatcgttggaattcattttttatattctagaagtcccgccaaccgtcggcggctctactatacatcccgcccactgcttctcctttttattatcattgagattttaaaaatccaatatgattagcattgtttttttttactttctagaagtcccggcaaccgccttgatcgattgcttcacggcctacccgtcgtccttcatttcaatcgttattaggattctatttggtgttttattaacagtttttatatgtcgtatcaaccgccaccattctactcctttataggcatgttacttaattaatctcgccatgtgttttagatggtattttctttcaatagtcttgattttttatcaccaattttagttatttataaatggtattcctagtatttttcttttcctaatttcacaatttattttatttttcgtattgtgttcttttggtatttttattttttattttcaatttcaattgtttcaaaattgtattcctactttaactctctttttaattcgcctaatttcggattttattttattttttattttgaattttaattaatctactattaggttgttatatgtactcttattttcaacacttcttatatttaatttcgaatttaagttaattttaaattgtattctgaactcttcttttcttttttctaattttgatttttttaaaaattttcattccgaattttaattaatcttgtattggattcttatatggactcttatttcaatattccttatttttaattctgaatttcagttatttttaaattgtattcctactcgaactcctatttttcctttttctaatttcgattttttttatttttattccgaattttaattaatcacgtattgagttcctatatggactcctctttcaatattgcatatttttagttccaaatttcagctatttttgattgtatttctatttggactcttcttttctttttctccgattaatgtgggaatttctagcctccacagcaaacgtggttatgtatttttggcttgctaatttttggcttggttatgtatttattggcatgacaatactgatacaattcggaaacggcagagtttgattaggattgttttgcctttcaatgtttctaaaagtggtgtgaacacacgtattcccaaaatattgtccgtttccaatatgattatgtttttctttttttttttgtttttgaccgattgtacatttcgtttccagtagattaggttttcctttttttgtttgtttgtttcttttttttaagacagattgtccgattccgtttccagtagtatgattaggttttccttttttttttgtttttaacgattgtccgattcgagtttcttaatatgccttttttctttctttcttcagtttttaatttttaactaatcctaatctagttctatttttcctttttcttattttttgattaatgtgagaatttttaggccatgagagcgaacgtggagactcctttttctattactttaaagatataatagatagattaggtcctccggtattagagatagttggtttaccgacatgacaaattgacctgatccactcgtattaattagaagtttatctggcaaaaataaagtggacctcacatatcatcctcactctcctcccctattctctccctcatccatccccttgtccctcaggcctcagggcgaggagagccgccgccattaacgtgatgtgaagccgtcgtcattgccgacacgatgtggaggcgttgctaccgccagactcctccctccaccgctttaccccctctcatgcaggccatcaaaaaaacatgtcgtggcgtggatggatgagggaggagtccaagagtgctgacggcgaagcggcttaaggcaaaaagagtcaccgaccgggtcaccatctctgttccctcttctttacccttttctcccgtctcctctttttctctcttgctttgatccaattttataagttggagggtgaatattttcggtattgcggtttagagatatgatttaagctcgatgaaaacatgaggaacgtttggtggacttaacccggagataaactctaggattacattgtaatgggcttttgatgggccgttccggcccacgaaggatagcagatggtggtggactggactggactggacctggatgggtgcgtggaatttctcttctcggcgagatggcggcggcggcggcgcgtcagtgtctgcttggattccgacgagcagcgccgccgcctctcccgctcctgagcacgcgcgctccctctcccgctccgtccagccgccgcggcgcgcgcatggcctcgtccggcgaccacgcgccgcagctcagcaccgccgtcgcggtgcccggcgcgggcgcgcccgtccgcgtcgtggccgcgccgggcctcaccgaggcggatttcacgagcgcggtggaatcctcgctgttcaggcagtggctgaagaacctgcaggaggagaagggggtcctcacctacgggaggctgaacctgaggcaaatcctcatccaggtgagccacgctactgtctcactgtgttgaatccgctacatttctcgatcaaaaatgagctgcgcaagcaaattttttttgcgtgaatcttaattttcgtcgctgcattgggtgcagggggttgacatgtttgggaaacgcgtggggtttgtcaagttcaaggctgacatcatcgacgaggagaccaaagccaaggtgatcgaaatgttgctgccgccgttccctgctctctttttattaaaaccttggataatctgcagcttgctctactagaaatctagaaggaagatccctgaaaaaacgattacatcttagatagtctgctgattactctactggaatgagtatccttgaaaattggttgctactgaaactgatatgaatatctcaagttttgcttgttacaaatagatgttcttcatctgaaatatgttttttgccaccatggtttgcaattgctgatgcagaatatcgtataaccatagtctccacacgagtaagttttagtggcaccaggttttgctttgatcgtggcacaaaatggttatggtttcaaatgaattttttggactgtgtctatgtatatgtttcgtgaattcattgatattccttgtagcatgttgaattagatgtggtcgttgtataggattcaaagtaagcggattttgtgtgtattatattttgagttttgacaatatatccagattccaggaattgtatttgcaagagggcctgctgttgctgtgttgattcttttggagtctaaagggcaaacttacgctgttcttacagaacaggtatgttatcatcagttactgtgaatggctcatattctggtattagaaccttgtgttgagtatcgaccgctctgaaaattttaggttagagttcctgttggaaaatttatattggaactacctgctgggatgctagacgatgaaaagggagattttgttggcactgcagtccgtgaggttagtatccctgtttttctttatctagaggtatgtgctgttgttggagattagtaatgctagcactcgtccggtctttgccagtttggttcacagaccatagtaatactgtatataacattgagtcagaagttcaccatatttgaagtatagtgataaagggtctttcattactgacaggttgaagaagaaactggaattaagctaaatttagaggatatgattgaccttactgcattgctgaaccctgacactggatgcagaatgcttccttcaccggtaaatgacaaatatttcccttctctgcgcaatatctggcataacttctcttcaagaaatgaagctatgtataagcatataggtgtatagtgttagtgtgttactcaatttggctcgagtattaggcatcactgcatcaggggggcatattattcttgcttggtcgtccactagtccttgcctggtcattccttgtgttttacttgtcgcaagtcagatttagacaacacatagagaagctaaaaatgttttcttgcaagaggaattaaaatagcgtcaagatgcagatgcgatgcagagggatgggaaattacatttctgtgcagaatccctcctgcctatatgtaatcgagtagcaagaattacaagagatttccactgtttatgggtctgaaactctgaatgtgctatagatctgtgctatgtacagtaacctgcataaaagattacaaattttttgatctatcacgagctcttcagtcttgaccaactgtctccttacccatagggtggctgcgacgaagagattgggctgttcctgtacagaggccacgccgacgaggacacccttagggctctccaagggaaggagactgggctgcgcgaccatggcgagctgatcaagctgcgggtggtgccgtacagccagctgtggcgcgccaccgccgacgccaaggcgctcagcgccatcgccctgtacgagatggccaagagggaaggcctcctgccgtcgtctccgacgacctctcgccgccgtggcagctcgtcgtcggccaacttgtaagagccagtcagctatagctagctagccgtgtgctttgtcagaacagctaatgagcagagcgagccaattactgtggagtgtgtgccttaatacaacagcaagatcgacctgtgtaaatgactaattgcatgcattttgatgtagaatatgagaaattaataaagcgtatgtaaacaccgtcagtcacgcggcaaacagctatctgcatgatatacatgaccatcagttgcaacccatagtctgttactatttaccaacaaaattgtcttaattgtctaagttcatgtgatcagaatctgaccaccgtttaccaacaaaagttgtcatgattgcttaaggttatgtgattaaaatctttaccacaccttagcaagtccaagaaattctatcacatttcttcaagtcatcaacgcgtgggatctgatttgttcaaagaaaatcttttttctcgaatgcgcaaaaggattgcacgtcaatatattggaagataagttcaaagaaaatcttatcacaactatagttgaaaccatacaattgtttaagtcatagttagctaactttagacgtggcaaaatatgaccgacaaccaattaagcccaaatacatgtacgcggccactatgtatcttcacaaacaaacttcacttgacacaaaccaaatccctttgttactgagagttcgctatatgacatctactccccatacaaacttgtccaaagattacaatactgaatttaattctacgagagtacattttccaaagataaatgatgatggacggacagacaataatgtgatatcgacatactccctccgtccaaaaaaatacaacctaaatggtgatttaatatcacctaggacaacgaatttggacatatcttaggttatctttttttgggacggagggaagggagtatatatgatgatgatgttcttgtttaattattgatatatccatatgctgaatgatatatcttattctattattcgatctagagcagaatgggcgggtggcagtagggtcccctgagccagccgccggcgatgacccggttcgccgcctccgtcgtgtgcgcgccgtcccagcacacggcgctcgacgggttggcgcacgcggcggcgcccctcatgccgcaccgcgccacgtactcccagttgtactcgccgccccccgcgccgcagcacgccgcgatgccgctcctgaaccccagccgcgccggggcctgcatcatctccgccacgacggcgtagtagtcggcgtacatgatcctcaccgccgccgccggcgacggcgacgacggcgatgacgacggcgacctgcggtgcctggcctggacggcggcgaggctggtctgcagcagcgagttgtggtggatggccagctcgttgagcggcttcaggcagccgtagtcgtcgtagtcggacttgttgctgctcttgagctccgtcaggtagagcgcgaagcatccgaacggcatgactcccgggacgatgatgtccactgcacccatcgctatcagcttctgcatatgcgattgccatatgatttactattactagctaaatggcagtactttactatggaaaaatgtgagatatatgcacttcgtccctacagatatataaacttcattttagagatgatagataaccacggtttatagaatgactatcttgtaatatatagtactccctctgtttggtatttattagatcgctttcactattttcatagtcaattttttttaatttgatcaagtttatataaaaatataataattttttaacacaaacaattatgtttattaaaactaatttggtgttgtagatgttgctatatataaatttggttaaacataaaataattgactaagaaaaaagtcaaaccgaattataatatgaaatggaaggagtatgtaatatgaaaatgttggtggcagattttttttttcaaatataaacgaaaatatatttcaaaaatattttgcagagatcaattaatcaaggttaactccacacgaattatttgattatgaccggttctagcttagctactccctctatctgtaagattatttagaccaattaaggaggaaagacgaaaaaaaaagtatcccaccatataaatctgtgcacttgatacaatttactctaattaatattctcttcgttccaatataagtgtaagctagtatatacgtgtcaagatttttagtcttaaataggatatgtcacatctatattaaattatacttatactggaacggaaagagtatatgtgatgttaattacctcgacgccacttgcaatttggtcgacaattttgggcgtgtagttcctggcttgatcaatggtgaagccgaacaagaccatagcgttgtagtcgtttccgcctagtgagccgaacaagaagagggactcggccaggtaggctctgcaacttgatcgatcgaggtcaaaatcaaataataacattaattcagattgtacttttgtcaactactccctccgtttcaaaatatttgatacagataactttttagtacgtgtttgaccattcgtattattcaaaaaatttaagtaattatttattattttcatattatcagggttatggataccatatatctaatagtagtcgactagatctcggcaggacccaccacataccatgttctatacggaaacaacctgcggatataggaggagttccggataaggaaagacaaccagagttctacatggaaacgacaagaaatactcggattgtatccatattggtatccctaattctacttggacaaggggacacctatgggtataaatacaagaccccctaggaggagaggggacaaccaagacaactgtcacgccccgaactagcctcgaacggaaccaacccgtgacgctccaaattaacctgttaacggataccagtcccaggaaacagtgctggtatcacaggaagacagaatatcacagcaacagaggtctctttattatagagtaggtttacagtcatgttgggctacagacagaccccgagctcacaactgcattacaaaagaggaaagcggaagccaagacttggaccatacatcacaggcacgacttaggaactagatcgaaaccctaaaactcatcatagccgacttgctcctggaagaactcctcgtcagcgggatccatctcatctttttcagcaactgggggggatatttatatagagcaagggtgagtacaggagtactccgcaaagtcatgggaattttgtgtttaatgaaggattcaaaggaaaggctgttgtttttacaattgatttttagttaaactcctttttaaaacaactaagtgagtgcttctcaaacgacacggatgagacagtgcatctcgtccggtcggagtatgtgtaatgtatcagtctttgatagattcaagatttgccacccggccacaactttcaaatggccacccgggcctagctgatcccgtcagccacagatgttccaaacatcgaacccaagtccacaacagcaatttcacagagcagtagtcaaacaaaactacgctaaggaatcaccttacatccgtccatgactgtgggcacggctgttcgaacagtttaataacctctgcagagggggcacactttactcacacgacattactaacccggatcacccagcccgtgcagaacagccacgtctggtgaccttgaggttttcatgacaaggcatttcgagagccgacacaggtttactatatgccagaccaacaacaggttaggtcccagataatactgtgccaggaagcccaggggtcctccccgacactatcctggcgaatccacttgtctcccggcatcaaggctcccctgattagctaattactcagccatgggtgtcccattccacccatgtggtcgtacttgttatatgtacggatgaaattccaaaggaatcggtccttaagtgcaagagcgggaaaccgtgctcccggcacgtcccccggtctgtgatttttggaaattcatttagttcgcaagcaccgacccaggtgtcgggttttccaagtcttttgtaaaaccccaagttttacccatcgttggatattttaagtttgaggggaggtgctcccatgcacttgctcgaaggcccgtgcatcgaagcacaacagttgacaaaggagttttaattgttcaataattcaaggagggtaattgcagcaattaggattggggccggtaggctatctcgcaagccgcggccgaattacttgtgttaaacctattcacgcaatatttgcggaagagaaatacttagatttaaattataggtgcaagatgatcaaatgtgacttgccttgctcgagatcttgagcttgatcctcgaaatccttgcactgcgggtcttcgggctccgaaactacacgcgaaacgggacaactcaacaaacggcaaaaataaagccctattattgacctctaagcgtgccattagatagatctcgagatttgaggaattttggaagttgaacggagtcaaacggatgtacggttgagaagatttggaattttctaagactaaaggatttactgggctaaaagaaaaggatttagtaacctcctttttggattagaaacgagatagggaggagatgtagacttcgcgggcggcttgagcgcggcccgagaggagttggcgcggctcgaccaattaattgggcggacgcggcctcaggaggcggtccaacagagggaggcggggagagagagagggagacccggatccatcgtgcagggtcccggggcgagcccacgagtcagtgactcggtgcacgggagagagggtttacgcggcacgggggagctagggtttgcggacgcggttcacagatggtgcaccgggtggactaggaggcggcgggcccacgcgcagccggctgactctcagtggaccacgcgcgcacgagagaacggatcgaaggaacggctaaccgggttcaaaccgtcctggcccgcggccgagctggcgccgacgtggcgccttcgtggctgccacatgggccggctggaggaggacgaagggagaccggccggaaatggacggcgggcgacggcggtgttcaccggagctcgttgggacatcttcggccaaggggagatgcaccggtgtgacgacaagaacgagagggatcatgccttcggcttggatgcaccgaagatggctcgacaacgttgaatcgcggcggcgcacaccggcggcggcaaaagagggaaaaggcgacgagaccatgaggggccgattcctggcggcgagagcatctacgcggctacgggattgcattcctagcaccggattgggcggggttacgccgagaggggctggcgacgagcggtggcttgcggtggcgagcggcaacggcggcgagaccgtgccgggcggcggcgagacttggggcggcgcctacaggctacgaggagtgctacgatcgctaccgccaaatctaaggggaggagagagagcgaggaggaagaatgggagaggtgttctaccgagacgagacgagcgctgtgacgagaggccgacggcacgggagtgatctctccggcctcgggtcagggaagaggaagaagacgagcgcccggagtccccttccgcgtcctagcgcgcaccggctcctccggcacacgcgacgacggcggtcagcggaagcgagacagagggggcggcaatggcgcggtggagcgagagtgaatgggagaggggaaggaagaaagggcgccttggtttaataggagggcaatgtcggtttggaaaccgacctagggcggtcagggagcgagctggcgctcggcgctcacggccaaaacggcgacagagggcatgacgccggcgaggaagaaaaagaagaaaagaaagagggaaaggaggcttgcctcttgccactttggaaaaagaaagagggagagagggcgatgaggcagaaggaggaggagctctgcctccattccttggagtggagtggctgggagtggctgggccgggtcgatgacgacggcgatgctggcggggtggtttggaagggcgcggctacagggcgtcagacgcgggctcaggcgtggcaggtgctgatggcagcggcgactggccggtcggccaccacggcacgcgcgcgcgcgggaagcaacggcgcggcgatttgggcggcgtcggcgggagagggagcgagagggagcgagagcagagagagagggaggaaagaaagagagagcgagctctctctctctctctctcggtctgcgcccgggcggcgcacgtgcctcgcacgtgcgggcaaggatggaggggagagaagagatgggctgagaggaaatgggccggggagaagagatcggcccacaaacttgagggaggcaaaatagacttttcgagaggatttgatttgggacagatttgagattagggtttggattcgatgatggattggggatttgagatctgaaatggcgcggacactggacaacaaataaagaaacaattttcgtatttaggatttttaaaagatagttttcccactaggcgccacgacggaacgggcactacaacaaccaacacacacggacaatatagacgccacaaagccacaagccgatacaagccaacatacgccaagacaagacgccagatatcgacatcaaagataggcacggctagtcccctacggtgtctccggatactgtcaggagagacgaatgcgctatctctgatctcgccgggcacggattcgaggaggaaggctaccctgttgtcgactacgagtcagaccttcagaccaccatgtcgacaacagttagataggttacctcacatattgtactggtgtgattatggtgaataaaaagcaactccggcttcggccaacaggatgtagggttattacctgacaattcaggggcccgaacctgtataaaaatccctgtctccatctcttttacctcagtctcgcgtatatcctagtaccaacgatccccatgccatgcaaataccgtagtcgagatatcaaacgtcgacacacatcatttgattcattgttaaatatactttcatgtacacatatagttttacatatttcacaattttttttaataagacgaacggtcaaacatgtgctaaaaagtcaacggtgtcaaatattttgaaacggagggagtaattagctgaaagaaataatggtgtttgtaacgacagctagctagctactaggaacagtcgaacagatagccaaatactccctctggtaaaaaaaacatgttggcccttcatctttgttgaaaaaggaaaaaatttctcttataactaaccttaaccccgcaaatcgagaaattttatacagtccatattcttaataataaacaatttaatcttttatcctgacctaggttgtcaattttggtaacttcgtcctccgtcggcaagcaaatatgtcggccaaaattttttggtttttctttgtattttttaaatttgatcaaattttattaaaatttaatcagtttttattgcattttcaaataattttggacaaaaagtatgaaaattctaaaaattttcagtgcaccgaaattttagtccaaaacaaaattgacaaccctacgtccctaccctcaccattaacctgttaacttttatttataaaatggagtttgtggggggcaaaggaagtacttgccacgacattattcttgtttaaatttgatgatctttggtctttttgtgggaaaaaaattatacaactcttaaaaaagatgcttatgttatcaaaatatttcgcatcatttagaaagacattaaaattctgttcacgtagtccatgttggtgctaaatatttcctaagcaggggatcagagaagaggagcagagaagcttgtgctagttttaactggtttctttacttgcttgcttgagggctgaacagtacacttgcttgtacgttgggcagcacaccatcatcagtctatacacatgcactggctttctatttataggcttgataaaccgatatgtaggaagcttcaggacctagctagagacttgtagtactactacattgtcaaacttcactggtactagtactactgtcaaatcacatcatgcatgtctacacactacactgttctagaaaatttatagagcaaggacttcaaccttgactttagtttcacgagtagtagagagggttagagagtaggctggtatgttctagaaataaattaactccaacagaaaaaaattatacaactcttaaaaaagatgcttatgttatcaaaatatttcgcatcatttagaaagacattaaaattctgttcacgtagtccaaacatttgaaaatcggttaaaatttaaaaatagtactcctgttgatcaacaggtacaagtatataatttgctttgttttgcttttattttgttttgcttttattttttatatagcccttttttatttaatatatataccgtgaaagcctcctccactgtgctttccttataaaaaaaacagctacaagtatctaaacacatgaaacaacgtacatactctgtggtgcagcagtggcgcagatggagggcagcaagtcgcggaaccaccggagctggacgttcatggagccgtagttccagaacgggaagccgacgccgatggactcgaagaagtcgaagtccagcgccgtgccgccgacgatggccatgttggctccccggcggaagtcgccgccgatcaccttcgacggcggcagcagcggcagccccaacccctccgctgcatcaaattatacatcgatatcatttcatgatcatatattatatatatcgatgaaataataagcagcttcgatcgatcagcaatggcgatcgaattgaaccgaggaagtcgacgacgaggcggccgtcggagcagcggcaggtggggtggccgaagaaggtgatgccgtagggaggctgcgccatggtgagctcggtacgattcaccgccgacatgttcacgcagatgttgcccgtgtccgtcagcgagtcaccgaagctgaacatggccttgtactgcctcttaatatcgccgccgccgccgccatgctcgccggcgacgacgccgacgaacaagcagaggcagcagtagagcagtacgccgacgacgacggcagcagcgtgtgcttgctgcgccatatggctttcgttttcctgcactctctgcacttcacttctgctggctgcacgaagccggccggacaatactagcacacactccacagtccacaaagtagatatatatacacacgaccaggccacaaattaatttaagttatatatacgagcaaagttgagggaaatttaactatttgttgctccactctttatttgccacatatacaataattggcactatatatttgtcactagagagttatggtttcttaaaaaaaaaaaaaccatttttgccactctggctgtatggtatgtcaatgtactaatgatgagaaaagtctattttgcccctagctattcccttgtgttcatcctctctcccccctcccccaaaacaataaacaacatggtgcaattgtttggactgatgcaggcaaaatgtctcaccagcgccaagatgtactccgactacaatgacgaccacagtgacaatatagcttctaccactacccgcagggagaacaccattgctgctatggtcgagatgcactcatgcacagctaaatactggggtgtccatcacacctcggttccatcaaaaaaggtttctcggagctggatcttgactccgatgaccacgactacgaggatgcggacaggaggagatggcggtggtggcggaggatgacgtgtgcgttctagaaggatgagcgtcggcgccacaccatgcttcccatggaagtggtgtttcctagtgccacaaccatgggatagaagcgtcctaaggactaggagcaaaggcatatccagcccaaatgtaaggcttggtccaacctactgatttttcatgaggttggacaacatagtgaaaactcttaatactgggcccaggttcctgtggcttaagtcagcccataactatgggctcaaccatgtttgcctcctccatgccaatgccggggccacctccttcctagccgcacatccacccttccactaccaacgttcaccgcccagagctccagcgagaagcttggtgactctggtgtggtacctacatattaatattaagaaccctaaggaaaataaatattatgtgtttatggattaggaaaataaatattatgtgtttatggcactctctcgtaaaaaaatcattcagaataaatgtgaacaagtatttatttatatttatttttagaatgatttttttttgaaatagatggttaaatagtctgataaattacccgacggaaacctgacaaaatcatgtcccataaatcataatataagataccccttagtataagagatcctcaggtaaaatagtttgggatagtaaaatggattttttttctaatttgaaacaaaatttatatccctggatccattgtattacattatagaactgatgaagtagtaactaaggttgatcactcatgtgtaggagtactgtgatcagtgattactcctgaggagtactgaccatcttcaatggcgattaagacttgatactactaccaactacccagagagagagacagagagcatactgcataccagggttcactctatcggttcaggggtttctatcgggggtcaccgaaatcccgaaatttcggtccaaaattttcgaaattttgaacaaaatttttagttgaatttgaacaaatattatccaaattcatgaaaaaattcaaaaatttcggtcgaattaatatcgtatcgggggtcaccgaaatgaccgaaattccaaaatttccaaccctgctgcatactactagtgcctttgctgagtggtaccgatactgactagtgcgaccgtcttcaatggcgattgagagtttagactagacaacctgagagtgccaattggcccaaggtcgtagagagagagagagagagagagagagagagagagagagagagagagagagagagcactttaccaacatgatcttgaatccgctttactaggggaagttacatactttaacaaaattcctatgttaacttaaaaaattaaccattgattagatgaattatatgatcgttgccatgtaagctaatcgatgtttaatatcatggaccattttgcaaagcccatgcaacatggcatgcatatggccgttgttatgttttggcccacttttaaagcccatataataatctagtatgtgataaataaaatacatatgtcattggaaatccgcgggctctaagctatataagttcaattagcaactcactatttgcatattgttaaattaaggaaaatactaaactaagactcggacacgagaacaaataagtagtgattacttcataattttaaaatttaaataatgaaaatgaattgagattaattccaaacaagcacgagctgtgacaacagaccatgcaataaacctgttgacaactacttctatttgatgttttggatggaattaagtgaagtatttgatactttgtccatcaataactttataaggcttaaggcttactatcaaaaaataaatgttgtatatgtacatattgatttttcatgaaaggtacttttcataatatctcttaagcttaatgtatcttagtataaatttattctaatataaaatttgaaaggtcatgcatcaaagaccatgaaaaaaaagttaaacatcatataaattaatgggatcacgataaccagataggtagatgtggttgttgaataattaattagatgtatcgtagtaatggtcaatcttatatcgtaaccacagacttttaaaaaatatctaatcttgcatccttggcactttgaaggaaaaaaatatgtgtacaaaatacatatgtagtgaaaaccggaaaactcccgttaaatcaaaatagacgttcaaacattatttttatatctaacagtaattcttaggttttcactatttttctcttttgaagtccaacaaattcaagttatgggccaaactctcaaattccaatgaagctctgcacaaattgatattcgcagattgtgcactccggtcatgactcagaatgcgagtactctagtctctagcactcgagacagcagccacgctgcacgtagacctcagttgccgccggtgatctaggacaaaatgggtggcagtataaaaagagtactataaattttatatttgggatgaaagaagtactaaatttatagtaaaaattattagaagtagttgccgcccagacttcgtttacttttctcggtaacatatgtaaaaattattaattgctacagtatgctctttatcactcaggcttggaactccacaactgaagtagccagtcataggcgataatctgcttctagtagagacaagagagttagtagtacaccttgtgctttaataacatatctccgatatatatcttacaagaaggagcatatttttttttccattctgacaaaatcaaacgtaccttggacttggagatcaatatgaaccggcaggggctaaactcctaaacaaaacactatctaaattacttcgagttaaagacagtcgcagggcaactctcctttggcaggccgttttggtgaattcaatcgctacatggcgatcgatcaaagctagtagcagctggtatatacatacatgcacataaccaaccgatatatgatggtctatcaaaggccaccatgtatatatatacacaatgcaatcacatatggatgattgcaatgtagcaccatggccggactgtatataccttggatgcatatacaattacaaaatcacctagaatgcacctgccagaggagagctgcctactactgtcttcaactagttcttgcacctctctcacatccacgctcacactcacacacctacgaatgcatcacaaagacttagaagacttgcctcttgtcttcctacaaacacatggatgcatcagaaaacttaaaatttttatctgtttggttgttggtgacctgagtagtgtgcctcttgtgcctttctgttggcagaattctagctcctcttatagctagggcgacaggaagaagatgaagcagcagcgaaacggcatatgccattgtggtggtgagatgagacagtgagatatatgcattctgactttttagggagggtttgtaccatggatatcctccccagctattccttcgaccctgcaactttatcctattctctctcgatatggagaataatcgatcgaaatcgccccaatggtccacgctgatccatagatgatggtatatagcatctctccttgatattgtcttgcattgtgtgtgtcccgtctttccatggtcgctgtctcgccaaattgccttcatttcccttgtgaattcgccgctgtgtttgtgtcaaatagaactactcaaatgtcctggagaaccgttcagaagaaaaagaagtcctggagaggaaaggtccattccattttcaacctaccaaactttgaaagttcactttatggcaatgtttaggttctttaacaagacaacacaaatccacaagactgacatggcaacaagtttctcaatcagcagctttgccggccttcaaaatctgaacttcagatagaaagcacgttttgatcttaaccaaaatcttcgtcttctcgttgcatacaacacgagagaacagagatgcatccatctaacgaagtgtccaatgtgaccagcacatcatagagaagatgcatgacagaatggagaggcatcgatcatagatcaaaactgatcaaaattttacagagcatgccatgcacgcttcagctgcgatattacagccaaatcgaatcgattgagataactacatactgttgtcccttcgggcaacgacagttctaaaatcatcatggaacaggttgatgccatcagaagagggagttgtacgtcaggaaggttgacgcgatcgaagcagcgcagatcaccagagacggcagcaaggtcacattgaggagctttccgattcccaggtaccctgctgcagtgattgtgcagtcggcgaccacccgggccaaggtcccagcctccgtcgagggaagccccccattgtaggtgccacgggagagacgggacgacatcacgcttgataggagggagaggttcactcctgcatttgcagatacaaaatttagacggtttattcagtgctggctgaagaaatgagccgtagatgaacattccaagaaaaaaaaatgcttctcagatgtctcaccttcaagaacttcagcagacacaaatgtgaccagtgctgagacgacatactggacaaccgagtatgtgctcgtgattttgaagctgaaaataatgccgaccagcagtgtgatttgagacaccatcaggagttgcctgtcaaaaacatcacgcaatttggtaaagaggtcaacagagtctgaaatattgttttcagatgcagatcaagattctaaggttatcccttggttatggacttgctgcaaaacaaaaggaaagtgaatcatgtgatgccagcgataaagcatggaggcacaaacctgtcctcgaacatgttgctgatatatgtcccaacaacagcattaacaggaagaactgttaggccaagaattgctagaaatatcgccactgcacttgtattccaattgaaatagtgattggtaataacacttgactcagaaagtaaaatctccatcgcgtatttgagcatgaaatatatcagcaattggacctacacaggagaagcagagtaagtaataaagaaattgtggtcacagacttcgttttcagcagtacaattggcctaccatcaatgcaatgcaatgtaggggttggaacctaaggctctttaatgatttattctatcccgagatttattttttcagtgaaaaattcagttgtaacaacagatcgtctttatataaaagaatgaacgagtcaactaaaaatcaaaacccaaattgcatattggggaccatgaggctaactgtgctacttaaagatgcatgatatcaagttaatgctagatttcctctattgacttgaataaattagtaaagaaacaactttatgtgggtaaaagaaaaagaaagtcaggcaaataatgcaagcagtgatcaatttagctgaaataatattatacctttactgaaggtgtaagcaatctgtatgctgaaccaatcgaagtcgcgggtttgcgagaatcatgtgtgccttcttcgctatcatcgacttcttcgtcatcatcttcatcttttttgcttgaatctcttagtaatggttgtgcaagtccattttctagttgctcgatatctgccctttgtactgccatcataatgaacataaaataaaatcatgaggatggattagataattctttatagtgcaatatccaaccagttatgaagtaataaaaagcattagaggcagtacataccagaagcaggattttgctgggtaccattcacctcagtggcacgatttggttccttgaacgagatccatagccaaactaagtacagaagccatgcaacagccatcacccaaccaggtagagttgattggttgaaagtaaccatgtaaatcttaaatttccactgaagtaagccagctaatgcaggcccacaagccatgccaagtgcgcttgcactgacaaatcctgctgaagcctgcatgcgtatccttgcagggacacaatcactgatgtatcggcgattgacagctcttgcagaacccattctgcatgacaacaattacattaactaaacatgagacaatgctgaaaagatatttaactagcatgtccaatatcactaaaattttcttgtggccacaaaaacttattgacaggaaattgtgctcagatagaaacaatatgacctttgtagttgtatgtgaattttctaatcaataaaaacttgctttcctactatggttgcaaccaacgatgtcacaggaaaataacaaatggggtgtgttatatatattcaacagaaacacgttctatcccacactagaatatagggatgataactgaaaaatgcaaacataagactaattttgaagcaataaacacacgtgcagacacacacacaccccaaaaaaaacatacaaaaaagctaaaacagaagatgcttactagtatttaggacgcttacccacagagtagacggccaataatgaggactgttagggacttcatatcatatgccattgcgtagcagacattacccaagaaaagaacaatactgctgaaaataagtggtctgaaatatgacttgttggaccatgcgctgaagtaaactgaggaaaatatttgcgcaacagccatcgaaccaataacaacaccacaaacagtggaagcagccccaaggctcactgagtagtcatctgcagtcgggacaatgatatatgtgttgaccatgtaaaggaatgtgttcaccaagttcagcataagggacatgaaatggtatttttgatcttctatttcttcttcctctgcagtactaggagactcctcaccaacaattagggcatgttgccccaaaaatctaagaaaatttgttgagcgtgttagcttatccactgatgaatttatcatatcaatgattgggtcctgcgacgaatcaagaacaactcagtaaaaatgaagtccctataacaagctattctatcatttttcgtacaggatagcagcaaaaaagatgaacgaaccttaagagcagtagatggctgatcgtaaattgacaagtaacttccctgccgctcttgaaggtcagcaaggttacgtgacaacgctccaacaacagctccaacaccctggttgcataaaacgtgtaagttatactggtttgtgtttcatggaattcaaaaggcaagatcacagatccatagatgcaaatagtacaatacaatgcaaatgaaaagcagtataaaaatttgatgatactttaatctggagtcagtacattaccacatgcttgaagacctgctgtagctgagaatatgggtgattcgatctacttgtcacatagtaatcagtaaatctgtagccgaaacgcttgtcaaacttcttcaaaattttccgaatgccagtcgcattgagatcaacaaatttgagaagtttgataagatccaggccaacttccctgtaagcttctcgcaactcagcaatggcagatatatctggctgttctgctaatattgccctttgctttcctaatttctctatcctgcttgccaacgctccttgttgctccaacagaaataggacaatcttctcaatctgatgccacaggaaaacagaacatcagtaatgtaaaacacaaattttagtatggtcaattagataaatttgttgcatcaaaatctcgcacaagggatggaaccaggtgaaaacagggctcacatgtgagcaccagaaagaaaaaaaataaagaacagtaagtcgtcaactagaactgttggcttgtaacattttgatagtattactcagtttctacaagaaaattggtgacaaaactccgctacagtttatttaaaataaaactattgaaattcctttgcttagaaaggccatgcatggataatttgatatatgagcatatgtgggtaaacactgacatacagattacacatgctcaccatgttgatgctacactcagcaagctaaatatccacagagaagctaaagtctgcaattaaagcagatcagggagaatgaagtaatggcttttcatagcatctatctcttggcattacctgatcatcaagcatcttcgagaaatccttaagaacccggcgacgatctttctcaccctgttgaacctgctgcccgtactgttttactttcttcttcatcaacttgtagtttatgtagtacctggaaacatcggtataaaaaagaggcaaagctaaatttcggtaactaagtatcaactatttcaatgtatcattagactatcaggtttgttaagaaaaaaataataagtttccatagaaaaaattatctggtgaggggtggaagactgatgatatttacagaactggtaagcgtagaatggtccataaaaattaaagtaataaaagccctgaatcataccctttccattccggaatttgatcagccatcaatttcttcccaaagttaaccatcttgacttggagatattaaactgcaaaggaacttatgtatgtcaatacttgtcagcagcacagctggaattatgaacatatttaatacaattgatgagatgcgtgccatcaaaatggaacaggactggcaatttacaaagttaggaaagtaatctgcttctgaacaaatgagcactgctcaatgtatctcagtgcctttgtgcagacaaactgtgcaagctgttttaagcggaacaaaacgacaaacttagtagcggagatcaaaataagtgcaccagaaatacacttcatatgactggtttgcaataaggtcgctttgttgtgatgtcattcaagtgcaaggtttactatgcataaaaccaaaatcatgttgtagttttgtgcgcgtaaccgacgccctttcaatactcttaattttatttaggcagtcacacactactctgttctcagtaaccaatgagacatgcatgaacttatattgacaacgattccccggtccttttcagttgacctaacatattggaccaatgattaagaaaaaaaaacatggatgaacttggacaacacaaaaatgattcatggaaaatgaaggcacaaaaagcaaactatgcaactaactgtaacagtttagcaccagaatcccatgcaggcaactagaactgaacctataattcgtaaatacatccgagggaatggctacagacagcttttcgaagactggcgaaattcagtgtaaaggtaacttgtttttttttccaactgggccgtgcatgtagatcgcaaagtgaaggtatgaatctaatagcataaattctacaattccagccttacaaattccaagcataataaaccaacaaatacgaaaatcatacaaccctagacagacatgtagtagaagctaagtaaatcctaacttgtcaacctattcccaaaacctgtaacagatcacaaatcggagcggagcgactctgctcccaaccccaaccccaaccccaaccccaagttagcagttaccacaggtgcaacacctacgccaaaatcgagcgaaccggcggggatgagccggaaggaggtggcggcggcggctggagggggcgcgggtgcggaatcgggagcggagggatcttcctcggcgggagacggcggcggcggctataccgggaggtgacgctggcgctgcgcgacgccaaggccgacttctccttcctccgcgcgcgggggctccgcaccgcagcctcctcggctccctcctccgctccaccgcctccgccaccgacgactcgcagctgctcctcttccggcattcccagcctatccccgaaccaccccgcgctaaccctcctcgcgtaaacaagtaaaatcgaagcgcgaattcgcttgcagccggaggcgatctcgccattacctctctcttcagcccaacagcgcagcagaagatcggagatccgccgcgagggagcgcggattggggggaaggcggaggaggaggaggagcgcgggaggcggcggcggggcggggggtatttataggcgcgagaagctaccgcggcggcgagctcgcctctcttctcttctcttctcgggcgagccaatttcggaaagggaacaccagctttccgcttaaatcgcggtgatatattttttatttttttaaaaaaaaatatattccggagtgtccacatcacacgccacgtggcgctcgcttgttccgatcattgcagcagcggcggcggtgggtagatcgaggggtacggttgtgaatattacgaaaggttgagggggttttgacgaaatgtttgctctcggcttagctggcagccgaccgatgcgcgcgtgggtggtggggattttgcggcggccgcacgttctcttgctccagcagtactaggttggggcccacccgtaagagcaagttcaatagtatagcccattaatgactccaattcacctatagtcaattcatacaacagctatttactatgctatttatatgtggtcccatctatcatacgcacaatgtgtcttaaagtccatactgcaattggctacagatctgtagcccgctgcttttttctctcatattttattttattaaaatatgtttataactggctaatagtccgctattgtttttactctaagtatgcagtgaacaagtggatcatgttgcatcgtgaggggaaaaaataaataaataatccgatcaaatgttggcgccggcggctcaacaagtccacatcattgctggttggtggacaaacattccatcttaaactaattgtttgagccatgattgataagtaaaacgaatattttattataagtcgaaatttctatgtattttttgtttgcggtttataaaatcaacattgaaaaataaaccatgataaaaaaatttagaattaaattacaaaactcaatttttagcagtgaataattaataataagttgacaagcatacgacgatggccacacacgcaacagaactgttgaacaccattccgaaaagaaaatctctggtgcggtaatagctgcacttgtattttaggtctggtaagaaacgatattattcctgagtaatttatttccctttccccgaaaaaaaaagaaaagaaaaaaaaataaagttgaacaccacaccataaacatgcggcaaaacgcaagatgaaaagaaaagcaattattaaaacccgtcaaaaatggcagtcaggcgagtcattaaccctgaccacaagatcgacagccagattacaaaagccaagttggtttggctcttctcgccttcaaaccggctgaagattagctcgcgtccgatcgggacaaaaaaacttgatttggcagcaagctgaagccgacatcaaaataaataccatgataataataatgcaacacatggccatccttatcctaattatggagtattaatcaactgaaatatttactcctagtcacactactgggccggattagtgcatcatcacgatctgtctgtctatctatcgaatcaatatagaatccaaaccgattgagatggccggaatgaatggagctttcagtttcaggccagaccatgacttatgatcgccaaccaacgaattttttttaaactaaggcaattcgatatgtgcctgcgagcactgtagcatcactgtagcgcactgttcacgcaaccctatcgaactttggctgttcgatatgtccctgcctagcattgtagtgatactgttcatgtaattttttatttatttttggaccacctaccctgtcgaactcacgcagttcgacatgtacctgtcgaactgtggttgttcgataggtatccctgtcgaaccgcggttgttcgacagggtgctaaacttgcgatttcgcctaactgacctatagttttgcgattttccattaaaatcatattgcttttaaaaaaaattcgccaaccaacctcacattgttttccatgtgacttgtcgtagctaaaatttaaattttaaaagttactattctttaactaaatttgatagattatattttagaaaatacaacacagatgtagatgttcataaaacacacactcatttgtataaacgcacgcaatcacattttatttttataagcatcggcgaaagactgaactgacgtatttgagattgacgaagaacaaatatataaatatataaaagttctaccatataagttttctatgacttatcaacggtcgatagagcaaacgagatgaggctagaagggaaaaagaaaacaaaaggcaatgtaatcaatggttcaaatcgtggtaggctctgctgatgtgggctatactcactacgacgctatcttcggacagtgtagatcaatcatgctatgagatgagatgagatatgatcgacggcgacgagacgctgcatgtggatttgtgctggaacgacattatcttttcgattatacttatatttataagctaaaatttaaattttcaattttaaatttgaagttgattgtaaggttttttcatcgaagttttatttttcagtctttgcttttaaatcgctaaaaacacttatgcaaaagttttatttataaattattttttgtttgcgaatatgccgtttcggggacggaatcaataaactgccggatgattatatatgaagatgataattaaagaaacctttttggtagcatgttgccgtcacctgaatatagggaaatgatcaggcctgtttggaagagtgtagggttcatatattatttcgtccatataggaatatatatatatatatatatatatatatatatat

SEQ ID NO: 7669 - DNA, 26291 bp, Oryza sativa
ccccccccccccacccctcacctccattcttgtttctctgtatggagttgcaacggtgtcatttttgttttattttttcggatgtattttcacacttaagatcacgatacaaccaaccacaaaaaaaattaaacttgaactaccacttagctaagtctgaaaatagctagcataccacttaattagtctactttgcaccttcactaaaattagaccataactcttttagtaaaactctttgatcaacatgttaaacataggagagatcctttagtaaattagactatataaaattacttaatctaattcaaaatataaccacatgaaataatagccataagttaaccagtatagagagatgcaatttttttatttttatttcatttttttgatatttttttcatacttaggagaacataggaaccaaccatataaaaaataaactcaaacagacaaattatgtgactcgtagaattttccaaaactctaccgaaatggacaaaatatgtgacttgtagaattttccaaaactctaccgaaacggacaaaatatgccatttattgaaataggcgtaactttctcatacggactcggaatcaagcaaataatatatccacggacatttacagaaaaagttacacccgattctcttcagctttgccggattcggcgatattaaaacctccaaattccacttgcaagattatgttttcgaggagagaagtatttcgatagagctttgaaaaatttcacaggccacatatttcgtccgtttgattttattttttatatggttggttcttgtgagttcctaagtgtgaaaaaaatatcaaaaaaataaaataaaaataaaaaagttgcacatctctcttctctgcactagttcagagagaggagagaagagaaaaaattatacaggtcacatattacgtccatttgagtttttttttatggttggttcctatgtgtccctaagcgtgaaaaaaatatcaaaaaaataaaagaaaaataaaagaaaaataaaaaattttgggggggagggggcaccagccactctggcgcgctccccctagtcacctcagcatcgccccgacacgttggcagggggacggcgccagccactctggcgccccaaaaggaccatttctgaaataagtttttttagggatctatttgtaaaataagttttttaaaaggactaaaatgtgaaaaatccagctctcccaaccgtaacgtttacctcttcttcatcaacgccaagaggcatggtccaaagcctctctgcacaggaacagcagcagcagcagcgcgccgctgtccccggaaagagagggacggcgagagattggcgagtagcaagtggcggagccctcgcccggctagacccagcagccgcttgttttttttttaaaactaaaccggcaaaagaacagccaattatatttttaataagtaggagtaaaaaccctaaatgggttacaagaaaaaaaaaacaccggctggttgaacagctacacagcacacgccacaattcattagcaactgaaaccactaatggaacccaacgtagagttgtcgttaccaagcttgataaaaacaacatgtagggtttggactttgcaaccgtgttatcgttgtcgagcttgccgccaaagcgacacaacagctccgactttaccagcaaccgcttgttatattgataagttaattgatggtaaaatttctatagcaaatactagttatattaaaatttgttcggactcaaaattctttctgactccatcactgcgagtagcgtggcggatccaccccgcgcgtgactgcctctgtgtttgtatgtcagtatgtgttatccttagcctttggttggttcagcgagacgggcacgctggcctcctcctccggtttgcttgcaaacttctatcgtgacacaacacacaggaacggctgctacttgactttgctttgcagcgatttttttgactcgttttttagtactgtagtactccagaaaatttgtcatggctgttgctcacggatgagatgactcttcttatgaagttatgattgattttttttcttcttcacacatattgaactgatcttaggtatggtttagttcctaactttttcttcaaactttcaactttttcatcacatcagaactttcctactcacataaacttttaacttttctgtcacatcgtttcaatttcaatcaaacttctaattttatcgtgaactaaacacacccttaaataaaagggagactgaagatatctgggggcaaggaaagctggttaaagggcgagaggtttggataggaaattcttcttgctgtcagtcagtacggcagcatacatacgtcttctttttctctttctttacaaaaaggagacgaggaaaacacttcagtacacaagcatattgcgtgcctacgcttctcctactttacccctcttttcctcgtgttctcagcaaaagtctaaataacacgagtttcttcctttcggcgcacccgtcttcttcctgttttttttttaaaaaaaaaaagaaaagaaaaagaagaagaggaggaaaatctgccggaccacacgtgggctttaaacaaacaaaagcgttgtgcaaatctagcccagcaatatccttctggcccattacttctgaaccaaaacacagaggccaatctctgggcctctgaatctccgaccagcccaactccaccacaacagcaacgccgccgagtcgccgacgacgccttttggtgctcgcggcggccgatgtaacgagcggttttagagaaagaaaccatgggcaagaacacacgacttcgccccgcgccatccaccatcttcttcttcgccgacgtctcggccggggccttcccttcgtcgctctctctatctctctctgctgctgcacagaaacagctcgtcgtctgcatgcgtgtctggctctctgtgtcgcgttaactgcgtgcatcgatatctgtcacctgataactcaatgcacctggcaatggccacgcggcgccaactgctattactccgtccagcctaaaataacaacttgtattctctaaagtttattttaaaatataacaacttctacactaacattcttttctcaaacaatcaggtaatcacaaccctctaccattcaattttttcacatacatctacttctcatccaaacacaattctttcctatttaattctaattactttcttaataactgtgtccaactttaaaaatacttatattatgggataaatgaaattattccatatttaattttaactactttcttaataaccgtgttcaacttaaaagttaattatattttgagacgaatggagcagagtaacttgtactacctctgtttttcaatagatgacaccgttgactttttctcacatgttcgtcttattcaaaaaatttacgtaattataatttattttgttatgagttgttttatcactcatagtaatttaagtgtgatttatatcttatacatttgcataaaatttttgaataagataaatagtcaaatatgttaaaaaaagtcaacggtatcatctgttatcaatgaatctgaacgtgagaaatttgttctttataggacagatgtttcacaaggctggtccgctggtgtgctcatgatgatcatgcatgcgcagcaacagcacaggtagcgggcacgtctcatgaatgccgcgaggagtacagccactgttgctacgtgtactcttctcctctacttttgttttatactccaacaacgcagcactggagtaaatgcgagggcacgtctcaggaggatgcatgctgctgcgtgtacactttgcgcgtgctactgcgacaactacggttgccggccggccggccggccacccgcggccgctacaggacgcaggtgagggtggtcctcatagctagattggccatacatggcatcacactcaattcaacacgggacaacactaattgtttttcagctagcggaaatttaggccctcttcgattcactgaaaaattataagaatttcgtttctataggaattttcttatatggattttaaaatcagaagaatgaatattatggaatcctacagaatatctcattccatacaagttttaaagtaaatttaacatgaggtataatctctagaaagctttccgtcgagtctttatgtctactcaaatttatatgtttttcatgtggttaaatcagacaaacattcttatgtttttttatgtgttctacaatcatttattttacacttgaattactgttagaatcctgtgtttttttatatgcttttccattattgcgattcaaaatatgtcattaaactataaaactcgtttagaattgatgctgatgttcttttttgttataatttatttttcagcattgtttttgtaagttgtgagtcgtgaccatagcagctacactacatggcatcacactcaactgaaacaggacaaaactaaagcagacgacactccaaataccaccgccgttcctgcatccattttgaacggacaaatttcaggctgcatctgcaattccgcacccatccactactccctggaaaaaagaaaagaaaaccttttctgctctgaaactcgtgtgaagcttctgtcttccaagcaaagtgtgaagcatagcgattcgaatttttttgaacccaaattcggttcaaaaattaaatataaatcacagcaatcaaggaacagcacggatctcgatgcgcacactggacgccgagtgagatacgctacgccctgcggatggacggacgcctgtactgtatgtagtagtagaatggaacccgacaagagctgctctctcacaacatcggatacccacgcgcggtttccgaggcacacgccaaagtacggttttgccccccgcgaataactgcacgggcctctggttttttccttacggagcgaagggtagaatcgggaacagaaaaatatttgttgcgctccggggcgaaacgaggcgacgactcgccgattacgtgcgcgtgggacccacccaaaaggctcacagcgctctcgcaacatttgcagatgacaccctgaaaaattctcctaatcccctccatgttcaaccttacgcttttttagtacggggaggtgaatgtgatgaagtgcagggggtgatttgtaaatgctgccggggtcaaatccggcactggcccgatttcttccggtcccgaccccgcatttcaaatttcctcctccgcctcctcctcctcgtctccggccaccgttaaatacctcgccgccgaccaccaccaccgcggcggccctgaccccaccctgcgagccctagccatggacggcgacgacgaggatatgcgcgacgtctcgtccacgtcgtcctcctcctgcggcggaggggagggcgcggggttcgaggaggggatgggggagggggtgatggtgatggaggtgaggtggttcgaggtggacctggagtacgagttcgacgcgcccaggtggttcgacctcgccgtggaggagtcgccggtggaggcggcggcggcgcagctgtggttcgcctccgcgcccagctacccgccctctcgtgcgtgcccatccatccctacacctcttaatttattgtgatgtttttctgcatggcggggatgattcgggaaggggggttgggtccttggggatgggatttagttcgatcgatcgattcgcggttgaaatcgtcgatttagtatgtgcgccattggtgggatttctattatgcagtgtgttctcccttgcattattgatccgagaaaggaggtttgggagtccctaatttcgaagtgcttctaggggcagcatgcacatgaattttctgaaatactcccaacattttcagaccagcatgattcaatagagtgtgaaatggttgagtgtcatcaattcgggtcagcattgatcacttagatggatgagggatgcatttaacagagattttcctgtttctaattgtgtaatttggcctcgatgttaaagtttgattgtcaaccgcaatgagtccattttcctgataataaatgaagaagaaaaagctatgctgttctcaaggaaaactgatgttcttgagatgttaatggtagagaaggcacccacaggtatccaggcccatagcaaaaaggaatgtatgatgtagcaaggcaatggccattggccttttaggtttctttcatgagcatccacaactaagagacatcttggaacatgtgactgcaacaaacagactttggttagttgcaactaatttggtgtattcaccctaaaactttgacaactaatgctagatataaattgtaagctggtagagttatgtttgttagtatatactttcctggtatttctggtcttctggaattgattaaatttacatgtgttacaaacccaaaatgatatgggaggtgaaagtgaaatatcatccttggttgtatgcatcaatttttggacaaaactacgatggatagttcattgttttactactcaagccttttctattatcattaatatgtaagtacaaatatttttttggttatttctgtagttttaatgtttagctcatgacaaagatagaactatcatattacatgacagggaaacttatggttacaacactagcaaggtagcataaaaaacagtaacaagaagtgaataaaatatgtactactactataatgacacttgtttgattatttgacctgtatgaattatggaaacgttagatgttatttttacagtttaactcgctattgaactgtcattacattcatttttcctttttaattggttattgccctttgttgtcaacttaatatgactgaaattttctctgttgtttctgcagccttaattgccaagatgttggctgaagatcttgggttgcaaagtttaagaagcactgtggatatagatgcagcacattgctctaaatcctctcatgaatgttccaatggtgctgaacaaacgatccatcggccacatataccaaatgaaggtccctataagcccaaagttttctccattatgttttttcctattgcatttcttaccatatttgagcatttcatttagcctgttatgctttgatcttttacccagcttcttttatgtaaaataggaaggataccttgccatcaagtttcagcgaacgagcgaaaacatggcgttcgaactattggaaaaggaactatcccaaagaggtctacactgatgaagcctacagccagtcaattagccaggcaaaacagacaaattgaagtgaagaactccacacagtatgtaaatgttatgccttatgctaattcatattctttagctgtcctagggttggtacatacaaaatttggagtattattctctgttggatgattttataacaattttctgattttgaagagatgcatttaccctgccatacttgcagttccatgaacatgtgtttcttgttggtttactcacctgccattcttgatgaattaaccatccactagcattgatcttaaccgtttatgtcagtatatgcttgtgtagccatcacgtttttctctttcacttcattatttccggactttcaccacctttccttttgttttagatttgcactgcaaggatttttcaatacatttaaagcaaatgctgtcttcatgtttctgaacttatgtaccaatttgctttactatcaggagtaaaaagtacggttggggtgagaagtgatagaagtaccatgagctccaatgactgcacctaccaagctgctaaaaggcagagactagaaagagggcatctcaacaaggtattttgctgttttttattttctggggggtatgaccaccccaaattatctggtgaagttgtttcttaactgtaaaacacagtgaagtttgtcggtacagttttaacttgaaataccacataattttggtagggcatttacctttagttttgagattgcatactagaaactagattatatttgtctggattaatcgagaatacttaattgactacagtcatggttctcatggcaactgacaatggcagctaattttttctgttagcatcgccaaagtaatagccacaaaaccatttatactgttttttcactacagagtgatcagtgcctatttgatattgatttgttgcataactagtcactgaagcttctttacttattgcacaggttgtttcaactaatcaacctgagttgatccataagaatcatgcaaaggtcaagacacctcaaacatttacttctctctcatttcctaggaatatttcagctgttccatttcaattctatagaaaaaattagaaaattatttggactttttatactatagtttttcttaaagtgcttgacatactcctgcaactagccaatcatagctgttatactatgcattaacaattagggatgcaagcgggccgacccgcaagttcacttataggtcaaataaatgataattcatgggttttcgcgtcgtggtccggtttgccgcatctagatatgcaagtggatcgatccataaatccatttataggtcaaattaataggtaacccgctggtcaaacccgcgggttacgtactaattttgcctataagcgggttcgcggacaagcccacttgcacccctattaacaatctctaatatagaatataccttttatgatacaaaacatgctcatcgtgcaagtttatacatgatttctctgaggctgtgcctcaaattttgcttgacgatgctttctcatggttgacacagaatgttatgactagtagctctgatcatgccattgctgtaccaaaattgaagattacaattcccagagaacctgaattggcaacaaagctaagagcagagaggtcaaggatactcagagcagtgtaaagtcattttctctcgctctcctgtttgcctgaatgtcaagtacttctaggcagctcatgtccttttcttgaaatttcaggccaactaattcaaagcagctaaacaaacaggcggcacaatccatttctatgacacaagcgtcatcgattagaaaggtggattacattactgttgggtttttgcagcttgttctggttgtcttcactaactattaaaaaataaagtaggttactcacacttacatacatgagcgagccctgccagacaatatgtatgactcattctatggttttcaatttttggaggatggcaatactcagtttgtttgatagagttccctaatctcaaagaattttagaagacggtggcacctgtgaggccacagaaatattcatagcagagatgtacatgtcaagatctcaagagaatgttgcttttttaatgtataatagcacagcgtcttggtggctgatagtgtaactgtaactgtgacagttcagaaatggtttcatttatgttttgtccaaagaaacaaataatttgtagaaatatttagaaaaaaaacattcagttcaatcagtgaaagtcatacacatagtttttaaatcatcttttccaatttattatgtgcccttgtacactattctggatctaattgcatggttgaagctgttctgtttactgctattttctgccctcaaagttgaatcattgtcctgtactaggacaggcacctctacatttagatggttaacttttaatttgcactatataatctttattctctgtgaataggttgaaacgacttatcatatacacactatccatgcctactaaaaacttggttctctggcaggttgtgcaaccttctgggcgcaatgatcatcagcatgcaagtgttccacatcgcggtattgggtcaaatgtgccagtgtgtactgctaatcgtccaaggcatcttgacaagtaaggcttgttttttatatacctcctcacttctagtcccattactatttacataatatccatcctattcggcagtacaaaggaaagtaaaatatacctcctactattctcttgtaagtatttcctgtaattttctagttttggtcaggacaggtttcttcatggaaccaaataatgcaatagtaaagactgttatgcttttgattctacccagtacctatgattttcccaaggcagtgaaacttcagaatgatgtgatcttctgtaaatagagctgaacttgtggctattttctgtgctctgttaacagcatttgcaaaacgccggatgagtgcagagatgacctgtttaaatttaaagctcgaccagtggataaaaaggttggtgctgtggatggatcttctatgcttgctttgaatcttttagttcatactgctctggacctgtttatctttgaagtttgaaccctagtttccaatggcctggatagcgcctagttgtattgattgatatacctgttgcaatttcatgttctgggtgtcagtggccctacttttataatacagataggaattaattgctgaatatgcagttgcttaagaaacaaccctacagacagaatataggaaagttctagtttcacatatttgattaactgcaaatgcagccattgaatcttacattttctttgccttggaacagatactaggaagcaaaggagatattggtgtatttcaaaatgccaaaaggagcacaacagttcctaaggttctctctttctctgtgtgtgtgtgtgttgtggtttgttataaattcctcactcatatttcttgcttgaaaatcctaggaatttaagttgtcaactggtaggaagggtaagcaggctccattatctgaactcttcaacaaggtacgtactgatagaacagaaactgattgcccttactccttagattatttgctctgatgtttactcgtattatttttgaagctcactttaactactgaagcacgccgtgctttagatcaccggactgctgatcttccaaattatattaccaccaaggttctttccttgtttcaatttagcttgtttttactcccttgcgcctttaaacaaagtaactaaaatatcactcctaatctaatgcaaggactgcaaagagaacatgattggtaacatgcaaagctagctatggtaggtaagtaatatttcactgccatacggggcatttatcatgtcgcttctcaagttagaaacaagtgcatcacacccttccacattttaccatttttcagatccagtcagtcaagacatacaaaacataggaattcttctctttgacaattcctggttcagattccttttctccacctgaacaaaggtaaacgttaactcctaatatttcaggtttcatgattcgcaatttcgcacagtgcatcatgtcatttcacaccctggcaactttccattatttttcagcaatacatttgggtattttcatgacactgatacttggggtgaactactgcattgacattgctctctactaccatgtaggctaagcgtctgttttggacagtaggatctcgacttcatttgagttttgacaaagatggagcgatacattattttgacttgaaggcaccgaccaaggcaccgtcccggccatccccggcaacctcccgtctccgctgccgtgcagctgaacataattccgtacctgctcgcggccatggcggagatcgatttgtacagagaaactaaccatgacgccggtgtgtactccagatctgtaacttgttgccaatcatcatccagcaaagttgcttgcttgcttctctctccttgcatcgttcaaattactgggaaaacaatgttagccaggaaccatggagatatagtcacagagatactaactccatgggacccgtagctctgaattctgatgctggtcgggcaaagacgggcatacaggcttgtccaaccagaaaaatactgtggcatggtcagggtgagcacctgatggctgatgacctgacctgacctacatagagtagatgccatggcagtggtgtcacggtgtacgtgtgagccaaactgtacatgtcaaacaagtgtagccatcatactggagtagcatgggatcagaacggctcaggcatctcatctcaacaaaagttagctgctgctgctgctgttgctgtggctgcgtgttggcacgtcgcgtcgaccggggccaggccggctaaagcatggaagggacatttgctcgcagatctgccattgactagcagacgatgatgcacggaatggtcaggacgccctggccgtggaggacactaggacggcttgcgttttgacgccccaataggagttcacagtccagtccagtttctgctagaacctgtgacagattcaacatcatttgacgaaaaccaatcaaaaaccacggaatttcgaggttccaacgcaggacgaaagtagattccgggtgaaatgtcgaatggtttttgagaattcaaatttgaaatggttaaattcaaatgaaatttattcaaaatttgcagaaaaatgcaatctcgttgggggctgggatccagcactcaatccaaaaggtgaaccctagtcctagccgagaagattgctactgctaggaagggttaacgtctcgacgaatttctaacatcttttgagctggctcgaaatgtgcatatcgaatggttttgttcaaaattttctgaaattcattcaaaattaatggaaaattgatgtcttgaaggggctcgggaattcgctagccaatcaagatcataaacccttagcctaggaaacaagtaaaaggacaaggaattggattactgttctttcaatgcaaaagttaacagtgacatgcctaggagtggatacaggcagcagctatgaatatcattcaacagtaagagcagccagccagctacactccatgtctgatgaacagacacagcaacgagccaacgaagcaggacataaatactaggcatggagattcagagtttcagaggcagcagcagcagcagcagcagcagcaaacagacgtacactaacagcacagcaagagtgaggcagagcaactaataaataccgtcaaaaaaagggcatttacattagcacaatcctgtcgatgcaggaatgcatggtttcaattcaatgcggcgtcgtcacacaccccaggatccaagaactgatggcctccctctgcctctctgatcaaaatatattacatcataaagacggcgacttcatggcgctcacgagacatctctgaacctgacactgatctactcactctctcttgaataccatgaacaacactagtatgtcactgcaaattcctagggacaatctttgggcaatcctagatcaacaccaagaagaagaaagagtcaagaacaatggcattaacatcatcatcatggtcatctaacttcagatcctacatctagctactatttcctgcactgtgctactatccttttagcatcttggggaggagaaaattttggaggtttggagaagatcacattgtgtgcttggatatgacctcgccgaacctgacgaaccactgctcgtcggaggagctgttgtcgccgatgtcggtcacgtcgtgccctcgcatgtcggccgccgtcgtcgtcgacgccagcaaccgggagtagtccaccgtcttgggcgttgtcatggcggaggccggcagcagggagagcagcacccttgcaacctcgtgcatggtcggccggtctgaagggtgcctcttggtgcacagaagggcgagctggaaggccttcctgaccagtcccatgtccgtgcacgtcactgacacctccgagtccactgcctccatgactgtgttgtcatcagctttggagagtatctgaacattgacacaagatcttgtcatacaaatcatccattggatcatgctagaaaagttctagaattggtgataattttgcacaatgtgatgagaggatggagtggaactgtggaagtggggtggcttaccaattgatgcaagttcgattcgttgtcgacggccttcttccctgtgagcaattccagaaggacgatgccgaagctgtacacatcagatttctcattgagcctggaagtcctggcatactccggatcaatgtagccgatggttcctagcacataagtggaggcatgggacttggcagaggggacacatttggctatgccgaaatctgagaggtgcgcttcgaagttctcgtcgagcaggatgttggaggacttgacatctctgtggattatgcgagggttgcagtcatggtggagataggccagcccttgtgcagctccgaccgcgatcctcagtcttgtgtcccagttgagcttcactttctttgatggacctgaaaaggatcatatatagatcataagggagatgcataatgataacaaattatccatgagccaaaggtttcaagccctaaccgtggagaagatcccacaaggaaccattttccatgtaatcatagaagagcaagtttccatgtggagatagcgagaagccatggaggctaacaagattcctgtgccgtatgctgccaattgtctctagttctgtttcaaactctcggaggctatggttatactgactgtaaagccgcttgacagcaatggccttgccgctcttgagttcacatttgtagacagtgcttgaggcgccatagccaatgatgtatttctcgctcaaattctctgtcagcctcatgatgtcctcgtaagtatggatagccatgtccatctggagaacaactagctttggaggtcctgaatatgattaagaaaaggttaagatgaattccattatgccagcatacttgctgttaatttcatcgacgacaactggaggggtgagatatagcgcacacataccttgcactggcttatcggatcctttgacaagtggctgtggttgatttgttttatatatagccaacagcagaacgcagagcaatatgataaagcctaagataatgcaagcaattgctgtctttgaaatattaactgcaatagaaattaagtgaacatgtgtttagcagaaaagcaaatggagtgaaaagctacaaggggttagcttcttgtctgatacctctttgtccatgagagtgtccacagctggaatcttggcagtaaacatgcagtaatggattacccaagaagctgcatttatgatttatgtactggttgcaatcagaaattagaagatgctaatagaaggataacagagattgtgcatggtgccatcttatacctttccattgggaatttcgagaagttctttgccatcgggacatgtccagataaattgttgtatgacaaattcctgaaatgcacttaaggataaataatcctgcccaagttatcaccagtatacaatgctacagagcagagcttgcacacaaaacttacaggttatttaagctgaagcagttggccaattgagcagggatctccccaaccaaattgttgttgttaagaatcctgcatgataacaccatagctcagtaaaatatttaggtgattttcgatctcacacgcataatatgaatttatgatgatatacaactcacaggctatcaaggttttgaagttgtccaagttcctcgggcagactaccagataagttgttgttggacatatcactgagaatttaaattttggttcagctgaatcatgatgataggatggcttcaaacagataatagttagttacatgtgtttcaagggaacacacttacattacttggacgcttctcaagtttccaaactcagcaggaactggcccatcaagatggttcttactcaaattcctgcagtcaaagcataaccatttaggcatcaagtaataatggccatatgaaataagttatggttttttcattaaaaacagtatggtttctaggaggttggtccgcaacatacagttcaagaaggtgctctagatcaccaatggtagcaggaactggtccagagaattcattgtaggaaagatccctgttcaaaaaataataataaaggaacatcatttagcgcccacaggtcttgtaacaccaggtaaataattatagctaaagtttctacttacaatgtgtccaagttgatgatgtgaccaagctcagaaggaatattgcctttgaaattgtttgaagataggttcctgtattttttaaatgtatttttaagcaagaaaaacattaggtgaactacaataatttcgccgagtgaattaaatgattactgtaagcataatgcaacagatacaattactcacaagtaagtcagactctccaacttctggaaaccagcaggaatagaaccatttagcttattgccataaacattgctgagaggcaaaaaaaaaacatgtttaatcatgtggagtaaaaaatgccctgttaacttataagttgacttagtaccggctaacttacaatttgtttagagcagtgcaagaactgatgtttgcaggaataggaccttgaagattgttgttggcaagatttctgcatgcaaaatttggtcaacaattgcacagaataaaataaagcatactacgtaactcatagacatgataaaatttcttacagttcaaaaagctcttcaagtttgccaagctctgctggaattgtgcccaccaattcattatcattcagttgtctgcatggaaaaatttctgaacatcttatagtgttccacaccaactggagcacaacaatatctgcataccatataatcacttacaggtagctaagtttactcatgttcccaagctccggcggtatgactccagtaagtttgttcccatgtaaatatctgaaggaaaaggtgacagtaggtgttagagaagagaagaaagcaatctcagtgaaaaagaaagtctgactgatgatactaacagttttccagtataggatagattgcccagtatagaaggaatgggccctaccagctcgttctcactcaggtctctgagaataaaaaaaatgaatataagaattcattatccaatattacagaaactactgaatttcagtcaaaaaaatattacagaaactactaaaacctatggattgaaatgtcgtgctctactcacagaacagcaagagcttgcatcaggccaatcacatctggaattttcccagtcagtctatttccttgaagtgacctatgaacatgaatagaaatggttcaacataaaggctgtaagtaaagcatctatatgcataagagtgaaacagcagattacatgttagaggatttgcaataactcaggaacacttacagtgtggctacttgaagaaagcctatgttgtaaggtatttctccagagatttggttatacgaaatgtccctgcaatacaaataagaaactcgcattatggtgtctgaaactcatgaacactgaaatattactgaaatcttagcaagaacatacagaatctcaaagctggtgcagttccctatgctctctggaatggtccctgtgagattgtttccccttacatcactgtagattaagaacagtaaccactgtcaacaaggccaagttgcacaatatgcagcaacatctccaaagggagaggagatgacttacaagtaccacaggccagtcagttggcacatgtcaggtgacaaagttccagtcagtgagttacccctcaaacctctgaagattaagagaagcaaagtgttaatgcctgaaaaataccttcttatactaccagctaaaacagttagacaattttcttttataggattcttacaggtattgcagaacttcattccagtatatgagccttgggatatcgcctgtaagctggttctgtgccaggtccctattccaagataattaaggaaggattttatcagtaagtaagaactagtagtacttaagatgcaaaaaatgacacagcaagccatgtttcccgtggcacgcacattataacacaaaaacagttaaacaagtagaagtcagatcacccagtttgtccaagaaccccaaagaagtaaatagtcacggatagagtaaggtactaagaggctcacaatgtcttgagatttggaatttgggacaatgtggaagggatgggtcccgtgagctggttgttcttcaaaatcctgcatcaataaatgagagagaaaaaatgttaccactacaacccaagcatcgcaaaaccatgaaaaaaactactactactccaacaagatgttcagtatcataatctggattctagaacaagatgttccaaaacttaatgtaaatcaattagtctctgatgtctcagtattagcctgaactttccaaagaagggagaggaagtgcccatatctcaacagctataggccatagctcttgctaaagaaaaggtaggaaaagatttaaaaaaagtagagcttacagctcctcaagctgcttgagcttggagatggagaaggggatgtctccatacagcaagttgccagacaaatccctgcatggcaagaatcaaaagagcccaattaaaaaattagctagaacaccctgttacaaaaagtaacagaataaaagaagacttagattaggtgaagtacaaatattttaaggagatgcagtccccaatctcatctgggatttggccagtgagcttgttccccttgagatcactgcagagaggcaaatcattagagcacaaataaactaatcagcgagcaaatccacaggcttaaagtaaaatagtaaagaactgtgtcacatcatggcatgaggggtcaaatcaggtgaagtgtgcaggattataaaaagaaaatacaggctagtcaaatgcacaaaaactcaggtagatgcaaagcaaggggaaatagtactctctactcatatccgtactcacacgaactgtagattcttgagctctccgatggccggcgagatctcacctcctaggtttagatttgacaagttcctgtttttcacacagggaaacactctcatcacaaaaatcctttttagcataacaaacaagatagcctcactaatatccaaagacctacgcaagataacaagaaaaacccgtttcttttccattagatatatacgataacaacaagattatcaagaagaaacattcacagcaatctaggcacaaatagaccaaccaagaaaaggtttttattcagaaaaaaaagggaggcaagaatagaacagaacagttgaactatttgctcctcctgatcagaatgccagagcgagcacggcaagagagaaaaatcacatgaagcacagagtgcacgctggaaaaagaaaagaaaagaaaaaaccaacagccaccacaagagaagattgcaagaacaagaacgcaaccacccgcgccgccgcgcgccatgtctgcccaggaaagaacaccgagcttcgcagggaggaggacgtacagggcgaggacggcgaaggaggcgttgtcgcaggtgacgccgcgccacgcgcagtggtcggcgccgccgtcccagtcgacgagcgcgttggccgcgttcccgaaaccggccttcacgcccatcagcgccttcccctccccatctccccctcctcctcctccggaggccgcctccgccaccgccacaccaacaaccaccaccacccaccaccacagccacggcgccctcgccgccgccattgatccaagaaccaccaccacctagcttattccctctcaagccgctcctcctcccccctttcagggcactcgcactcgttgtgtcactagtgcatcgaccctggccgagttaccaccaccaccacgaccaccatggctctctctctctttctctgagctctgatcgatcgatgggggggagcaatggtgttttgtgggggtggtgccgatagcgacgtgactgttgttgctttcgggaggcagccgctgcactgcactgcaccgcagcacgcagcagcaaccaagagagagaaagaggagagagaagagagagagaggggctcactgtgtgggtgtctgagctgagctgagctggtgccatggtggtggtggcaggagagagaaagaggaggaggaggaggaaggctgacaaagtggggcccacctcgtcagtgagtggacccggtgggtaggggggtacgtgtaggcgtaggggcccgtggcttccagtttttttcaaaaaatctctctaccacggttggctggctgcttgatgagtcgatgacatgtgggcccgggtcggcttgggcgatcacatgtcagtgggtgtgggcccacatgtcagtgtatcggtggacgagggggtttaagctaggcgggtttagaggaggcgcgcgaaaaattaaacgcgatttggtttggttggttaattttagggggggggctcgggatcctctgcggccgtaactctgtgagcggctgccaggtgggcccaccggggccatctcgtgtagtacaattttattttcaattaattaatcttgtagtacaagacggaatgtgtggcgccgttggtgatgactgatgagtgatggccatgaccagccgtgcaccgtacggcctgtcgtctaaaccatcgtcaagagctgatcaagagatgaagagagaaagataatgaaggcaatgaggagtgtagcagatgatactaacatggatggatgtttttgtactgtttgattgccaattaatttctggctagctaaaccaatcaatcgtatgaatcgtggtaggtggtggtctcggtagaccagatgtccctggagtagggtttgctcaattgtacacatgcatgcatcccacatgagctagctgattgacatatgcacctttgagattattcctattaattcgtgaagatggaggtgagatataaatatgggtaaactaaaatactatggctgtgtttagttcctttttaattttttttacgtatacggacacacatttaaaatattaaacgtagactaataacaaaataaattacatattccgttggtaaactgtgagataaatctattaagcttaattaatccaccattagcaaatatttactgtagcacaatattgtcaaatcatggcgtaattaggctcaaaagattagtctcgcgatttacatgcaaactgtgcaattggttttcggaagtttgagggaactaaacacaacctatacatgcaaattaactcggctattgtgggtgtttttcaaattttcatataatatttaatccattcctatagttaacatgatcatccatcagcattcatttatagagatgacctctgaatctcgtgtacataaaaccgaaaaaggtaaaaatatttaaaattgcccacccaacctaccctgaaaaggggaaaaaaaacacttgggctttctttggaacaaagggaaaatgtgaaggatttttagaggatttaaattcttaggataaacttcctatgatgaactcattcaaaacaaaggatatatatgtccgaaaattcctctggaaaacccatggaatgagctagttcatagaaattttggaagaaaacaaaacatgaggttgtacatcacagttctctcttattgtgtctataatttctctgttttttctgcatatcgtctaaatgactatattagagtattcctacatttctaattcccataggaattcttaatataagacattgtaattctatgtagtggcagagccacctctcgggcaggtcgggtaactgcccaggattcgctgttgctgtctctactatcgatggccatcgacacctataaaaattaatcgatcactagaaaacactattagtcatccggacttgacactccgccactgatcctgtgccctctattcttatgttttcgaaatgaacccttagttattagcttgatttagctaattagcttcctctcagcctccagaatttcaactgttctctgcatgccaagttgccaactgccaagtatgcatgcatatgcagttgtgcaggcaggcaggcagccacgtatgcatgcgtacgtacgaaagagaaataccaattaaggacattaacaccttacacaaacatgtagctctgaccccctctcttgtgcagcatctactgcatgcaatgtaattacacatagtatgtgttcctgcatctttctgctatggccttcttcacttcatcaagcctacagctaactactatactagtatatagtataactgctgctgctgctgctgcatatatgtatatgcatatatatgcagtgtgtgcattgtcacacttgctacatgatcgatcgagatgcacacaaggctatccagcaaataatgccgcctctgcatcatgcacacacacataggccgtgtgtatatatgtacttactacatatatctagctaggtgtgccccagtttgtgtatatatgccaatggttcagagtgagcagatgcaattgcaggcttggaattaatcctttcattgatcaactcaccagatcacaggatccaagatgggaaccaccatgtgttgatctttttatttttttggagaactccatatgattacatgagtaaaattttgaaggcctttgttgtgattattttacctgccttagcttggttaatattcagagttgagagttctgttataactttgcataatgagcgcacttattcatatctgaaatttataggtgtattattggttttcattgctgatgtgaccaagacggtacaggtgtctgaaattagacatgcctctacctcctttcaacctttgcaaagctgacctatgcatgttatgtgtgtgatgtagcctcctttgagcagcccaatgcaatgcctggctacttgtaggccagagctgagacaaagaaaaagagtagatgtagaggagagcaatgctttgcaagaggatagcaacaacaatctcaatggctcatgcaaaagtcataccacaaatcagctcagggcctcaggccaactaggactagcttagctcagattttatgctgaaactttgcagccttcaccacaactagagctactagccagctagctctcctctcactgtgagccatgtgtgccatgctaagccaagaaccccaaaggaaaaaacaagataaaaagatgagcagatcagatcagagaaaaaaaattaaacacaagggtcagggcagctcagctcagctagccatacagcaggcagcagattcattcatgcacatgacacaccacaaccaaacaaatatgaacattccaaagactctatctttctcattctctctctctctctctaagttgtgtttagcaattgccaacaggatgcatcaaatctttgccttcaatgaatccatgacattgctgatgaatctctttcttttgctttgggtgaaagttttttgccagaagtatgcaaaggagctgcacctttataactgttgtgtagtaacaaacagagcatggggacacatcacatacataaaaatacatgcatgccatgaccagtgggtaaataagcaattgcagcagcggcagcaatagcatcatccagccaggagacatgggaggacaagagctgcgtgccttattctggactagtcaaaaggttgctgctgccattgtggagatcgatttgcaatgccatccatggaacaccattgctgctgccatgttgttcttggtttggttctcgttttcttgctgccaagaacaccatggagatgatcagatcagccagcccatttgcattgctgattgctctgagtggatctgaactgaactgggtacgattacatggcaccggtttttggcaatgtgaagagctgcagcaacaggagagaggcatgtggtaggggaccagcttgctgcaacagtagagagaaatttttaccatctctctgggtctcatggcaattccttggaaggtttcaggctcccctgcaatgttctgatccctgcacggtggttttttcactgcttcagaaggatcaggtaaaaagaggatgcatactatgtgagtgatccaccaaattaagccaaatgcatgattagtttctttaaagcttcataatatactctgatcaatcatatgtgccatgattgcttagcttgtagattttcttttgggtgcatgttcagagatgcactgtattttcttttgggagtatattttcagcaagatgagtacagtgcaatgtgtacgttaaggaatgctgttgccctgcaacagctgtatgcagatgcatccaggacccttatttgtgcaagatcacaggtcccatcaatcagcaacaggccaacacatgtaggagtagtttctcccctctttctatacacaaaaaactatgggaactcaatagatattggctttagtatatactactattgttctctttttcgccattgccggaaatgttctcagtgcggttgtattaacttgatgtaattggctgagttggataacagtcctcctttatccaaaaaaataataatattgttctctttctaatttttctttcttttcatttctcccccttcttgctctgagagttgaattttactaaggcctggtttagttctaaactttttcttcaaacttccagcttttccatcacatcaaaacttttctacacacacaaactttcagcttttccgtcacatcgttttaatttcaatcaaacttccaattttggcttgaactaaacacaccctaatgataatgtaggtgcactctacaatggataatgcaggtgaacagtagagccctctctcaacttgtttgcatttcataatcaattaatgtatgtactcccatggatcatactactactactacatacactagctagctaggaccatgcagtgaggatggattgattgaacccatcatagaatccgtgatgggtagccctcctttactcctctcctaatgaagaagacatgatggaagaaacatatagcatccaaaaagaaatgaaatgggtagtagtagtagtagtgtagtacatgtgtgtgtctgcatgagagaggctgttgttggcaatggcatacacatgtttgctttgcatgcaaatgtgtgttttgcttccacacatgtcccactcttcagagttggatattgatgggcttgagcaacatccataagcaaaatatgaatgaatacactctagaagcctctgaacccatatctccttttagggctcctttggaactaaggaattttggacgatttttgaacaattgaattcctatggaaataattcatatatggtcctttggaaaataggaatgactttcctttattcctttgaaattccttacgattgtctcagattataggaattttggaggaattacaacatgagcttcaacctctcggaaaaattcctttgtatctatttgtcttttgattcgtgtgtttttcctgtgctccatccatatgatttaagatgctacattttcgctatccctgtgtttccaaaggagctacagtcttgcatgtagagtatgacataaacttttttctttttgcaacttcatattatccatggataataactaaagcatttgtacaacaaagagaatgagaaacaccatggaccacagctaagggcaggtgccagcctagctattctgcagacaatgcaaacctacttcatgtctagccaaaggaaggactgaaaggggagggaggggtaaaagttgatgtggttgagaagttgaggggtttgtttgcaaaaggggaggccaaaagaagggcacagtggctgtgtggcagaggtactgatgccccattactgggtccagtggacatattattgttgggcacaggccatgtgaaggcagagcaaagcatgatgatggcacacccagaaatgaggatagataagataacaaaagttctggtatttgttggtctggtgacaagaggtaaggacagcaaggtgaaaactacttactttaagcctatagctaatctgatcagggtgtgccaaacacttgcactatgatgatacatttcagttagggaaagctgatgttgatttgtacaacatgagtttcttgtgttttctatgtgtagtacattgtaatttgcaacaagataaaagatgtacttctactctatctgttccaaaatataagtatttataacgatgatacatagtcggaaatgattatattttataactgccggactaatatgttagatacataaaggaccaacttttgtccctccttgaaatgaaataactccactactagttctctggatgcctgatagtaatggcatctcattagttgatctattcccatgacaagtgacctccttttaggcaggttcttgtgatgactgtggcacggcactcactca

SEQ ID NO: 7670 - DNA, 17403 bp, Oryza sativa
tggggcggtgggcagcgtgggctaggctggcagtggaggcattgccaacgacgaaggagacgagacggccggtttggttgggttggcttgggaaatttggggggttttggccctccaggctccagtcctgggaggacgtgatctctgctttgcttgctgttgcagacttgcagtgttgctggtaggcaatttattattattattattgttattgttgtttttttttaactttcttttaagttttaatttcaaaaggagctctatgaaaattttgaactaaatattttgtcgcatcattttaataggtgtgatcagatgacattttcacgctcataaaatatcgtggagtataagataaataattgttgccatgccacgaacaatggcacttagtttgagttcgtttgttttacgcgcatactttttcaatttgctaaacattgtattttttttgcaaaactaaatgtactaaatttgttttaaaatatcttattaatctatttttgaaaaagctaatacttaattaatcatgcattaatgattcattctattttgcatgcgcgagggattagtttctaaaatcaacaatcaaatacagtttaaggggttgtttgattcgtgactacatgttgccatactttgctacacatcaagttagctttaattaagttagctatgtattcggttcattgttacacataaccacgattttttttctctctcatcttgatctcatatgttatttgtcttgtaaagtgcggtaagatcatagctttctagtcaaagcgttgcgttagattcatagtctaaccttagctatggttggtgaagaaatgctactagcaacctaaaaacacaaggtagtagataaactaaacatcatactgctatctgatatgatattgtcctaacatgttaactcaaatggtgtggtcaaaaaatttattctatgaaaaataatattatggatgatttgttttaaaaattttaagacaataaaggttcacaataaaaaaaattatgaaaagaaaccggcagcggagggtcgacacaggcatacagtgcagcacgggcaggttgggtttctcagcctcatccggtggtattgcttgtctggaactaccgaagctgaagctgacccggggaaaggtccatttggttggtagatctggtgatggcactcatcaatcactttcgtttcaagttttgatgatttataattaacgtaggtcggagtatatgttttccccgcttttcttggttcctttttaccttcgatagatggcaacaatttgtactattgaaaaccacaatatcggctggtaaaacataaataccatatacgaaaatcatgccgtgttaagatgtctaaattaatactattgtgttgtgtaaattaagtagcacagtactagctaatcacaatacatctggctgtcacatgctacgagtacgaaggtcataggaggcacctagcagatgacatagaataatgttcccattggggaatgtccaatgttccttgtctgctcttaagcataggctaggcatatattattaaaaaaaatgcaagacaccaatatatccaaggaaataaaaaaaaagcaaaacaatgagtatatgagcatcctggattaattaaactactctattcgcttaatctcaaacaatatacattcagacaggacaagtcagtatctatgggcttcttcgaagggcaattttgccgcagcgctacggctgcagcagctcaatttgctgcagctttgccgtgatatttaacagcatcgatggctgccgaacgctacaaaagttattatcatgtcggagcaccatgccttgtgttgtaaaagttcgaattttggcggatactttacctcatgcgtattacttcctcgctaccaagccaggtattatattcactgttcagccgtaaatcgagctggaaatgaacataaaagaatttatctgataatacatacaccacataaatttgcatgatgtcacgccgcataatatatggggatggccgtatttgtaaatttagtgttttattagtatctcacaaaaccttgccgtttctttatatctgcaggtagtaacaatgttaaagctaaagctcaaagactaacacaatctgctggagggaacatcaacatcttctaattttcatccaaaaaggaggcagcattcataaattcattcttaccttggcaacgaccaaaatatttacataaaataagttttgatctcacatacctgcggtaaacaaaaagttaagcatataaacattcacacatcagcagtatttgtagtagtcacctcagtcctcaaatatcaaacgtagcatgagatgatacctcaccagtcaccaccacagccacaaggctttgacaacagtcctcgatcagatcacggtcataggatttagtgggaaaaaatatttacttggattagtaaaaaaaatgcttacatcatggaaacatgtcgaactgttgggtgtttcctcaaagaggaaaattttgcctcctggctttctttcaaacggagttatttgctcctaagctataaatttctgttccccgatatctaaaaacctaaccattcaatttacaatgcagatatggggaagccttctttcattcaaatatggtttgcattttcccttgcaaaagggaattatgtatatagtctatgaaacctctaagctaaccgcggcagcatcgatggcatcactgttattctgctgtgaccacaattcagcatatcggccaccctttgacagcagaaaatcatgtggtccttgttccactacctccccattctccaaaacaataatctgaaaatacaaattttgaaacaagatttataaaagaatcattgaagtgtcatcaaacaagtattcatcagtatcgagtataatggaaagctctgtagctcaaacatatgaacaaatgataaatcagctataattgagatctagcccatgatggtaactatcgatttcttgaatcgatgcaaaagaaaatctgttgctgttaactgatacattactctgaatccctatttttagttcaataaatcatattactttcacaaaatgaagttgcaggtttttttgttctaatgtatttgcatgaacatgcatacctcatcacattgcattgcagttgtcagtcgatgtgcaataaagatagaggtacggtcaacggacaaagtcttcagagaatttaaaattgacgcttcggtggtgctatcaagagcgcttgtagcttcatcacacaatctggtataaattagataacaaaaaaaataagcaaagggaggaatgcagtaaactcatcttttgcaaaattagtgtttgttaacagtgtgaaataattcagatttagcagggttcactctgaccatttggcacaccatcaccatgacatgttaacttcatacaagggcttgcataggaacaataaaaaacagccacttgctcaattgctaaagcatggtaatgctagtcagacaacgctgaatctaaagctttttaaggctaaaatggaaagagggaattacagaatggaaggttccttcaagaatacacgagcaattgatactcgttgtttctccccaccgcttaactgcaaaggaagtaaaatcacagattttgagacattattgctaggaccaacaggttctgactattctggatttggcatgtcataagacactgcatctcacctttaatcctcgctctcccacaactgtgttgtacttgtcaggaaagttcataattgtatcatgaatagcagcccggcgggcaacgtcataaacctgtacgcaaataaactttagcttgaacaaggtcaaatgaccctactccctccgtcccaaaatataagggatttatggggggagtactataacttcataatgtaaatgtattggtagaacacagtacctcctcatctgttgctgataaccgcccatattgtatattatgcttaattgtgtcattaaaaagtacctgcattggataatgcattaacagtgtgagctactgagctcttggagtgaactgtggtaactcctaactgatatgtgaaaagcatgttgatagagctacttctatttactcaacaactttacatatgctaactaaagttgcacaagggcaccagaatgttccaattgtgtatagtctacatgctttatccatttagcatagtaaattcaataagacaagaaaagtaatgcagcattgacagatttagagcagtagatagctaaccgtatcttgcggtacaacaccaatacacttccggagactatccagtgtcacctctcggatatcttgcccatctattcgaatctgcaaagatcaaacaaaaggcatcacaagaatggcaagcttgatacacatctgaagatatacatgctataaaacggatatcaatttcatcatcagggaatcaaaatggaaatagatcgttctttgttcttacagatcctgaagaggagtcaaaaaatctgaagagaagcctaagtatggttgactttcctgtagaggaatacagttaatgaattgttcgttgatcacataaatttgaattttgctaatattgataaaacaagatatctcattccatacaaccccaaaaaaatcactatagtcagccttgaatcagacataaatagacaaaacgtacaaccatgccagatggttatttgaaatgaccttatcagaccataagcatgtttgtccaaattatagaccaaagagaacacctaacccctaattttttttagttaacccaaaattcagattaaagccttaagagacagcccctgttggatattaaaaaggcaaacatttttctaggaaaataacaattacaatatacacccaaagcttattgttgttcagtataggtaggccaagcaggctttaattagtatttgaaaacatccattgctagaaaacttgatatccttcattaataacttttctctctttgccatggcatggaaaaaaatatggaagtattggcttgtgctactctttaatagaaggggggagcccgggaaacaccaaaaagcccatcctctttttaacaaaacaatttgctgatacgaccatgggagaactcatacacgccttcaacttttgagtcaagttaaacaattggtagatgcaatttgacaaaaaaaaagttttaccgctgccactagttccaacgattgcaacactctttcctgcaggtacagtgaacgtggcacccttaagaatcttcctttctggtacgtacctggaagaaatcagttccttcaggtaaactacaacattaactcagataagtctactttacaagttagactacataatagatagtcataaaatttgcttaattgtacttagtgctttgatagattccataatgatatattgccagtcatttacatcccaatatgcacataaattgttgacccacatatgaggtaattaaaggttgttcaaattcaaatcgtgacagcaacgtagatccctaaggcagcagtatctgatactgttttactcagatgccagatggtaaaaaataacaacatgagaatattttacctatttgaacttgattgagaattgaggcgatggtcaagataaaatttaaatattacaggagagcacaaacaaagagaaccactataacaaattaacttgagcaaaacaaggaaagaaattccatctctacggagataaatgttaggagtgcttcaatatttcactttggtgttcagatgctctgagagacgtgactttttaaggaagtggtacaagcatgtaataagtaaacagaacgcaaaatttacccaaaatgcacgttctcaaattcaatgcgtcctcccttgaactgcaaaggctgtgcatgtggttcatcctttattccaggtttttcctgaacaaagtgaaataacagcaatgaagtttctggggttgtgaaaggatgaaactgaaactgcaagccatttaggcccccaacagatagtcacgaagtttttacctcaagcaattgaaacatagacttcatgtcaatcaggctttgcctagattctcgatagacacttccaaggaagttcagaggcaaagaaagttggaatagaagaccattaaccataacctagatatcaaaatttaatcaaattaataaaaatcagtcaaaaataaagaagaaaagcagaaaactggcaacatctggaactgatggttcatggttcaaaattaactattgttccaaatccacataattagttcataatcaatgatcatttgacacccctcgaagtggcatttgatgatttgccaccgctctgcctttgatacatggaccctggggctacatgtcatagaaacatgagtggcaaataatcaatttgacactctaaaggagtagcatatgatcaaaactttccagttagcccttttcacttaaacaaccttcctgactataaaataaacataatattgcaacaacatgctttgccactgtatgaaatggatatggtgctaaccgaacatgtcaaaacgggataagaaatacttgcatcaaataatatataagcggatgtcataaaaaattaccaaatcaccgacagtcagagcaccactcattacaccgtatgaactcaaaaccatagccgtggataaagccgagctaaatatgatattttgtccaaagttcaggtaggcaaggctactttgggttttcagtgcagcatcctcatactctgaccaaattgtgaaaaagaaatagtaattaatagatcaaattttataaaccaatttacgatatatgccaaagcaacatgtcagctaggattcatcagatttacatagcatataactaagcacttgataaatcaatgtgtacaagctcctaattgtttgtgaagattgaaaaaaaaaatccaagatgcaatatcaaccctactgtttctcatggaaaacattttccacatgtatttcatgcctcaatataagtttttttggtagtttttatagaagatgaaaataacattaaaaccagtgaattaaatgcatagagtatatctttcaaaaaaaagtgtatcgagtaacatatgcatgtctacacgttaacaaggtttcttcccagaatgaacattatatatgtactcactctttaaatatttgtcatacttctcaacttcaaattgttcattgttgaagtacttgacagtctggcccaataaaggaagttagaaaaaaaaaggttaatacaattagaatatgaaagcttaagaacatagactagatgccaggccaattgaaaatcatggtattacctcatagttcagaagggagtcaactgccactgtgctagaagcgttatcagctttattcatggctgtcctgaatttggtccgccactgtcataataatgcattacgagtcaaggcattagtgacaaaaaaacagcaaaaaatcttgttagactatgcatggatgacagacacggtctgatagagcacatcattcacacctgcgtcacagccaaggtgaaagcaatataagtagcaacagaaactgaagtaatccaagcaaaggtggaaccaaatttgtatgcaagtatacttgacaccataccaatctgtaaatggaaagaaaaaaaacagaaggcacacatcagacaaaaatgtaaaatgtgactggcatacattacggaaagttagaaacaccaacattgcgcgtatatgcatagttgatgggatataacagtcaatgacaataatctgagtacctccaatattgtgggaacaacattgaacaccatcactgtaaggatgtaatttatcgcacgactacctcgatcaattatgcgatttagggcaccagtttgccggctgaaaatatagaagccaggtaaaggcatataagagctcagataattttcaactttccagttctaaaactcatgaaatatctgattatttgcttgtttcttataacttgtttccacaccaattttcagaagaatcaaagtgggatataggctataaccaccaaaatagtgcagccctagactaggtttctcatcatctcccatgcgtaaatgctgaaatatatacatgcagtcaagctacctaatttggcaattccttgcaattatttgctacaacttgtaagccacctacattaactgtgatgcttttctatatattgtattgtgcatgtgtgcattaacggaaatatatcatttgataaatttaagataaacaaacatataagatgaataggaggcattttctagaagtaccttagatgataacgaagatcaagctcatgcaagtgcgaaaatacctgcaacagcaagagctcagaaggtaagataacccataatttaaccagtaaggtagtgtttggttgcaaggatgggatgggatgggatgggacgaacccacttttaggggtgtttggtttaggggtgggtgggatgggttggtccctggagaggaatattcctctcagatccgggaccaaccgatccgccaaaaactggcggacaaactcgtcccacctgggacgagcgacggcgtcaccgcgccatccaccaccttcgcgagctccgccgggcgcccacgagcgtcgccgcctcgtccacacccgccgccacctccacacgtctttctccgccgccgccgcctccttgagcgccgccgcctctgcctcgtccgcgaccgccgccgcctccatgagcgccgccgcttgcccgcgaccaccacctccgcgcgtccacgagcgccgcctcgcctccacggccgccgccgccgcctccacgagtgccgccgctcatccgtgaccgccacctccgctagcaccgccgccactccactcagatccagccgccgcctcgcctccgcgcccggcgcctcctccgcttggtccatgactgccgccacctccacgagcaccgtgaccgccatctccacaaactccgccacctctgcctcgtctacgaccgccgccgccaccttcgcaagcgccgccgccggtcctctcagatccgggcgccgccgagtgcctctgcccctagacggcactaacggtgagtacaaatccgtccatcccatcccacctcaatcccttctaccaaacaaaaaactataaccatcccataccataaaccaaacagacaactggaaccatcccatcccacaaaactaggataggtctgacccatcccacttcgtccccaaaccaaacactacctaaaggagcatgtagctttattagcataaacagttccatatgattaaaaatgacagaaaatgataaagaattatcatagtcattacagatgggagtgcacatcgggccagtagcatgatcaacagtcaatgaacagctagatgaggatgcagatgtcaagatagtaatagctattttttaatgattttttctcaagcttttttttccatgaatttaatttttttaatatataaatgttgtggaaagtactgtttacaatactagcaacactacataaataagacaagtacatcaatgcgtagaaagaaataaaacttgagataaacaaaagattcataaatcataatgtgctggaacatctagataatagaggaatttagtagatggttggaaaaacatgacaaatgagtggtaacattggaataaaaaaggaaatttcaatagttaccgtactggagactgaacggatggctctcaatgtcactttagaaaagacagcatttcgcagttctggcaacagaaatcgacgaataaatcagtagaatcagtatatatttcaaagaggggcctggcaatgcatgttgctccaagctcacgaaaggaactcattttttcagggaaagaaacaaccatgcttttttttctaaccaaaaagagtttacctgtacaggctgatactcccgatcgtgcaattccatatccaatcagaacagctgctgggcttgcaaagagagccaatagggtagcattagcctctgtgaatgatgcaagtgaagtttcagcaccagcaagggctgcaagccaatcgacagcaagcttaaacaagaaaggcacttgaacatttataacctggtgttcattataaatgaaaacggtcagataaataagttgaaagttccatgtaaactgtaataacagccaacttctgtggttatcatttcttatatgccctaaatgaaggtgcataattattcctttgatttgacaacagtacttgaaaatagttgtgtatctaacaagcggaacttggcaaaaatattttgaggatatacatccaacagataggccatatctagctactagattgcatcatattatgccaaaatgattccttctataagtaaaaaatgtcactgcagaataagaagtgaatatgtatagaactccagccaggaagattagtattgatctcaatccagcataatggtcaatggtactctatcatgagataagtggcagcttataaggaattgccataatgtgcaccttgttattattcattaatgactaattaataacaaaagaaatatcttaacaacagaattaggctgcaggtttatcttagccacaaaatactctgctcatatgggttaccactttcaggtgtagcattacctttgccccaactaagaggcccaatgacaatataagcctgaagcggaaatccgggctatcattcaacaataagtatttcccaaggtttttcagtatctgtgtatctgctatctgatcatcaacatcctttttggagatatctttcttcactttgtcatcagatgatttcccaactgccacagcattggcagatgtggaaaatgcatgtcctctctgcaaacatggcaagaatcacaaaaaaacaaactcaacaaatgagtcctttcatagtacaaaggaaaacaacagagccaagtaaccaaactcagactcaattttctgtattggatattgattactagagttgaaatcaaccgtgagatacttgaagaacatttaataaagatgaaaacaatgcattttaaataccaaaaaattgcttgacagaatcatcacaagcgtagcaaatattattgcttgtaatcatatatatgaaaaaatgtgagtaagcgtgtttgtactttattttgtgatctgatggattaagtctgaaaaaatcatcagaagcataacaaatatcaacttgaacgcacgaatgtcagcaatgacaaaggaaacaagggtatagtaaatttctgataaatttatccttttgcaaggactgagaataacactgaaacaaaaccaaatgcgcccagcaatgccatccacaatgcttaataatccttttttaagttcctgtatcggtcaaactagtaactaatcacatctactacagtctacagccgactgttttgctaggaaactcgcttgtttgactgaagtattgatacaatacaaaatacataatcaaccactactgcctctaaccatccccaaatcgaaactaaaccaaatgcaataagcacaatgcagtaagccagtaaccacaagttaccacatcgcggggaggcggcgggtaggtggagtccgacatgaagcagctgaggcgaccaaagggggcatacttcccgtcgccgggataaacccaacaattcggcccgaagcctccgagcagagggctcgggagaggcctcggcacggtcggcggccgccggaatatgggggcggcagcggcgaccggcgaggggtcgtagcgtgagcgtgagccgcggaggaggtggcccgcggccagtatgcgggaggtcggcctcatggcgctcgccggcgacgacgatgcagatgattggatggaagccgaagcgtggaagaggcggagttggacttggacactgccccgttaaaaaaacggggctgataacgggtcgggctcggctcgcccgcggttccttggaaaccgcagctcggctgttcggagtgggatcggagcggtggagctcggcggcgccggcgatgtcgccggcggcggccagtggagatggggaaaaggcggctactggtgctacgttttttgttttttgtttttttgtgaagcagcaatttgttcagggatcccggatactccatccacctcacgaaaaacgatttttcctgttatttcaaaaaaaaacagataaaagaaaaacaacctttttttttcaaacaaactcttttcaagtttttcccggtgggaaaacaagttgtttctaaagttaagcaataaggacttgtcttagtttcgtctttagaaatttagagtctagagtaaatgtaatttagggttaaattttaaaaactacatgtataatccttacttcattctatgtcgaataaaaaatcaagggaacatgaattgggcatacttcttttttttttatgtgcgtgggcatgaggcatgcgacgcactaacaagatgaatcatcaaagcacatacctgacacatgataccgatcatcgaatttttgtcaacttacttttgcacataaatagctaaaaaaaatgttataataaagttgtgctaatgggtttttctctctccggtttggggccatgtgccgccgctaagttggcacatcttcatagaaaagcatttgacactgactatacttctacattagaaaaaaaaattagagttggttctaatgttatattagcattggagagggtgtaatgttatattaggattatatggttttatactatgttgttgtgatatattagtatgatataattacaagattataatacacacataaatgttataaatatcggtaaaaaaaggctaatccaactattaaataaccagtacacacaggctagagaacccactaaaacacaacccaataacctaattttcaagaataagtagccaaatgtgtagggtgaccctttcaataaagatgtgtagggtgactggatgagattgcttttggttgtattttcttgtaacaagacctgtatgtgtaggatgagggtgggtttttttcccttctcatgtttccttctttcttgataattttgcaaaatttattttgagtaaatttcacaaaactacaaatattatgatcaaactatcacaaaactacagatttaactcggtgtatcacaaaactacatatttaacattaaattatcacaaactatatatttaaaataaagtgttataaaactacatatttagtaataactaaattatcccagtcaaaaaaaatatagctccaacataacaactatgctaaggatttaaactctaaagctatagtttgtgataactttaatattaattgtttagttttgtgatatttagccttaaatctatagttttgggataaatttagtgctaaatctgtagttatgcgatacaacaccttaaatatatagttttgtgatagtttgatcaaaatatatatagttttgtgaatttttattcacttattattttctacaagaatctgaaaagaagatagaagtcatacttaacgggcccagatattcacgaaaggcccagcgcgggaaaccaatgggctgataagcccatggcaacgtggcccaccgagttgatcagactagatccaacggtgaagaacccagaggcttaatccaacggcagctgctttctaggcggccctccggttatagccggcgagcgctccaccccacccgccgaattttccctccaacctgctaaaaccctagcacccgccgcccccgacggcgccgctcgacgacgagtcgccggcgtcggtcgccgacgagagctagggcaagtgcggcggtacagggtttcagaggaggaggggagcatggcgtcgaacaacggcgcggggaccctcaggtcaacctccatcaacggcgtcaagctctactccatcaccggcaaccgctacgtcgccccatgggtcctctcgaagaagaagcgcgccctccgcaaggacgcaggcatcctaactcgcctcacgctcatctgctctctctattttgggttcttttttcttgtgcaaatgacatgtattttctcatttattgtcgtgttgctgtcctttttttttgggggtctttttagagtatcagcggaggctggatttgatccatgacctgaggttcgagaccgccaccaccaagatcaaggtgacaccggatgagcagtatgtgatcgcctcaggtatgcgagctcgctgaatccaccattttctgcaccggcgttgctttgatcaggttaaactccacagtgcatactcagaaaggcatataactaacatataccctggaataaaaggcagtgcgtcaatataacgtaatggtggttcaggagtcagttcgcataagttgctgaaggaataggtgtccaacaatatctttagtctgtagtgtctttctgcgtccatgtccacacctataattgagctttcatccttgcctcactcagatgagttcgcatagtctagcgaagttaagatgaaagctcatgttctgggtgcgagttggcattggagcatcacacaattatcgtggaatgctgccgtccccctactatgtcattggcttgcgcttcatcgtccccctactatgtccttggcttgtgcttcatttgaagtcagagtcaaaacatttaaaccactaaggcgtttcttggagaagcttgcgtttatgtttgcttattgtgagtccaactttgaataatcccatgccttcagaaacaatccatgtaattcatgctctacaccttttttctttagtttgtaatatcacttgttagtttaatcttcacctttaatgtgtttcagtattgtcactttcatcagattgtttacacctctgtatgtaagtggaattcttctgtctatgatgtcaggtatttaccccccacaagttaaagtctatgaattgaaggagttatcaatgaagtttgagaggcacatgatttcagaaattgtagatttccaggtgggactaggctctagtgaagctcattcctcttttactatggagaagacatttgaattttccacaaatcagaaacttgcattttcattagctgtgtaacaaattagattgttaacttagactgtagtacatctctgttgaatttattttgcttatgagagttttatactttccgctatgagttcatgctttgtcgtgggatgtaatttaaagtatttccacattgatacaaaccattggagattaactgctcaaaattgtctactatgcttgtaggtgccaacctctgtatctttccttttgtatattttctatctaataacacatattgcatctttctgtaggtccttggtgatgattactcaaaacttgcatttttgtgtgctgaccgttctgtatgcctgcatgcaaagtacggtagacactatagcttgagaattccaaggttagtctgtccttatcacctacatcctatttcttatatacttttcatgcactaactacttggccctttggtaaagtgaagcgacatcttcaagaacacataaactgtcagaattaatatttgaaccattaacattctaacttccctcctgcctctcatgctgattaaacccagctcattttaaacgctactcttctgtgctcctactgctgattaggtgcatgttaagtcatcgacttggttgcattgctttagcccacctcctgctgctcatgctgaaaaggccaactatttgggcatttttggccttggcactggctgcataatttccatttcgtcgctgccaaggatgagatatatctcaggtttttttttgagtctttggagtctgatcaggatgaagctttagcaaaactaaaacaacatgatcacatcattttctcttcttttccgtgatttccaaacaaagtagtctagagaagataacagtgagcatggtaataaaatcaataattttcatctggcattgacagtattctgtttaattttctccatcttgcacctccatgtctgcctcttgatttctacatgcaaattcctgcagcaatacatggagtatcacatgtagtatagtagtactaaacagccacctgttgccagatgcagacttagttatatgggctggtctggattagtaccaaattttgccctaccaaagttttggcaacttaaattgtgtcatcttgatgtttggtttggtgccaaattttgccacactagttctaagttctaattagcagtactataccctatcaaatttggtagtgcccaaacctgcctaggttttcgtactaccaattatttggtatggtacatttttggctccaccaatcttactgaaggatatttctcgcatttcattgttctgtcttaattcaatacattttgactgccctattatcaacattcttttagtgtcttatggccagtcagagctatgtaattattgttggttacatgtttagtatgctagaaagtagtaagagctccctgttgcctgtgcaaacatagttgtctatctgctgcataatgattttttcttttagtttctacattttgtatctcttcttatatcatgggtctaaactaagcttctttgagatgatgataactgataacactatagtaatggaatgtttcaatacataacttgccttaattttgcatgttgctgatttccattttgacagaatgggaagagatatggcatatgattgctggtcttgtgatttgctttgcgctgcttcatcaccagatgtgtatagaatcaatttagagcaggtctgttttctttcttcatcattgatatgtattttaaatatctggttaccttagtcttaggaaaaatcatactatactttgtttggcacctgttagtacagaaccaagatagagatgatacttaattaggttgtttgaatgtaagcctaactatagctttatcgcatatcctctgattaatttttctcatcatctatcctgaatctaactaaatattcttcatataccttgtattaagttgctaatagttgcaacattacaatggtgttttcttctcatcatttgctttcagtcttttcagagaatgaatttgatcatttcttaatgtacttaatgcagggacgattccttgcatctctttcatctcaatctccagcaataaatgtggtttctcggaggtagttctttgttattgacttgtatatttttgaaaatgccaagcttatcaagtagttcaattctctctttttatttgttgtactcccagtaacatacatgggctcattgcttgtggtggtgaggatggtgtggttgagtgctttgatatgaggagaaaatcttctgttggcagaattaacacagctgtctctcctgaagattttaatca

SEQ ID NO: 7671 - DNA, 36372 bp, Oryza sativa
gggcgaattcgagctcggtacccagtcgggattttctgcacacagttattaaaattcacaggaaatttgtggaattaaaatgagtttgatacgttccaaaaggtacttgggctcttagggttgtgaactaacggagcagcgattagcacgtgattaatttattatttgctattttttaaaaaaatggattaatatgatttttttaataactttcgtatagaatttttttaaaaaagtattatttagcagtttgaaaaggaggaaagttgtgaaccattggtggtatagaacgcagccttaggagacgatccaggatttcccttgcgcgtttactggtcttgccgctgcagaacggtaactacaagtgcccgaaaactatatcaagcattctaaaaaaataaaatatatttttataaaatttactcctggttatatccaattgttcacggatgtcgtggtaaggtaaagggtccatttgcatcttagcaatagaaaaacggaggaatagagaaaacataggattttgacaaaaatacaagtgtgcagggacctgcgtagtaccctaaggtcctgagttcaaatctcctatggagcgaatttcagattgggttgtttgcggggctaagttccctatttcaatggccgtatatatccggttggatgtagaggccgggtaaaaaatacccttctctaaaaaaaataagaaaaaacaagtgtaaaatactctctccgtcccaaaatataagaatttttggacctgacacggtcttcgagatgcttctttgaccaacaatatctataaaagtaagatgttttaaataaaaagagttgcatattatgatagtttatttaatgataaatatggttgatcttcttttttgctattaattgttaaagttaaaaatgtttgacttgtcactatgctaataatgtttatattttgggacggagggagtagatgattgaaaaatacagaaaaaacacaggaatgatcgtttgattgcaccacaggaaaaacacaggaatgagatgagaaacatagactcaaagaaatttttttaagaggttaaacatcttgctaactttcctccaaaatctctgaggattacccattacatacgaatttaaaaagataagataggattcaatcatttatttcaaatgcttccatagaaatatttttcatatgattcaaatcctccaacttttctacttttcatacaaatcaaagggccctaagacagatgcaatctggaccgttcatgcgtggtgcgtgcagaggagcgctgagtgcagcaccaccagggtcccgaaaagcggagattccccccttcctcctttggctttctcccccaacacgtcattccttcctttcctttccttctccactccgccatccgcaaccgccacgcaaacttcctctctctctctcttctcggcgcgaatccagaaccttctagaaggagagggagaggagaggagggcccccgcccccacgggtcgccatggccgacgcgtactggaggtacgccgccgccgccgacgccgcgcgccaccaccaccaccaccagctgcccctctccgccgcccccgccgccgggatgcccgccccgccgcctgctgcttctcaggtcgccgccgccgggcagccgctcaagcggccccgccccgccgacttctccggttcgcctcgccacacctcactccctctcctcgctggcagctgctcgtctcggctctgaagccggcgcgggtgttcactgtttatagggttttagggtctcgcagttgcaatgctcggctgttcttcttcggtcgtctctgggttgtctcacttgcgtgatatcgcgtgtgcatatcgtatcatgcatttcgtacttactgtttcttcgctagactgtagtggatctcccgacgatgcagtggcatttgttcgctatcactgaagctgtccatgaaaattgcacgctctctcggttttggtagcactgtcgctctgaggacactgttggattttgcgtgtgcttgatttcgatttaggatgacacctatcaacaatcctgcttgtcctataccatttttcacttataatttagtactagttgtggaatgatttagtcgatttaggatgacacctatcaacaattctgcttgtcctatgctgtttcagttatattttagtactagctagttgtgcaatgatttaggatgcagtagtgtctcgaggactgaggcccatatttactactaccacttttttcccttgcatagatgtacctggtgctcctgaaatggctggctattactctcgtgatgaagaaaggccagggtatcgtcctgcaagagacactgaggctcttaacgcttcctatgaacgttttctgcgcactggggtatcaaaacctgttcttaacacatactatattcaattccttaaacacattgtcagctgacacttttttcttctttttgtactacagcaaattcaatcctatggagctggagctggagctggacctggtgctgaatctattaggcctgcggcaggtggcaatgctggatacccagttgaggatcgtccaatgatggctggtgggggcatggaagccagaaatattggctttggtggtgggatgccagagcctccccttccaccagatgcatcaaatacattattcattgaaggaattcctactgattgtgcacgtcgagaagtttctcgtatccttaaatcccatgcctttttctgtctatctttaatctttcatttgcacaaattgtgggtgtaaattattcataatatgcctccatctcttagctgctggtccttcaccttcccccaagatatcttccgaccatttgttggttttcgtgaggtgagacttgtaagcaaagaagcaagacatgtaagtgagctttttggtgctgtcacgcctggtctcttgtttcgttcttgttcatccatctaagtgctttgctgttaacagcctggtggggatccaattctactctgttttgttgattttgaaactgctagtcaagctgctattgctatggatgctttgcaaggtgagtcagtgaactatagtttgttgacactgagccatttatcaccttttgatctcaaatttcttttggctgcgtaatgcccaattaaatctgacagctgtgggtacaccatgtgaagctgttgatccatctctcctatcagtgtcttatgagtcatgatattgaacttgtgtgttttcttctctatctttttccctgtttttagttatctcattgtcatgcatgcttataatttggatgctttgtttaccaagatctgatagatgcttgtgatggttggtaatttggggtattttgctaaaagccgacagtcagtttctttatggttgaatagaactcattcgactgaagtatttgtccttaaaattggtgtggagttattggccaagcagctaaaagtgggctgtgaaaatcttgtctgttcctaatttatcacctgaacattttgcttcacattgttaccatagctgtgactgcctttataatgcgcccccccccccccccccccacacacacacacacacaagatgttattgcgttgtctggggactaggcctgtggaaacactctggcagaaaatggcatagatatcaccatctatctatattactagtagctcgctggtgcttctcaaatggtaatttccccttcacttgacaacaactttagcaagctatattaattcccagtacggttatgatccacttatgatgcttgtcaatgtattctaattactgtgattcctaataggtagctgttagatcttgtttgtaaaaaggaatagctgttccatgatcatgtcaggcatctattgcctattttttgtagcatgatcaaagtaatcctgtcagtggccatctaaaacttttcaaggtcatgtacgaaaatagagtaattcgcacctgcaatgagttagttctctgtggtgtcttgggagtgagaaattacatggtagttgactggtcattgaaccgttcgtttgattgcttaatttccatgttttaaatcatgaaaattcatggttaattttgcaggctacaaattcgatgaacatgatcgcaattcaccccatttacggctccagtttgctcgttttactggccccaggggaggttcaggacctggtggtggtcgtgttaggcgttaagttgttcgtccttttatcaggtgatttgacaactctggctgctcaatgtttttttagaaacaacttgacctcaagttcttcggtggaccagataacatgagtcaatcgcttttcctaccttgtaggcatgatcacatcgaatgttcaagtgaaatgatgatagttcgttggtcgctctagatatattactccatagtgctaggattggtaaccttctgttgttccaagttccaactttggtgccttggctttgtgagatgctttctgacattaactagttattaaacatcaaagctgaaaacaattcgtggcatcgtgcagatgtgatgcttatggccggttatattgggatatatatatatacttctggagacaattttgccgattaatgcgtgttgggagaattttggtgcacatcacatatttgtgtacaacatattatctcccttccgcgtggtgttatatttagtagtctgttctggtttctgatttgcacgactcggcatgcttacattgttttgctacttgtaatcctctcggagattctaaaatgcctcctctggagcgaaaggtagaaattttacagctgcttccatgactcagaaatttcacatgttttttgctgaaactagtttaattcccacaaaacccctccaaaattatgtggtaaatttagatatgaatacctttgaactattttgcttgatgtgggctatgtggcctaggcctgtttagattcaggggtataaagttttggcgtgtcacatcggatgtacggacacacatttgaagtattaaacgcagtctaataacaaaacaaattacaaaatccgcatgtaaaccgcgagatggatttattaagcctaattaattcatcattagcaaatgtttactgtagcaccacattgtcaaatcacggcgcaattaagcttaaaagatttatctcgcaatttacacgcaatctgtgtaagtagtgatttttttcgtttatattaatacttcatgcataagtccaaacatttgacgtgacagaaggtaaaattttgccaatgtgacggaaggtaaaattttgccagaatctaaacagggcctaacagcatggagcaggacgatcgcatcaatcaaccgtgttatcctgtacataataaataaataaaagataccatcgagccataaaaaatgctgaaagagacggcccgcttgcctctattgtaaggcttgtagcattggatcgaacgaattgtcctcctcacagcgacgcaattctcccaaatctgccgtttcattcgtccattagctgaaaaagaaactctacaatctatctataaacagaaggttaggtacctgtgtctcaattttctcactgatgcctacaggtccggagtaaaatttgccgcaccttggacatggactgaaccaaaactttgcagatgcaggcagatttttgcacaaaaagtcaagagtccacataagctactccacggctactagctacaaaggcaggcactctggctctctggcacactggcacagctcccaactcctcccattatccatccatggcgtcctcccatcaccaagaagtacaagagcaaggccatggagatggagaggaagaggaacaagataatagccaaatcacctctccactgtgtaagcacggcaaagcctagtcgtctcagctgttttctttttcccgccatggaacaccactagaagaaagcaaactgttctgttgcctgatgagttcttctcgtgcagtgcgatcctcaatgcggctcggctcgccggaggagaactcgccggtggagcaggtggcgctgacggtgccggtgggggacgacccggcgacgccggtgctgacgttccggatatgggtgctgggcacggcgtcctgcgtcgtgctgtccttcctcaacaccttcttctggtaccgcaaggagccgctcaccgtcacggccatctcggcgcagatcgccgtcgtgccgctcggccgcctcatggccgccgcgctgccggagcgcgtcttcttccgtggccggccgtgggaattcaccctcaaccctggcccgttcaacgtcaaggagcacgtgctcatcaccatcttcgccaacgccggtgccggttccgtcttcgccattaacgtcatcaccgccgtccgagtcttctacgggaagcgcatctccttcttcgtctccctcctcgtcgtcctcaccagccaggtagaggtgacatcaacgtgctgcagtaataacagtacaaggtgtcatgtacactcatgttcatgaacttgagcttcattttgtaggtgctgggattcgggtgggcgggaatattccggcggtatctggtggagccggcggcgatgtggtggccgtccaacctcgtgcaggtctccctcttcaggtaataagcaaatagtaattcacaataatttactctccacatgtgctataaatctgattattcagatatagcttgcctatgattggttaaaaggagttgaattgccacttgtaaagtaatctttccaccagtagaatacattttttttgcgtcgcatgatgtgtgcagccagttgcttgcaattgatgtgttaataaggtacagctaagtgctagactacccaaagataaccaaccaaccaccttcccaaatctcaaaaccaacgtcaacaaaaaaaaagatactttgaactttgaaggacaaataagggtttttattaagctggtgttcaagtcgtatgttgtgtgaacagcactgaatacgatggcactgctattcagcaatatgctaattatataaaaaatattatctgtcctatatcatggttttgtcattttcattcataataagcagagatatattggcacatcatgaattgtctaaaaagtagatattgacataatgactcaagcgaacaggaatcatttaccagtcaattcaataataaaacccacccagcatcatcttcatctgaattctacgcaacaattaggagatttaggcgacttggacactcagctatgcaagtgcatgctgctgcagaaaaccagaattccgtgtatttggagatatcctgagtaataaaagaagcagtcaatcaattttgacagataaaattcaaagaaagaaaacaagatatataaaatatcatatcacttcaattatagacgaagagcagctattaaaactataacaagatttttcgtcccaaaccaaggcataacaattttccatttacgaccaaggaaacaagatcagttacaaccagcaacaagcatcaactaaaccttatacaatatcaagattcatttgagtaaacccgactagacattttaaaacaagatgtttacttccctagaggcttcaatgatttgtcagaaaaacatggatacaatttgtctgcaaataaaaaaaaaggttcagcattttgttgagatgacacttataaatcataataaggcataaatctgtgttgctctgccaatgagtgaattcatctaaaactttcagtggcaatctgaaaagtgagcttaatagccatactggacacacttgcaaatgcagaatcaaattagcagtaaaataataactttctccgtagtcaaaggatggctaaaaaaaaactaccatagaaaagtgaataacagatttgctgcacatgttcatcagggcacttcatgaaaaggaacggaggagcaaaggcggcatgacacgcacccagttcttcttggtagcatttgtgtgcagctttgcctactacattttcccaggctacctattccagatgctcacttccctctcctggatttgttggatctttcccaaatctgtgctcgcacaacagcttggatcaggtctccatggccttggcattggtgcaattggactcgactggtcatccatctcgtcatatctcggaagcccactggctagcccatggtttgccactgccaacattgctgccggcttcttcatctacatttatgtaatcacaccaatcgcctactggattaatctctacaaggcacaaaacttccctatcttttcagatggccttttcacagtgactggacagaagtacaacatctctaccattatagactcacagtttcattttgatacaaaagcctatgagaagaatggaccattatacatcagcaccttcttttctatcagctatggtcttggttttgcatgtcttactgcaacagttgtccacgttcttcttttccatggaaggtatcctccccttccttctccctctaggtctattatgtaaaattagatacacagataaatttgtgacacctgtgtccagtgaaatttggcagctaagcagatcagcttttcaagataaaaagatggacatacatacaaagcttatgaagaggtacaaacaggttcctgaatggtggttcatctccatccttatagccagtgttgcaatcaccatgttcacttgtgagtattacatagaacaattgcagttaccctggtggggggtactacttgcatgtgcccttgcaattttcttcacccttccaattggaatcgtcacagcaacgacaaaccaggtaagaagtaaaagcataaaggcaaatgctaatgcacacatccaagtgtagcacttcagcttattatactgtatgtgacagactccaggcttgaatatcatcacggaatacatcatggggtacttgtatcctggacgacctgtcgcaaacatgtgcttcaaggtatatggttacattggcccacagcaagccctagcattcctacaagattttaagctgggacactacatgaagattccaccaaggaccatgtttatggctcaggtcagcttcactagtcacatgaataaatgggtgtattgcttgtaaaaaaggaggataagcagattatcattttattcagtgttgattatgtccctaatagcaattcaaaaatagcaggtggtgggcactttgatagcagcatttgtgtaccttggaacagcatggtggctcatggatacaatccctaacatatgcaacaccgagctcctccccccaggcagcccttggacctgcccttatgatcatttattctatgatgcatcagtcatatggggccttattggcccacgcagaatatttggtgatttaggcacttattctgctgtcaactggttcttcttggggggtgccattgctcccctcctcgtctggtttgcacacaaggcattcccaggtcagaaatggatcctacttgtcaacatgcctgtgctgatcgccggaatcagccagatgcctcctgccacttcagtcaactacacggcatggatatttgtagcatttttgtcaggttatgtggtctataagtaccgtcgtgactggtgggagagacacaattatctactttcaggtgcccttgatgctggtttggcattcatggctgtcttgctatatttatgcctaggactagagaaaatcagtttgaactggtggggtaatgatttggatggttgtccattagcttcttgccccattgcggaaggtataactgtacaggggtgtccagtggcaagtgcatagccaagtttcttctcatccacagtaccgccggcaatggtatctcaatcatcttaaggaggatgcaaagatcaaagaaccatgcagagaggctttaaacaactcaaaatgaagaccaaaaagaaaatgtccatatgttacaaggaagatgatactacaaggtgtaccgaatacaaaaataagtaaagttatttggtgcatgctaaattgttgccggtgacagaaaacagattatgataatagatgaactgaatttctgaaaccaacactgaattgaaagacagtagccatcgtccatagaaatagttaaagtctgaacatgattccacttacctgtaaaggtaacatcaggatcaccttagcctttaatcatcacaagaaccttgcaggaaaaagtaagaaattcagatgttacttttgctttgagggaaaatgaaacaatacggtcagcatgtaatcctgtatgaaacatggataatataaactgcattatatattgtttcattggaagtataaacagttctgattcatcgtcatgagctagcatatgctactagaatatggtgggaagtgcggtgctgttcacctactatcggcattccatgatttctcaactctataatacacacacacacacacacaccacgattgcaccagcttcagtgcagtatgactactcttacggttctcgctaggaaaataacagagaatgtgaatggacgggtgaatctacaaacgtactctttccgatccaaaataaacttagtgctggatgtgacacatcctagtacaataagtctagatacaaagatattcagattcatcatgtgtgacatccggtacgaggttggtttattttggaacggagagaggaacaaatacagcaagggggaaatcatggagctgttgcccgaatatacttaccacttgccatctcccgcaacaataggtgtactctgaggccttgagcaacacctggtggaatactggagatttggagtgcgtgatggcatcatccagggcgtgctacgcgccagcaagccgggtaggcatttggacgagcaccgtgtgagcgaaaccgacgccgcgccaccagtgtaactttgggaattgggagcacctcgagcgagcgaggccgcacgccgccggggacgaacaggagccagagccggttagcggaggaaggtcttcgcctagggtttaggaaccagaggcggctgccggcggagggcaaggggtgcgcgcggcgcaggagctggagaggtgagaagcgcgtgggcgtttggagaagaagcggatggtgaccgcgccggccgggggcgtgtggagcgcggcggcgaccgacgaggtcgccggcgcctgacgcggcttgccgcgtgtccttgaagatgggcctgaccgggccggccttttagagatgtgggtgggctggatgggctgcatttcgtgaggcctaatagcaccgtggaatacaattcagattagcggacgccaaaactgaagctcttcagagagagccaaaaaaagaagaagaagaagaagcaaactataacatctcttttggacgacacatcaaccaatgcaattcagttttgaattggataccatcaaaacaagagcaaaataacagatgaaagatggaagtataactttcagatgacacaaacttcaccatccatggagaaatataacacatgtttcatttcattctgattctgaacagagattacatgtagaatgaatgatgaaagaatttgattgtaataataatgttgtataataacagccggagacactaatagtgactgtgagagatgctgcccctgctaatctatctactgcttctttgctttctttcttctacatgcagctacattttgcaggggactctctctcaacagccaaaagaatatttataaagaattacaatctaaaaattgaattgaatttgatttaattgaatctttccacctatcaatctataaaacaaaaaactacacctttctttcttctttcttttctctgaatgtataaaagaattgtcatactgtatgaactaatcatcattaacaaaagaagcactgtaaaaaaaggctttgttctttctttctcttcacctaatcaccattcatcgtcagcttagctttgctgagaatgtgatgctgttgtggacgccgacacggtgctgcctcccgcgccgtcgcccgccggcgtccacgccgtcacggtgtacagcggctggtccagccaccggagcgtgagcgcctcgccgccgccgctgccgccgccgccgtgcgcctgcacggtgtacttgtccggcccgaacatcctcgcgatcatgcgcccctgcatcgcctcgcgctcgccgatgccggcgttcttgaacccgccgccgtcctccatgcgccgccgccacccggcgaagctctcgtggcgctcgaaccgctcggggccctcgaacgccaccgcgttgcggatctcccgcgcgaacatctcctccgccttggccctcgcggggctcgcctccggcagccccgccgcgtccaccgcgtcgaacgccgcggcgtagtaccgcagcgcgcgcgcgaaccgcgcctcccacctccccgagttgaggccgccgccctcgtgctcgccgaggaggaggatggtggcgcccgtgctgcgcgctagccccaggaagtcggtcagcgcggcgtcgtcgcggagcaggcggtgcatggcgaggacgcagttcacggccacgcactcgccgcgcttgacgtggagcatccacaggcggacgtcctcgagccggtcgaccacggcgtggaactcgaacgccaggccgagcgcggcggcgacgcgcgccagccgcgctcccgtctcctgcagctcctgcctcgactcgccgactccggtgatccgcacgtgcgccggaggcaccgcccgcgcggccaggctctggagcaagcccggccattggagcccctgcttgatgtcgaagtcgatgacgtggacgcgctcgtgcccctcgaactcgcggaggaggcgctcgttgagcgtgaagtgcaggaacctcgggatgggcgtgatggcgttgagtatccgcagcgccatggcgtcgtcgtcgccgccgccgaaggcgtcgtcggtgagctcccgcggcgggccgatgtcgaacatgtgcggccacatgcgcacgacgcggagcgcgagcgcctcggtgaagtaggcggccacgcggtgcatcggcgtgggccccgccggcgaggccatctcgccgagccgggccaggtagtagttggcggcctcgtggttgccggcggagagggagtcggcgcacgcggtgagcgcgcgcaccagctccagcgcctcccgctccgcctgccccggcgccggcacgccgttcctcgcgtcgaactcgggcggctgcggcggcggcatcatcgccgacgagccgccgtccgtgcccgacgaggacgacgagtcggacggcgacttgctgtactcctccttcttggccgcggccagcgatggccccgcggcggccatgccgtgcgggaacgccgccgcgctcggcaccaagaagaccttctcctcctccgcctcctctccttctcccgccgccgtcgcttgcatcgtccctgcaatggattgatggaaccatacctcatcgccgtcgccgcccatccgcgtccgcttggcgcgaacaatggggccatactcctcgaccgcgtcctcgtcatgcgcccgcttaacggcgcggtgggcgccattgccattgccgccgggctccggcttggcgccccaggacacggactgggtgaccggcggcgcggggtgcgtccggaaggagcaggtggtggcgccgctcctggcgtcgccggcgacccgcggggcggcgccgtcgccgcggctgccgcgcttggagaagccgcaggggaggatgtcgaaacgctgcgcggtgctcatctgatgcctcgacgacgagaacgagcaacccgccaacatcccggagacacgtcactcgccggaacgcgacgtgccaagaagagacctcctcctcctcctgctcctcctcctcctcctcctcgtcttcttcttcttcttcctcctctgtttctcactctgatttctctcacactctctctgtggtatctggctaaggctttggtggaatggaaatgtatatgattcgatgtacaaaagaatgagcagataaaaaccagatgatcttgttgttcttccaaagaatttggtcagtaaatcaacaaagaaaaaactgagaaaaaaagagagagaaataatgtttgtgagatcagatgggggctatgtgtttgtaagtatatatgcaggaaagaatgggtggcttcgccttagaatgcttagtacaaaagaatcaaagaataggatcaagaacaaatgggccctaaaacatgtagaaaaaacaaatcacgaacgatcggacatgccggggcagagcccgcacggcctcctcatcggcgacgacgacgacgagcagcaggcggcgaatcccaacaatacctccattcgtcaaaacaacaaaccaaaagaaaaatcaagaaccctagtagaacatcctaaaatgatggatgcaatgcgaatcaatggcgatggagatggagatgcagcctacaaactacgctatcctagtgatgatatgaaatggaacctactcttgttgcctcaccattaccactcctctctcactaacctctccggtggtggtggtctctgctctcactctctcactctcactcacctctccggtgtggtggaagggaagggaagaagaggccgggaggggcaacccaaggggaggaaaagagtgcgggaggcgcgaatctcgaggcggctcccacgccgtcggatcgcgaccggacggtgcgagatggggtggtccgggatgtgaccgttgcctgattgcctccccccctctctggtcaatgtgaccgttgcggtcaggtgcgacgcacgtgaccaccccccctaacgctgtcacgcacgcgtggacgcggtcacgcagcacgcccccgttcttttgttaccgttgggctcccaccacctgacacgcgtgtctgacgcgtgggcccccgcgccgaaccgacggcccagatcgcgtgagccggacgccacgcggtgcggccacgtcagcgcggcaacggacgctgagctgtacgtacaggctagtgtacagggtggggtacggtgtgctgtacgacgtactacgtggctgtatcctgcgtgtctggtgatgatgatgtttgtgtgtttgccaccgtcggatcgggacacgtacgcacgcatgcgtgtcccgtgttttggcgtcaatgcggggctcagttaatgatgtgccattgctgtcagaaaaaaaagtgtcattttggtacgtgacaaaataccgggtgttttacttgcagacagctattgtcattagctgggttagctgctggtatatttgttttggctactaagtaagctcgagttttgggtttgttttgatcttgaaatgcatcattgtgttgtgccaccacttttgagtcttaatttgtttcttcctcttacttgaaattttgtgggaaattacaagaaatgcgacggtgatgagtagcatcggatcaagctgtacaataaccgttacaattgaaatgactgtttagtacaaccgttatgcgttgccctagcttctactcctaaatggcaacattagtattgcctatctatgaaccactcgtacatatacgcctgtaatggttgatttgcatgatattttgctgtctaaatgttaacattagacgtcggggacgtaaattcaattaccaggttaactacatgtaatatttcacactgtagttcgcgctataaacaaacgttggtttgcttattaacagagtagtttatttcaagtttttttttcaaacaatgtatgtgaaccggcaagaaaacatgagattaaatccacaactgcagttcatagggtccacgtctaactactggagttactcataaattcatatccaaagagccatttgtatttcatacacacagcacctctctaacaggacgtatagtagcagtaccatccaggaacattatggtaacaataaatgaagtttcaatcggatgttattcctggcgcgagcttgaaatcttcaaatcgaaatcttaaaggcacatttcctaaatgtgtgttttatactaataagaatttaacttctcctctctcgtttcatatgtacgcatttcctcaattattgaacgatatgtttttataaaggttttctatagaaaaatattaaaaaacaaaattaatttagttttaagttttttatataatacttaatttattatgcattaatgaatggttctgtttgacatgcgcagcgagaagtttccaaccattttaccgagcacaccctaatttgctttacctaggccgtgtttagttccaatttttttttcaaacttccaacttttctatcctatcaaaatttttctacacacacaaatttttaacattttcgtcacatcgttccaattttaaccagactttcaattttggcgtgaactaaacacacccctagctaaccggagaaagtgtgaggtccaaagcaatagccgttattccgttacaggctttattacaggtcttcttatcgccggtcgtacgttggcccacaatcccggcccgctcaaatcttagctctaaccacgcggcccaacctggaatttgggcccactacacaactggatgttgggcctgatctgcgacaggtgccggcccatatagagtggatcgcggcgcatttaacctccttttccccaattcacggggcggctggcttgacgcgtcatcttccccgcgaaaatttcaaagcagccgaggagaaatccaaaatttccccccaaatctttcccggcacggcgccctcctgctccttccctcgcaagccacccccgccgccgccgccaccaaggcgcgaaatccaaaattcgcgcgcgcccgccgctataaaggcgaggaggggatgcctcctcctccacacccactcgccgagccaactccaatccccaaaccaccagatcgaatcgcggttgccgcggcggaggcgaggaggaagacgaggatgccggcggcggcggcggcgaagacgctggtgccagcccgcggcggcggcgacatggaggagccgctgctggcggagtcgtcggatcgcttctcgatgttcccgatcaggtacccgcagatctgggagttctacaagaaggcggtggcgtcgttctggacggcggaggaggtggacctctccgccgacgcgcgccactgggacgccgcgctgtcgcccgacgagcgccacttcgtctcccacgtgctcgccttcttcgcggcctccgatggcatcgtgctcgagaacctcgcctccaggttcatgtccgacgtgcaggtcgccgaggctcgcgccttctacggcttccagatcgccatcgagaacatccactcggagatgtactcgcttctgctcgagacgtacatccgcgacgacgtcgagaaggaccgcctcttccgcgccatcgacaccgtccccgccgtgcgccgcaaggccgactgggccatgcgatggatcgacggcggcgagcgcttcgccgagcggctcgtcgccttcgcctgcgtcgaggggatcttcttctcgggttcattctgcgccatcttctggctcaagaagcgcggactcatgccgggcctcaccttctccaacgagctcatctcccgcgacgagggtctccactgcgacttcgcctgcctcctctacgacctcctccgcggcaagctcgacgagtcacgcgtccaggagatcgtcgccgacgccgtggacatcgagagggagttcgtctgcgacgcgctccccgtcgcgctcgtcgggatgaacggcgagctcatgagccagtacatcgagttcgtcgccgaccggctgctcatggcgctcgggtgcaagaagatgtacaacgtcgccaacccgttcgactggatggagctcatctccctgcagggcaagaccaacttcttcgagaagcgcgtcggcgactaccagaaggcgtccgtaatgtccagcctcaacggcggcgcttcttgcaaccatgtcttcagcatcgacgaggacttctgatcacatcgactgccatagtagtattaaagtagaaatacatgttctcccaaagtgttcgtatggtttcttgttttatttgttctggtttgacatgtactcctgtaatgaatcaagtaaaaagtttctcaatacatcaactggtcattgcctgtatgcggtgtgttcgacgaaatgcttattagaactcatgccattctgggggcgcaaccagggcgttcgatgaaatgtctctgagcataagatgttccaagcgaaggagattgtgttggggaaatggattatggatcgcttggctccagccgcacgcgcgtcgcctgttccgtttctgttcaccaatccccttcccttcaatccttcccgaaagacgaaacgagcgccgcgccggcgactccaaccaaccgtccaacagaaccaagagttggagacttgctgacagctgactttagcattcgttttcccctgttggcctctcctacacatgaacacatctgttttagagctaggagagagtttaagagaaagggttcagatcggcgattcttgcagacaaccatggtatgattttcttgattattacataggagtacaatacaactaagggtgtgtttatttcacgccaaaattgaaagtttgattgaaattggaatgatgtgatgaaaaagtttaaagtttgaacaaaaagtttggaactaaactcggcctaatatatttttttgctgccttgcaaggttctaaagactatataatatatttttaggtgtttttttaagagattagagcttgccttcttcatgtttcgttgacacgttttcagattccagccgatttgcaatttgcaaatcaaggtactactatattgtacatttgtactactgttcttggtattatgtcagtcaggaagtatttatctagaagtgaaaaaggaaaaaaaaaaggaaacgagtagatgagttaactgaatcttaatgggagcaatcgagaagttctttaggaataatactgattcctttagaaatcccgatgaattggctttagttgttttcaacgagcaaattaatgacagttctagagaataccaataaggcaatagcatcaatcagaatgaagatgtcaataacttgagtgagcatgaaacctaacatgattcggctgatacaaattctgtgggtgttgatgaacaaccaacttttgctattgaatttttgatccaagaaattggggtaatcttgataataaagcaggagatatctaaataccgatttcagggtgcaatctctaccgaatcattgggccacgtggccaaagctaaaagcaagctcacatctcgttaaaatgtgccatgtgtccagaagagcacgttccattccgcacgactgtgaagactctagataaaacaaaggaaaaatccagagcattccaaactcggttgaaaatcacaccaaaacacggaaagaactggtgaaaaagattgcataccgaggaaacaatggagaagaaaaaaaagtgtctaaaaaagtgccccaagttttttaaaggaattttttttaaatctaactataatataattgtaatataattccactataactatactataacaatattataacttgtatataaggtcctttttagttggtgaaatgaaaatttttgggtatcacatcggacgtttgaccggatgtcggaaagggttttcggacacgaatgagaaaactaatttcataactcgctggaaactacaactatactatactatatattgtagttacactgcaactatactatagtaatatttgaaagtttttttttccaaaaaatataaacagcgagccgatgttagctgtcgtaaaccggcgacgaggaagacatctacaacagtattttccggatccacggaagctatttccaacgagcaagatccactcactcaacggatcaagcgaagggcgtcgagccgtaccagctgtgatggtccgcgagtgtggacgcatcaaccagccggtgagcgtcgaggtcgaacacgtccacgccatccacggtagcaacgaccacgacctcgagctcgaccacatccaggagaaagagagagggatgaagaagggcccaatgaggatacccagatttggaggatcaagggacgagggcgatgttgcctctgctaccatcatcttcctctttttctccttattctcgcaagcgtcatcttcctcaattgctcatgcctttctcccagcaccgacgcggcaatccggccttgttctcgcaagcgacatcttccccaacggttgtcgcctttctcccagcaccgacgtgccaatccttgttctcgcaagtgtcgtcttccccaaaggttgtcgagctgagaggtaaaaagaaaagaaaatattaaaacatgaggttttatcaacacttatcataaaacaaacaaatgataaccgtaatattgataagtatatgttaaatattataaaaataataggtatatttgttaaaatattattaaaataatgtgagcgatgatgattagatatacttacatgttgatttgtagaattaaataaattatagatgatgttatacgctagcatgagtttaaatatataaatattgcttttatctgtagtgattgggccacgtgtcctctctcacatggtagataaatctggagaacaccaaaaggggaaaaaatgataccaagagttgggcagttgtgcgtcgagtgcgaaggaaaaaacagggttgtgggtccaatcaatggcgtgcccacatataacttaccggtgtcacaggacaccgggtaaaattgttaaattctaactaatttatgctattttgattagtatactagtgaataattagataactactatgtagtggacctcgagtaatgtagtggaccccgggtaatttttattctagattcgccgctggctccaatcctcccttgcagatgaaaggataatctaaaaggatcgattaggcaatcagcaaatgcctctgtcaatggagccaatggtggccacctgctcaaaatgtatacgttcgctgtgtgtctaggagtacgagggaagagcatggctgtggcagctccagtcctctcacgcagaggaaggataatctggaagtatctatatatcaggggaaggagcaaatgcctctgtcaatggagctcacttgctctacatgtacatgttcaaagatagagtattctatagtacatttgcaaaaaatgttagaatgcatatacaactactcatattcatatatatctctataagtattttcgaaatattgagctgcatatcttaaatgaaaaaaaaaactattttatctcttcgaaccaattcaatggacactactaaaaaaatctatcatgagttaataacttaattgtaatttaaaaaaaacaaaggaataactaatggcatggatggaaaaagggagaaaatttgatgattttctcaacaatatgatctattacgttaaactggaactcaaaaaattccattcaactaagatttttttaaacttttatgaacaatgtgctaattaataacacaaaaataatatatacgggctataaatcatgcgcgccaggtgcgcatgattttctagttttagtggaaatggggcctacaagagaagaaaatattgttttttttgttgtgttcaacttatgaaaagtattattaggcgattggaaattggaatgacagttagtatgacttacggatgtttttgttcaataatataatgaattattatattcactattgcaaaaaaaaaagttatgagggcctctatctttatttcacccaagggcttccaagaagttaggactggccctgaataaaaccttcattggaatgaatggatgaattttcagtgtttgttttgtgagaatcgaactaatttcgatgatgatcctgtgaaatcttaaactattttctcactaattacttcaggctgtgtttagttcacatcaaaattagaagtttggttgaaattggaacgatgtgacggaaaagttagaaatttgtgtgtgtagaaaagttttgatgtgataaaaaaattggaagtttgaagaaaaacctttggaactaaacacggcctcaatcttcgtaaaatttctccgaaattcgtcaagtccaaaggctgcatgccttgctgaattctgtccacacaacaaacgctggtctcgtgtcatctccacatcgccggagaagaagacgatgatgacgtcgacgacgatggcgaggcccacgacgttgctggcgtgctgcaagctctacatctccgagagccgcaacgacgccgccctgcgcgccatcgagcaggcggcgcgcggcggcggcggcggcgccgtcgtcgtcaaccgcttcaccgacgacgcctacaaccgggtgggctacacgctcgtcgcgccgctcaccccctcaccggcgccgccgccgctccggcacgccgtgctcggcatggtcagggcggcgctggaggccatcgacttcggcgcccacgccggcacgcacccgcgcctcggcgccgtcgaccacatctgcttccaccccctcgcccatgcctccctccgccacgtcgccgacctcgccggagccgtggccgccgacatcggagacgagctccaaggttggtgctgctctccactcctcttctcctcaattttcacttcaagaaacaatctaatggcgagctcgccgctgccgaggccgcagtgccgacgtttctgtacggcgcggcgcaccgggaggggaggacgctggcctccatcaggaggcagctcggctacttcaagcccaactcctccggcgaccaatggcggggagcgccggagacggacgccctgcccgtcgcccctgacgccgggccggagaggccgccgagatccaagggcgtggtggtcgtcggcgccaccagctgggtcgacaactacaacgtgcccgtccacaccggcgacgtggaggcggcgaggcggatcgcccgcgccgtcagcgagcgcggcggcgggctcccgtccgtgcaggcgatggggctcgcgcacggcggcggcgtcgtggaggtcgcctgcaacctgctcgacccggcgagggtcggggccgagcaggtgcagggcatggtggagcggctcgccgccggcgagggcctctccgtcggcaagggatatttcactgatttttcccaggataaaatcgtcgacttatacttcagatcagcagccaacactgagggttaactgcagcgcgagtgaaaagtaaatctttacagaaataaatttgatatgatttcacagaaacaagctctcaaccagtggatcactgatgagttctaagttccaactcaagaaatgcaatcacattatcatgcgtaaaatttaccaaaaaaaacagaacaaacgaattgattcaacttaaacttcggtctctgctatatatatatatagagattacatctcaactgctggccagttgattgaactaatcatttgcatatcttgggctacttaactcctgactgattaagctaaacctttagtttgtaccgtgatggccacttgattgaagcggctagctatctctctagctaggctcagtgaagattttgcgagggaagctgagattttagaagaaactgagagtatgtctaaattttcagtgaaattccacgtttctctccattagagttaagtgagttttttaaagaaaattgttactatttccactagcaaggtatatgagacaatatatcgttttccaagtgttgtcactagttaccaattgtttcttacacttgccatctcataaacccactaacctcgcgttattaggtacccatatataaagaaaaataagcgatttaagcatataaactccattgcttagctcttaacattatagcactccctctctctctctctctctctctctctctctctctctctctctctcttataatagttgtataataatatgaaagggaagaagtgttattcgagttctcactttttcttttttctttttacttcaattcagcagactgatttttttatgacacatgatgtatggtatctcgttggcgtatctcagtgaaaactatcatgatggagaggattagaaaagtcagaatatcattggtagtataaaaaaacacatggaggcaactggaaaaggcacaaacaaatctaaccagacttagtttggactaatcagctcaggtcacagggagctaaatgcttaggcttgaacaacaactacagtaatcctcctgtccacttgtgaaacacaggtagaggagatgtagatccagaaaaggcattcttctttaactaaggctgagtttagatccaaagtttgaatccaaatttcagtccttttccatcacatcaacctgtcatacatacacaacttttcagtcacatcatctccaatttcaatcaaaatccaaactttgcgctgaactaaacacagcctaacctcaaattaaacaatcacaatggactgatccccagaaacatttcgatatccagagtcttcttgtgcattcatagaagaaaatattcagactttttgcagatctgaaccagcctttgtcagattgggaaaatagctgtttttgttgttgcaaggatagattcttacatacataccatggttggtggtgtcatgtagaagtagttagtttcagaacttgttggccggttgttgcctaccctgtttgtcactgacctggttagatatctctgaaaagaatgaaaaaaaaaagtattagctttgacaaacgcacacacccatccaataaaaaacaccattcgtgcaagtacaatcctgtggtctgtcattctgtaaatcaacaagaacatgagcagcaatttttcaacgagaacacaaaagatttgcgtgaataagagcaacaaaaccaggccaataaaccattcttgacacttgacaggatacagtgacactgtgttgttgcacatggtaatggcaatcagctattgagctcaccaagcactagcatccatgacactatgacagtatgacatcttgcagtttgcaacaggtgtccaccttccatctcaagcaagcacctttcaaccacctcccctctcttcctcccttctccacacgatctgaattgcacaacagtgaacgaatctgaactatctgaccgaggagatagcaaatttcagttcttgatcggtgattgattcagtgattattcccaaatttccagtagctggcaaaggggaggagaagtcagcggccatgctgctgcgtaccatgaagctcccgctccccgccatggccgccgtcgtggcgctctgcgccgcctcctacctcctcgccgtgtggacgcaccctgccccgccgctccccgcctcctccctcgccgccgtcccgtgcaacacgcggcagccaccggcgcccgcggcctcgaagaacgacaccgccctcgacttctcgatccaccacggcgcgtccgaggaggacgcggccgaggcgggggcgccgccatcgcgccgcgtcccggcgtgcgacgcggggtactcggagcacaccccgtgcgaggggcagcggtggtcgctgcgccagccgcggcggcggttcgcgtacagggagaggcactgccccccgccggccgagcggcggcggtgcctcgtcccggcgccgcggggctaccgcgcgccgctccggtggccgcggagccgcgacgcggcgtggtacgcgaacgcgccgcacgaggagctggtgacggagaagggcgtgcagaactggatcaggcgggacggcgacgtgctccgcttccccggcggcgggaccatgttcccgcacggcgccgaccggtacatcgacgacatcgccgcggcggccggcatcacgctgggcggcggcggcgcggtcaggacggcgctggacaccggctgcggggttagttacttttaccgcgtttacttctcagattaacctggtgatgatagtcactgactggtgggcccagtcccgagtggagtttttccttgttggttgactggtggtcaacgtaatctcgaccgcacatctctgatctgacggctagtggtagagtttgactggttgaggttgatattttacaatcgagtccctattttattttccaaaatttgtttgcaattcaatccctatgaaattcgggctgctatcaatatttctccaccacagttgtgttgttttcatgtttttttttactgtttcttgatcatcagcgcgtagatcagtgtacactttttggagcttgtgttgtgtaccagcgagttaaacacccatgattgtgtttcctagtgctggtttgtttgtagtgaaaaatttcctgatgtagcgagttaaacacccttgtttttttctatcgtatttttgccaaaatgtaggggaaaaaacccttttttttagccctgcgaaaaaagtatggttttttttctactgggtaaatgcctgtggatctccatgtagtcatctgtgattaacaccttcaccagttatccttgccttatctgtttgttaattgttggattaaaaatgccactaggatagttgaatgttcacaactagtactagacatagagtacatggatgcttcgaggacagacagcaaaattagatatatttggatcagcttctggatgtggatcaaagctggttttatgttaactaagtaccctctccatgtgtagagtcggtgtgagaaattgaaaaaagaaacaatggattaattgatgttaggtctgagtcggtgattgatatctagtttggtaggagagttcgatagaagtgtgcacatggaattgtgtactgatgagagcttatttggataagaaaatactaatcatagtccaactaaccagacggcagatagctttatctgaactcaactgtgcatctttggatctggttgctcgtactccctccgttcttaaaaaaaataatcaaaaatcaagtttttaaattagaaattggttttctttcaggacgaagagcttaccttactaattgatcattcttgctacctttgtgttcactgtaaagatggtacaagatgtctgatgcgacatatatatccagctatcaacactattgaacaaaatgtccaagacatgattttcttcccccttgttgttggcttgtgtttcttggctaacttcaaccggagtacgacgagtttaacactagtatcgtttacccttcggcctgtaatttaatcatcataaataaaacgatggttgtataaaacgcgtcaaataagatttctcgtaaacaaagttttttcatcagacaaatcatccttactcgggaaacactcatgcatgagtcaagctgttggctatgacaattgatgagaaatgcccaggggttttccggctagctccacagggtggtgggctagacgacttgggttcagagcttcacctcttctaattatttgatattaggtcatttcctaatatccgtgtcttctttgctatgacaattgacaaatcaatctgatgctaatgtgcactgtctactactctgaactctgaagtgtgaacgaaccacatgtgcaggtcgcgagctggggagcgtacctgctgtcgcgcgacgtgctgacgatgtcgttcgcgcccaaggacacgcacgaggcgcaggtgctcttcgccctggagcgcggcgtcccggccatgctcggcatcatggccaccaagcgccttccttacccggctcgcgccttcgacatggcgcactgctcccgctgcctcatcccctggagcaagtacagtacgtgctttgtaactccaccacctcaaatttcacccctgcaaaatcaaacttgtgcttaatttgatttggaagccaccaagttgacaggctttttcgaagttaaggacgagattcggtcaaacttttgaaattccaaccatccatggataatacctcaaatgcttattttaaaaacgaaagaagaaaaagtactaaagtagtatcattgtatcatacttattataataaaaaactagcatggtggcccgcgcagattgcgcggctagtatcattatattttctctcatataatagcatatatgttttctcattatattattcaaatatattaaaatgacaacataattttaaattttgcaataactttacaaaactactaatgtgtaatattcatattatattttatatatgtttagttattaattatttttaatatcaaattttagttatttgtaaattatatatattcctatatggactctagacttgtcttttaatatttattttttctaattccgaattttctgtaaattatatttctatataggctctatgctcttcttccaatattatttatttttatttttgaatgttcatattatattttatatacgtgttagttattaattatttttaatatcaaattttagttatttgtaaattatatatatatatatatacatatatatatatatatatatatatatatataaaatttaaaaataactatatatatatatatatatatatatatatatatatatatatatatatatatatatatatatatatatatatatatatatatattcctatatggactctagactcgtcttttaatatttctttttttaattctgaattttccataaattgtatttctatatagactctacgctcttcttccaatattatttatttttatttctgaatttttattatttctaattgtatttctatgtggactctaaactcatctttcaatattctttaatttttagttttgaatttcagttacttctaaattgtatttctatattgaccttaaactcttcttcccatgtttttcttaatttcgaattttagttatttgcaaattatatttttatacgaactctaaactttacttttaattttcttatgtttattccaaattttatttagtttaaaatccctatatggactctatactctacttctaatattcctttttttaattccgaatttcttttttttcttaattgtatttctatatggactctatactctacttctaatattccttatttttaattccaaatttatattatttcctaattgtattcttatatggactctatactatacttttaatattccgaatttctgttatttcctaattgtatttctatatggactctatactctacttttaatattccttatttttaattccgaatttcagttatttcctaattgtatttctatatggactctagtctcctcttctaatattccttatttttaattccgaatttcaactatttcctaattgtatttctatatggactctagtctcctcttctaatattccttattttttaattccgaattttaggtatttctaaattgtatttctatatggactctgttttttctttttctccgattaatgtgagaatttctaggccatgagagcgaacgtagaaattctattcctttaataatataatagatttttggtcgggaatttcgaagtttgattaaatcttgttctaaacatcgaatatttatgatcggaggggtagctttgattgatcatggcaatatcaacaatggttgttgcatttcagacgggctctacatgattgaggtggaccgggttctccggcccggcgggtactgggtcctgtcagggccgccggtgaactgggagagacatttcaaggggtggaagaggacgccggaggacttgagctccgagcaatcggccattgaggccattgccaagagcctttgctggaccaaggtgcagcagatgggtgacattgctgtttggcagaaacaaatcaaccatgtcagctgcaaggctagcagaaatgagcttggtggtcttggtttctgcaattccaaccaagatcctgatgctggctggtatgcatgtttatcacctgaaaatgatccaaacatgattccattcgaatgaaaatttaagatttgatttgattaacaatatgtagttttacacattataccttaaatctgtagtttcgtggtaaactcggcattaaatctgtagtttttttatactccgtcgtaaatatgtagttttacaatagtttggtcaaaatatcagtagttttacgaaaaatactcaaaaacatttataaactcttaaaaaaatgttggcttcgtttctgaaagttcttgaaaaatgatttcaaggtatgtgaacatggaagagtgcatcactcccctaccggaggtgtccgggcccggagacgtcgccggaggggaggtcaagagatggccggagaggcttacatcgccgccgccgaggatcgccggcggcagccttggaagcagcgtcacggtggacacctttatcaaggattctgagatgtggaggagacgagtcgatcgctacaagggcgtcagcggcgggctggccgagaaaggccggtaccggaatctgctggacatgaacgccggcctcggcggcttcgcggcggcgctcgtcgacgatcctgtctgggtgatgaacgtcgtgccgacggccgccgttgccaacacgctcggcgtgatctacgagcgagggctcatcggaacgtaccaagattggtaagctgaaaattcttctgaccaaaatatgttcagtgtcgttgctaatgcaaaatcttcagaaaacaattgcagaccagcatatgtgcactgctttcttcttcagtgtattcattgctgcaaaatcttcaaaaaaaaaaataaaattgcagactatcatatatgcacaggcgtgtaagcggattgacccgtgaactcacttataagctaattaagtggatcgatcaactggttacccacttatttggcgaataagtgagttggtgggtcagcccacttacactccagcactgctttcttcgtcagtgtatttgttgctgcaaaatgttccaaaatttacaggtttattggtctttaattagtatgtgaaaattttgcaggtgtgaggcgatgtcaacttatcctaggacgtatgatctgatccatgcgtactccctgttcacaatgtacaaagacaggtactggattttgcttctgtttcttgtgctcaactttgcagttgctccagccatgaagctagctgaatctattgctgttctctgcatgtcatcagatgtgaaatggaggacattttgctggagatggaccgtgtgctgaggccagaaggcacggtaatattcagagacgatgttgatgtcctggtgaagatcaagaacatcgcagacgggatgagatgggagagcaggatcgttgatcatgaggatgggccgatgcagagggagaagatccttgtgtctgtcaagtcttactggacagcctaagggttcgcaaaaatggcattcatcatgctgatgatcattttgagctatagattggaacattggaggcagatttatagaaacagatagtttcagttgtcccccctcttctagtacagatagtttcagttttctcctgtcttctttccatatataggttctttattttcttaaaattctctcatattgttttagttttatcctttccatttcatgccatatggagtagcttttttttatttacattttcgttttctcctttctctttccttccatatatgtcttttcttattattttatctgtcaatttatctgacgtaaacggatattaaagaaataggcaccatttttgttaaggtgtgaacagtcactggatttcggattaacatgatacggagtatacatttattacgttcagcttctttacggtttagaatgcggttaaccagaattgactttcatctggtaaaattaaacatgccgctaaacaagggaccataacaaatagagtgaaatttggaacaggacagccaagtttgtccccaaaagctcgattggttgagcagtctgaagatgagaagcaaatgcagattgacagaggacagatgatcaagacatccttaatacaatctagaagttcgtatggtaatcacagtatggtacatatgaaagaaatcaactgacctaactcgatacaaacccaacaaaagaacaagggggtcccaaagtggcacccgatcacatcaaacatctctgcctcgaaggacccagtattgtcaagaataacatcagccaagtgtaaaataataatacacaaggaaaagaagagccgcgatgagaaatgtgtacattacaaaggcagctgggttctgcttttaacaaccatgtccgtgccctactgaaatctcagttttctccttatacttcatggttgctaatttacatggataaactctccagctctttgagaaagcggtttcaaagatcatatacattgctaaccaatctatcactcgtgaacaaatatgtttgtagttcaattcgtcaggcttccttacagaacaaaccacaaatcaatttgagagctggaatcttcctgtcggtttcctctttcgccatccctgaacaaacagttcaggacaaataagcaagccaacatttttccagattttcatacgaattgactgaatactttggaagaatgcacttacaaatattgcatagtaaaagagtgtgagtatcgcaagagccacaaagccatactggaaaacattgtacctgcatattcagatgttaaaatcagaacattttcaaaagtttgatgctccaatatccaccacatggatatatccagcttattcgagcaaacaactgtaaactgactatggatttgcatgctagatacatacttgtagagatacttaattccacggagagattgcagtgtgtggccaaagatctcctgagctgcagttgcttgcgcataataagcaaaagctgtggcacagaactgaatcacactgcaaaagattttagatggcctcttagtggagaaaattaacagataatcagcaggtatgcatatgttatggaggaagcaaggttgatgaaaccaacaaagtcgcatgtcaacatgttgaagcgatttttcagctgcactaggcacaagctaagctacgtcaactcaatgtttgctttacaaaagttcttcatttacactactgctaaccgttaaaggacacactgattttatatatagaaacaatttcagatatatgcaacaaattcacaattaatagacgctaccttgtcagcatggaaaaagttccaatatggaagatggcatcataatttacaaaaataatagcaataaacaattacatctaaaagaagcctcagtagcacacctgatggagcaaagtaggatgagtccaacattaaacaggaacgagttcatcaaagttcctccccatctgaaaaaaaatgcgttatcaatgattccaaaaaagatactacatagaaaaggaaatgccatgggatatgtcaaatacttcattgggtgaatggtgatgaaaactaatttcaaacccagcatcatttccccagcaatcactgctatgaggagatagaaacagaagaatgcaaaggcagcagtcccaagcagacctaatacagaaaacagaatattggtcaagctactgtcatcaataggacgagttcagaacaatgtaatgaacagaaatataccccaaacaccatccaattttacgaagatttcattcaggaaggaggacaaaggagggtcaatcaacaagtatatgacgatatgtgcaacccaagcaatcgatataattaacctgagatcataagtagctattagaagacaattgcagataggttggactagaatagaagcaaagtccgtacaactatttacacatacccgacagcaccaaataaaagttttccaatgtaaccaagaactgtcaaagcccaggtagcctcagcctgcaccatgatggatgttaagccagcaataaaccaaaagaaacaatgtaaataggatttcatgttcagttacctgttctccttgagggtacatctcttcaagagccttcatgtcatcttctaaaagtactaattcctgatgattaaaagggcaggcaaaacataataagagcattaatagagcattacagaaattattggcatgtggtacacaaatggacacgagtgttctgattagaaaggaaatggaacacaaatgcttcttactccacactaatctcaaaaaggtaagtttgttcactgagtgaggctaaaagtttgaatggcaatgctcaccttcccaagggccttgacatttttgcgccattttctgcccttcttcccacttttctcttcttggtgaagggcttcagctgctttcttcaattcccgagccttcttacctagttcagttgcttcctgcagaaaatatgttcagtctcaatccacattgaaaatttcaaagtgataattatatgtagtagaaaaatatggttctaatgaatgctcataattgaaaagaagtatgtgagaatataggcacctttatatattgtgagcgtgtaatgacagcttttgggcgccggacaaatgagaatataagtcccaatggaaggcaagcaattccaacaccaccaaatatctaccaaacaggaataggaaagttgtaaaaagaaaccagcatgattgcagcagaattggatgttggaaaggatccatatttcaaattgtttctagtacagcttacactcaataaaagacataaagctatcggtcacatgcagaccagtagagtgaatagatgtagctatacagaaacggtgataaagcaaaacatgaagattgaagtaaaactcactgtgaagagaacagatccaacgatggtagcaagagcaaccacatattcagggaaggtagcgcgcattgtccaagttgtttgagagttagcaggtgcagtgtaagctgcgcactgaataaaacaaaccgtaaagcagtttagtcgtagataaaatgccaaaagaaaggtgtcgatcaaatgttgctattggatggggagcacataacatcattactataggcataagaaagcataatttgattgattgactaacctgcttgggcgatgtactgatgcaaggttgaccagttgagaaactagtgaatgaatttggaaatgtctcaactgctgaagaaagatgcctgacagtgaagtccactttgccaacaagtcctgcagcagaacaatgaaagtgaggtcatgtaaagtgaaagcatcccaaacccttagaagccacggtgttcacaagaccactttttttttccttgaaaaaaaacccttttttttgcagagggcattcaagggacctagcaggagttcattttaatacatcgggtggaagaaagaaacaaggattatataagaaacagcgcaaaaacaaaactaccaattgtgaagctacagactactggtcgataagaaaacaatttgcgggtataatgtggaccggggagatatactacacaacaagtgcaaagctcaaacaggacaattcagatctggcagctgccttcctggtttgtacagcattgattgctcgaaaataagtactaattgaaaagctcaaagcttgagctagtcactccaagtgaagccagaagaattaacactagtaaccaaccaactcaagattcaggtagaacaggtcacatagcaaattcgaacagattcaaaaatcccactccaatattactactagtctagaaattttagcatgataggcaaaggagagcagtgatccgcaccgtataggatgccgaggatgaggccgcaaaccaccgcggagacggcgacccacaggagagcggaggtgagcctcttccccactgacctgcaggaagcaacaacacacggatccaatcaacaacattcagtgagagtttagcagcagatgcgcaatgggatagaggaaagagtggaaatgtatatgtatactacttacttgtcctggtcgccctcgtagtagaacatggcgaaggggatgacgaggaagacgaggacggcgtcggcgatgtagacggcgagccagagggtcttcatggggagggtgagggagcaggcgccgctgtagatggcgcggcggcaggcctggcggttggcgacgtcggcggggagcatgaggatggagaggagggcgacggtgatgccgaggacgacgacgagcttggggaagtaggcctggttggcgtcgtcggggtgctggtagttgatgagcaggtagacgctgacgagcaggacgaggacgctcaccaccgccgccacgatcaccagcgccacgttgaagtcccccatcgcggcacggtaccagatctccgctactgcgcccgcccgccggctagggtttgggcggcggcggcgctgcggccaccggcggcgtgcgggatctgggggatttgggggggaggaggagttggggttggggg
